United States Patent Application Publication US 2003/0143606 A1 - sequence listing, part 4

SEQ ID NO: 1217 - DNA, 6078 bp, Artificial Sequence
  chemically treated genomic DNA (Homo sapiens)
tgagtattttttttttttaaaattgaagtatttttgggaatatttttagtgggggtaaatttattatgaatatagaagcgaagtgttattgaagttattttttatttatatttgaaagaatatttttattatttagagagatttttaagtatttaaatataagatattttaaatattaataaaaatataatttaaaatattatgaatatttaaaaatattagtttttatgttgttaattgttgaagtgtatatttattttttttatagttcggattttataattatttatttttttatttgtgtattggttgtttttttttataagtttatgtttgtatattagtgtttagtttaaggtttggtatagaggaagtgtttaagaaatattttgaataaattaagggggaaataatgtgagggaatggggaatggttttataagatgaattagatttggaaggaaaggaataatatttgttgaatgtttattatgggataggtattgttttaagtgttttatatgtttatttgtattatatgatatgatatagtatagtttgtttattattttagtaggatgtaatttttagatgatagagaatttgtattatttattataaattttttagggcgtatattaggggttgatatatagtaggttaatttgtaaatatttattgaataaatatataaaaattattttttttaatttttataataattttaaaaggtaggtatttttaatatttttatttttttgatgaggaagttgaggtttcgaggtaataagatttttaaagatatagggttggaaagatttaaatttagttagtttgattttagattttatttttgttatggattgaattgtgttttttgaaaagatattttgaagttttaatttttggtatttgtggacgtaaaattaatataattttttttttttttttttgagatagagttttgttttgttgtttaggttggagtatagtggtataatcgtggtttattgtaggtttgattttttgggtttaagtaatttttttgttttagttttttgaatagttgggattataggtgtatgttatcgtatcgggataattttttttttttttaagttttttgtagagatagggttttattttgttgtttaggttggttttgaatttttggttttaagtgatttttttgttttgattttttcgaatgttgagattataggtgtgagttataatgtttggtttgaaattaataaaatgtttttaaaagaatgtggtatagtgtttatttagagtaaataagaaataattttaaaagaggaattgagaaatattttaaataatggtagttggttagatgttgtggtttacgtttgtaattttagtattttgggaggttgaggcgggtagattatttgaggttagaaatttgagattagttttgttaatatggtgaaattttgtttttattaaaaatataaaaattagttagatgtgtggtgtatttttgtaattttagttattagggaggttgaggtaggggaattatttgaatttaggaggcggaggtcgtagtgagttaagattacgttattgtattttagtttgggtaatagcgtgagattttgttggggggaaaataatggtagtaatgttgagagtatgtgtaaaatttttttagtagtttgttgttttgaagtataatagttatgtggatatttgaattttagaaggtttatttaaatgtagttttattaatttagaattttattttatatgttatgttattaattgggatgtgaatttttaataaaatggtttgaggaatgaaataattgggttgattatttgagaagaaggaaaagaattagtgttttgtaaagaaaattagtatgttgtatgtatttacggttataaatagttatatatgtgaaattaataaggtagtataatttgagttattttgcgatttatgtaataatatttgtatgaatattataataatataggtatgtatatttgatttttatttatttaaaatatttaattaagggtttaaatgtattggattagatttgtgttttttaattcgatggttattggtatgttattaagtatttgaaatgtggttagtgtaaatgagatatttagtttaaattgtatttgattttaatttaaatataaaatagatatttaatttagttattggaaaattttaaggtatatttgtaataagttaggtatgagagtttattattgtaaatgtaagttttataaaattgaaatatagattaaatttttgataaaaatttggtgtttaaattgagatgtgttataaaatgtatattagattttgaagatatagtagtagtgtgttttttgtgtgaagaaatatagaattatttagttaatattataaatttttatttagatatgtattttttttattaattttttttattttatgaaagtaaaatattagaattgttgtatgtattaagagttattttttgaattttttatatttgtaattttaattgatattatattagagtatttattataattatattttatgttgtaaaagttttttgtgtgttaaattataatttgggaaagaaaaatttgattttgattgatggtatttttatttgtgtataatagaaatttatgttttagttttttaatttgtgaatgatatttatttttaatattattaattgtttttagagtgatagtgtaattatagtttgttataaggtaaattaaagtagtttttttttttgtatttgtttttttacgtttttggaaataaaatttaattttatgagattattatttaaaaaagattgaaaattttgatattttagttaatatttatgtagaaaaataggttttttttagtatttttggaattatatatgaatgtattaaatggtttttttagttaggttttattttgttttatttaagatgacggcggttattttaataattaaaataaatatatagatgaaagatgtgaattttatttattattggtaggatattgtaatttttttgtaatgttgtttttgagggagaggttatatattttttgtgggttattttttgtatttataatattttttttatttgtagatattaaattttagaaataggaataggtaggtagtatatttaaatttatgtaataagtattttattataataagggtttgttgtattaatatttttgtttttttttaagtagtttgaattggtttttatgttagttgttaaattgtttttttttatataaaatattttaattgtaatgtgttttagttaatttaggagagtgagttgtgtaaagtatattttttttttagatgttgtaggattgagtatttatggagtatagaattaataatgaaaggtgttatttaattttaaggattttttttaaaaagaattttgtgatgtttagaaaatattttttataaaaataacgaattttagataatttaggcgaggttaaagaagtttttaaatgtaaatacggataaaatataattattgtaagaaatttttttgataaggtaaagttaatataattagaaatgaaaatattgtgattggatgtgtgtttagtatatggagatataaaattagtaaataattttaaatattattttttgtaatattagtatgtagagataaatgggatagaaattagtaattttatttaattgaaaaggaaattggggtatagaaggttttagtgtttgttgttattaatttatttttattagataggtattttttttggttatgatttgattatttttttagtttatgaatttttaagtataaatattaataaaataataaaaaaatggttcggcgcggtggtttatatttataattttagtattttggaaggcggaggcgggcggattatttgaggttgggaggaaggtttgaaagattgtttatttattattatttagagagagtagtggtttttgaatattaggtttttagaatttttagagaaataatatataagataaataggattgtttattgggtttttgtattttaatattttgatttttattttattgatatttaaatataatttcggtggaaaatttgtagaaattgataggtgtggcgtttgagtttttttttttgggtttttttttagtttttttgggtttcggtattttgggttaaggttggtttttttcggttttagggtttcgggtatggtcggtattttggatggtacggcgaaggttgtggatttgtagaaagagggtttttaagacgttaataagataggagagacgagtttgattttttttagtttgtcgaggtgttttgttaatagttttggggattttttacgagttttttcgttttgtaatttttttaggtgtttgagcgatcgtcggttttgtttgaatcgtttaggttcgtattttttggtattttttcgtattttttttagttttttcgggtagggggattttggtttgacgtttttcgttttttgttttcgttttgggtttttggggttagtagagttatttagtgtattgcgtttaggtatgtttatatggagagaggcgattatagcggtgattataagtttatggtgggtagaggttttatggagttaagggtttcggtcgttattttcgtttcgttattagtagcgttgttaggattcgttttttttttttttttttatacgtcggttcggatgattttttgttatgatttagcgtttttcgtaggttgttttgttggggatatcggtttcgttcgggtttttttcgacgcgtttattttttttcgttatttacgttcgtttttagtcgttgggttttttttagtgcggtcgtcgtcgttatagttgtagttagtatcgttattttagtagtattcgtcgtttgtatcgcgcgtgcggttcgtttcggtttgatttcgtcgtcgaattcggcgttagttatggagttcgaagtttttcgtcgtcgttatatttattagcgcggttatttgttgatacggaatttttattttaataaggtaaattcgtaggtttatttggtcgtttatcggtttttttttattagggttagggtttttttgtaggttttcgtattatggtttcgttttttcgtcgtttttttgggaaggttttcggtgagcggtcgcggtttggggggttttggtgtgggtagaaggaagaaggacgtttaatcgggttcgtatttattagagtgatggtagggtagtgttggtgtttttgtatttcggtattttatgttagggatagaggtaaaggtaaaggttagtgatagaggaaaaggtgatatttttcggtagtttttttttaaaaataagagtttagataatgaaagtagtattagataaagtgtgtgaatggagtgttaggttagattttatgtgttatttatttattggttgtatatatagtgtggtaattattggaagttgataaggcgagaagtggtttaattggttttgtttagatagaaacgtgtattgagtgtttttagattacgttagtaatttggaaatttaagttttttcggtttttggagtgatacggttaagagtttgggaatgcgtggtgggtggtttttgttttggatattttgtatggtttggtagaagaattttgttttagatatgggattgtgggtaaagttatttttttttttttttttttttgttttgttttgttttgttttgtttttaatttggttttttggaagttaaaaaaaaattttgtttagagttgttttttttttattaaaggggaatttagtgtatattttgtttagagattttttttcggattttggtaatattttatttttttttattggtgatgtaatataagtattcgggatgttttttaaataaaaaatattttcgaatttattattttgtttttatatttattttatagttaggtttgtttcgggattgttttttttgtgtgtgtgtgtgcgtgcgttttggatattttttatttatttaggagtttgaaaatgttatt

SEQ ID NO: 1218 - DNA, 6078 bp, Artificial Sequence
  chemically treated genomic DNA (Homo sapiens)
gatggtatttttagatttttgaataaataggaaatgtttaaagcgtacgtatatatatatataaaaggaataatttcgagataaatttggttgtaaaataagtgtggaagtaaaatgataaattcggaggtattttttatttgagagatatttcgagtgtttatattgtattattagtgaaggaaaatgaaatgttattaggattcgaaaaggagtttttgaatagggtgtatattgaatttttttttaataaaaagagagtagttttaaataaaatttttttttaatttttagaaagttaaattaaaaataaaataaaataaaataaaataaaagaaagaaagaaaagaaatggttttatttatagttttatgtttgggatagagtttttttattaagttatgtaaagtgtttaagatagaggttatttattacgtatttttagatttttaatcgtgttattttagaaatcgagaggatttggatttttagattgttaacgtgatttgaaggtatttagtatacgtttttgtttgggtaggattagttgagttatttttcgttttattaatttttaataattgttatattgtgtgtgtaattagtaagtgagtggtatatggagtttgatttggtattttatttatatattttgtttgatattatttttattgtttgggtttttgtttttggagaagagttgtcgaaaagtattatttttttttttattattaatttttatttttatttttatttttaatatgggatgtcgaggtgtagaggtattagtattgttttgttattattttagtggatacggattcgattaggcgttttttttttttttgtttatattaaggttttttaggtcgcggtcgtttatcgggaatttttttaggggagcggcggaggggcgaggttatggtgcggggatttgtaagagggttttgattttgatagagaggggtcgatgggcggttaggtgggtttgcgggtttattttgttgaggtgagggtttcgtgttagtaggtagtcgcgttgatgggtgtggcggcgacggggggtttcgggttttatggttggcgtcgggttcggcggcggggttaggtcggggcgggtcgtacgcgcggtgtaggcggcggatgttgttggggtgacggtgttgattgtagttgtggcggcggcggtcgtattgggaaaggtttagcggttgggggcgggcgtgggtggcgagagggggtggacgcgtcgggaggggttcgagcgaagtcggtgtttttagtagggtagtttgcgagaagcgttgagttatggtaggagattattcgagtcggcgtgtgaggaggaggaggaagagcgagttttggtagcgttgttggtggcggagcgggggtggcggtcggagtttttggttttatagggtttttgtttattatgggtttatgattatcgttgtggtcgtttttttttatgtgggtatgtttaaacgtagtgtattgggtggttttgttgattttagagatttagggcgggggtagggagcggggagcgttaggttaggatttttttgttcgggaaggttggagaaagtgcgagaagatgttagaaggtgcgaatttgagcggtttaggtagagtcggcggtcgtttagatatttagggggattataggacggaaggattcgtgaggggtttttagaattgttgatagaatatttcgataggttgaggagaattagattcgttttttttgttttgttagcgttttggaagttttttttttatagatttataattttcgtcgtgttatttaggatgtcggttatgttcggggttttgaggtcggagggaattaattttgatttagaatgtcgaggtttaagggaattgggaggaagtttagagaggagagtttaggcgttatatttgttagtttttatagattttttatcggaattgtatttgaatgttaataagataagagttaaggtgttagggtgtaaaggtttaatgaatagttttgtttattttgtatattatttttttgggagttttagaaatttgatgtttaagaattattgttttttttgaataatgatgagtaagtagttttttaggttttttttttaattttaggtgattcgttcgttttcgttttttaaagtgttgggattataggtgtgagttatcgcgtcgggttatttttttattgttttattgatatttatgtttggaggtttatggattggaggaatagttagattatagttaaaaggagtgtttgtttgataaaaataaattaatagtaatagatattaaagttttttgtgttttagttttttttttagttaaataggattgttagtttttgttttatttgtttttgtatattgatattataaaggatagtgtttgagattatttgttgattttatatttttatatattagatatatatttaattatagtgtttttatttttagttatgttaattttgttttattagaaagattttttatagtaattgtattttgttcgtatttatatttagaagtttttttgatttcgtttgaattatttagaattcgttgtttttatagagaatattttttaggtattataaagttttttttgaaaaaaatttttgaagttaaatgatattttttattgttaattttatattttataaatatttaattttataatatttaagaaaaaggtgtattttatataatttatttttttgaattaattgagatatattatagttagggtgttttatgtgagaggaaatagtttaatagttggtatgggagttaatttaagttgtttaagaagaaataaaaatgttagtataatagatttttattataataaagtatttattatatgaatttagatatattatttatttgtttttgtttttgagatttaatatttatagataggaaaagtgttataagtatagggagtaatttataaagagtatatggttttttttttaaaggtaatattataaggggattataatattttgttagtagtaggtaaagtttatattttttatttgtatgtttattttaattattaaaataatcgtcgttattttgaatgaaataggataaggtttagttgaagaagttatttagtatatttatatgtagttttaagaatattagaaagaatttatttttttatataaatgttagttagaatattaaaatttttagttttttttaaataataattttataaggttaggttttatttttaaaaacgtaggaaaatagatgtagagaaaaaaattgttttaatttgttttgtaataaattgtggttgtattgttattttgaaagtaattggtaatgttaagaatgggtattatttataaattaagagattaaaatatagatttttgttatatataggtgagaatgttattagttaaaattagattttttttttttaagttatagtttagtatataaagagtttttataatataaaatatgattgtaatagatattttgatgtaatgttagttgagattgtaagtatagaaaatttaggaaataatttttagtatatatagtaattttaatattttatttttatgagataaaaaagattaatagaaaaaatatatatttaggtgaggatttataatattaattaaatgattttgtatttttttatataaaaagtatattattattatgtttttaaaatttagtgtgtattttataatatattttaatttagatattaaatttttattagaaatttgatttgtattttaattttataaaatttatatttgtaatagtagatttttatatttaatttgttgtaaatatattttaaagttttttaatgattaaattgagtatttgttttatatttaaattaaaattaaatataatttaaattgagtattttatttgtattggttatattttaaatgtttagtaatatgttagtgattatcgaattagagagtataagtttaatttaatgtatttgggtttttaattaaatgttttaaataaataaagattaaatatatatatttgtgttattgtaatgtttatatagatgttgttatatgaatcgtagagtaatttaagttatattattttattagttttatatatatagttatttataatcgtaaatgtatgtaatatattgattttttttataaagtattgatttttttttttttttttagatagttaatttagttgttttattttttaaattattttgttaaaagtttatattttagttgataatatggtatatggaataaaattttaaattagtaaaattgtatttaaataaattttttgaaatttagatgtttatataattattgtattttaagatagtaaattgttggagaaattttgtatatatttttaatattgttgttattattttttttttaatagagttttacgttgttgtttaggttggagtgtagtggcgtaattttggtttattgcgattttcgttttttaggtttaagtgatttttttgttttagtttttttagtagttggggttataggaatgtattatatatttggttaatttttgtatttttagtagagatagggttttattatgttggtaaggttgattttaaatttttgattttaagtgatttgttcgttttagttttttaaagtgttgggattataggcgtgagttatagtatttggttagttgttattatttgaaatgttttttagttttttttttggaattattttttatttattttgggtaaatattatattatatttttttaagagtattttattagttttaggttaggtattgtggtttatatttgtaattttagtattcggggaggttaaggtaggaggattatttgaagttaggagtttaagattagtttgggtaataaagtgagattttgtttttataaaaaatttgaaaaaaaaaaaaattatttcggtgcggtggtatgtatttatagttttagttatttaggaggttgaagtagaagaattgtttgagtttaggaggttaagtttatagtgagttacgattgtgttattgtattttagtttaagtaatagagtaaggttttgttttaaaaaaaaaaaaaaaagattatattagttttacgtttataggtattagggattagaattttaaaatatttttttaggggatatagtttaatttataataagaatgaagtttagaattagattgattgggtttgaatttttttagttttgtgtttttgaaaattttattatttcggggttttagtttttttattagaaaaatgaggatattaaaagtatttgttttttaaagttgttatggggattaaaagaggtgatttttgtgtatttatttaataaatatttatagattaatttattatgtgttagtttttgatatacgttttggaagatttatagtgaataatataaattttttgttatttagaaattatattttattgagataataaataagttatattatgttatattatataatatagatagatatgtaaagtatttagaatagtgtttgttttatagtaagtatttaataaatgttatttttttttttttagatttggtttattttatgaagttattttttatttttttatattattttttttttaatttatttaaaatgttttttgaatattttttttatgttaagttttagattaggtattggtatgtaaatataagtttatggggagaaatagttaatatataagtaaagaagtaggtaattatgaaattcgaattgtaaaagaaatgagtgtgtattttagtaattagtaatatgaagattgatatttttgaatatttataatgttttaaattgtatttttattggtatttgggatgttttgtgtttaagtatttgaaaatttttttgaatggtagaagtatttttttaaatgtaaataaaagatagttttagtaatatttcgtttttatgtttataataaatttgtttttattggggatatttttagaaatattttaattttgaagggggaaaatattta

SEQ ID NO: 1219 - DNA, 6077 bp, Artificial Sequence
  chemically treated genomic DNA (Homo sapiens)
agattttgtatttagaagagatttttttttttttttaaggattatttagaaagtgattgagttatgtttagttttaaattttatttttatatttttgtgaaaaagtttatatttgtataaattaattttaattgggttttttgttgttgggagttaaaaattatttttaatagttattgttaaaatgtataaaattttgtttttgtcgtaatatttttatttatatttttttttttagaatagtttattaatttttattaggtttaattgaggatgttaagtataaattattagtagtagattagtaataatagtagtaaggataattatagtattgttttgattttgtgtgttttgatttattatatattagattttaatatttatttttaaaaattttatatttgaaaaataattatatatttatattatttttggagatttatggatgtatataattttttttggttttttaattgatgagatattttagtgttttattataattattattggattaaagtagttttttttttgggagatagggttttattttgttatttaggttggagtgtagggatgcgattttagtttagtgtaattttcgttttttgggtttaagtgatttttttattttagttttttaagtagttaagattataggtatgttttattaggtttggttaattttttttttttttttgtaaagatgaggttttattatattgtttaggttggttttaaatttttgtgtttaagtaatttatttattttggttttttagagtgttgggattataggagtgagttattttatttagtttaaaatagtattatttaaagatgaaatagtttaatttaagtaagaatgttggatagataggggataaaaggtaaatgtaagaaagtatagtattttttaaagtttaagatgattatgtagaaaatttataattagttgtagagtaatgattattttatttaatttaggagttatattcgttagtgtaatttttgtttgtagaaattagtagagggaaattttagaaggtttagatattatgtttttattaatgattatttatgttttttaattatatgtgttttttttttgtttttttattgtttagattttaatatatgtaatatgttatttagtagttgttatatgaaaggaatatgttaggttgttgtattaatttttttagtatgtatgtgtgtgtattggagaagaatttaggtttttttatttttttgatatttttagagtgtaggtttttatttttttgtttgttattttatggtttaatgatgggtgttatgttattatatatttgtggtaaaaagtgagatgaagtaaaatagttaaagatatatgttagttgaatttgtttttttttttaaaaaaggttttttagaagtttcggtcgttagtttttttgtatgtgtttttaatagggttattttagatttatatgatttaattgaaatagagtgtaagttataaataggaattacgtatataattttaaattttttgtagttatatttaaaaagtaaaagaggtttaaaaaataattttaataatatgttgtatgaatcgaaaatatatagaatattattttaatatgtgattaatattttaaaaattaagatatttttattttttatatgtttttgtattgtttgtaaatttaatgtatattttaatttaaaatagttatattgtaagtatttaatagttatatgttattatattgtaaaggaaaagaagtttgtgatattgtgatagaataggaatgtatatttggtttttgttttggtttttgagaaaaagtttttaaattttttggaattttttgagtgataggggtattttttgttttaatgaggtaatttttggtgggtttttagatagttttaggatgggggttggttgttaggggaattaattatgtgattagaggattggaatttttagttttattttttgttttttgattttttgggaaggaagaggagataagggttgagttgatttttaatggttaatgatgtaattaattatatttatgtaaggaagtttttataaaattttagaaggatagggtttaaagagttttttgattgttgaatacgtgaaggtatatggagggtggtaagttaagagagggtatggaagttttatattttttgttatatattgtgttttatgtattttttttatttggttgtttatttgtgttttttatgatattttttgtaacgtacgtaaagtgtttttttgagttttgtgagttattttagtaaattaatataatttagtgatagggtaatggtaatttgggatttgtgattggtatttgaagtgggggatatttttgtgagattgagtttttaatttgtgcgatgcgatattattttttggtagatagtattagaattgagttaaatgataggatatttattaggttatagttgaagaattggttgttggtgaagagtaatttatatatattttggtgattaaaggtgaagtattgtgttttgtggtgattgtgtgtgtatagtagtagaaaaagttagttttgtttttttttttttttttttttttttttgagatggagtttttttttgtcgtttaggttggagtgtagtggcgtgattttagtttattgtaagtttcgttttttgggtttacgttattttttttttttagtttttcgagaagttgggattataggcggtcgttattaagttcggttaattttttgtatttttagtagagacggggttttattgagttagttaggatggaattttgtttttattaggaagtttttgattaattattgtaagtggttaaggggaaagaaattgttgttagagtagattagaaaatagtagtttttatttttttgatagtagcgggtatttaataaggaataaatgattttaatgtaagtaaaataagttttttttatgatagttttttataatttttaatttgggattattcgaatgtaggataaattgtttttaaattttttaaattgataaataattgtatataattatggtcgggcgcgggtgatttatgtttgtaattttagtattttgggaggtcgaagtaagtagattatttgaggttagaaattcgagattagtttgggaaatatggtgagaaatttcggttttattaaaaatataaaaattagttaggtatggtggcgggtgtttgtaattttagttatttgggaggttaagttaaaagaatcgtttgaatttgtaaggcggaggtttcggtgagttaagattacgttatcgtattttagtttgggcgatagagtaagattttatttcgaaataaaaaaaatgtatatattttaatgtaatgggatataatgtaatgttttaatatattgtggaatgattaaattaggttaatatatttattattttatatatttatttttttttggtgagaatattttaaatttatttttttagttattgcgaaatatatattatgaattatagttattatgttgtgcgatatttttaaaatttatttttgaaattttttattttttgattaatatttttttattttttatttattttttaatatttttataattgttttttaaagataaaagaattttatttttattaatgaagtatttatgtagaaagatattggtaatgtttagttttttttatttaatttgttgtattttgtaagtttttggtaagtagagttattttaggttatttatatttataatttttttttgtttgcggtggttattatagtaattatatttatggattattatttaattggagttttttttttataggttttattttttaatgtttagagaggggcgattgttttagattttatttaattgttagagtttaggagggagtaatttatttttttttatttttattttatttttttaattttatatttttattatttttaattttattttgttttgtttttttttttatattttatattttatttttgaaattgttattattatgttttgttttaagagtatataagtttattatagtaaagagttttgggtgataatattttttgaaataagggtgaagaaatatttttttatgttataatcgttgggagggcgggggtagggatgttggaaggtacggtttttgcggtttttaaggataagataattaagtgtttcggtgtttttttgaggtagaatattgagtatttatttatggtgattgtgatagtggaggtgattggtaaatttatcgtaggttaataattttgttagtagttatgaggagtggtaaagaattttgtagaagagtaagttttatgtatataaaatagttcggaaagtgaaagcgtcgttgaagtgcggaagtttcgtattttttgggtttttttttttttttttttgtcgttttttgttttttcgttttttttttttttttgtggtttaggtaggatagattttaatttttagtttttttggttttcgcgggttcggagattgggattttcgggttaggagtgttgggggcgcggtcggttagtttcggttttttttatggagcggcggagttttattttttttttcgtattgtattttttatatttttagtatcgcgtttacgaggtcgttcgtttcgttttagaatcgtaatttttaggagttgggttgaggaaggcgcggaggataggaattttagcgtcggtagttaagtttttagacggagttcgttttttcggtcggtttttgtttttaattggttcgcgagttcgttcgtttttatcgtgggttacgtttttcgggtttcgcggttggtcggtttttcgcgtttttttttttttcggtcgtttttcgggtcgtttttgcgtgtggggtcgttcgcgttagtgtgagtttgagttgacggcggtttcgggaggttcgtagaaggggagggtcgggcggcgcgggagttgagtatcgttagggcgggcggtagggcgcggttttttcgtcgggtgtattatttgtcgcggcgcgagatttttggtaaggttcggcgcggtggggttcgggcgggggttcgggagaggagcgggcgtcggttttttttggttcggtttcgagagtttagcgttgtcgcgttttcggttttcgcgcgtgcggttttcgtcgttttcggtttggcggtgggggttgggggaagggaagcggtttgcggagttcgggttgagggcgagggatcggttatatcgcggcgatttaggttttagcggtcgcggttttattcggcgcgcgatttttaggttttttcgtcggttggtgtttgggcgtttcgttttcgttcgggagcgaggttttgggtttttaaacgttagtatttttttttcgttttttttgtatttttttataaaaggatttttgtggttggaaattttttggtaagtttattttttttatttagtcgggtcgagttaacggtaggagttaggttgtgtgtgtggtttttttttttaaaaaaagatttgttgcgggttggagagttttgagattggatcgatttcgtttattattaaatgttatttgtggatcgggattggtaggtgttttttttacgttggcgataattatttttgtatgtggtgttatttaggtggttttaggtttcgatttttttttttggttttagagataattttagaaaatttacgttgtttgtggtgagaagcgtgattaaattaatacgtgtttttttataaaacgttttattattttttgtttgtggatttatttttttgatgtttgtggttattatttttaagtaaagaggttaatagtattgttatttttgttagtgttgtagttgataacgataataatagtagtatgtattaattgttagtgataggtagagcgttagtttttatacggattattttaaaataattttttgaggttgatattgttattgtttttattttataaattaggaaattaaggtttaggtaggttaagtaatttgtttaagattatagttttaacgtgataa

SEQ ID NO: 1220 - DNA, 6077 bp, Artificial Sequence
  chemically treated genomic DNA (Homo sapiens)
ttgttacgttaaaattgtggttttaggtaagttatttaatttatttaaattttagttttttggtttgtaaagtggaggtagtaatagtattaattttaaagggttattttgagataattcgtgtagaaattagcgttttgtttgttattagtaattaatatatgttattattgttatcgttattaattgtaatattaatagaaatagtaatgttattaatttttttgtttagaggtgatagttataagtattaggaaggtaaatttatagatagaagatgataaaacgttttgtaagaaagtacgtgttaatttgattacgttttttattataagtaacgtaaattttttagaattatttttggaattaaaaaagaaagtcgaaatttaggattatttaggtaatattatatgtagagatagttatcgttagcgtgaaagaaatatttgttaatttcggtttatagatggtatttaataatagacggaatcggtttaattttagaattttttagttcgtagtaagtttttttttaaagggaggagttatatatatagtttaatttttgtcgttaattcggttcgattgaataaaggagataggtttgttaaagggtttttagttatagaagtttttttgtggaggggtgtagaaagagcgagaaagagatgttggcgtttggaggtttagggtttcgttttcgggcgagagcggggcgtttaggtattagtcggcggaggaatttggaaatcgcgcgtcgggtagagtcgcggtcgttggaatttgggtcgtcgcgatgtagtcggtttttcgtttttagttcggatttcgtagatcgtttttttttttttagtttttatcgttaggtcgggaacggcgggggtcgtacgcgcggaggtcggaggcgcggtagcgttgggttttcggggtcgggttaggggaggtcggcgttcgtttttttttcggattttcgttcgggttttatcgcgtcgggttttattagaggtttcgcgtcgcgataggtggtatattcggcggagaggtcgcgttttgtcgttcgttttggcgatgtttagttttcgcgtcgttcggttttttttttttgcgagtttttcggagtcgtcgttagtttaggtttatattggcgcgggcggttttatacgtagaggcggttcgaagagcggtcgagagaggggagggcgcgaggagtcggttagtcgcggggttcggaaggcgtggtttacggtggagacggacgggttcgcgggttaattggaggtaggaatcggtcggaggggcgggtttcgtttggaggtttagttgtcggcgttggggtttttgtttttcgcgttttttttaatttagtttttggaggttacggttttgaggcggggcgggcggtttcgtggacgcgatgttgaggatgtgagaagtgtagtgcggaggaggaggtggagtttcgtcgttttatgaaggaagtcggggttggtcgatcgcgtttttagtatttttggttcgggggttttagttttcgaattcgcggaggttagggaagttgggagttggggtttgttttgtttgagttatagaggaagggggagaacgggagggtaggagacggtaaaggaaggaagaagaggatttaggaaatgcgaggttttcgtattttagcgacgtttttatttttcgagttgttttgtgtgtataggatttgtttttttgtagaattttttgttattttttatggttgttggtaaggttattggtttgcggtgaatttattaattatttttattgttatagttattataaatagatgtttaatgttttgttttagaaaagtatcggaatatttaattgttttgtttttgaaagtcgtagggatcgtgttttttaatatttttattttcgtttttttaacggttgtgatatgggaggatatttttttatttttattttagaaaatgttattatttaaaattttttattataatgagtttgtgtatttttaaaataaggtatggtaatgataattttaaaaataagatgtaaaatataaaaaaagaggtaaggtagaataaaattaaaagtgatggaaatgtaggattgagaagatggagtggaagtagggaagagtgaattgtttttttttaaattttgataattaaataaaatttggggtaatcgtttttttttgaatattgaagggtggggtttgtgaggaggaaattttagttaggtgataatttataggtgtggttgttataataattatcgtaggtaaggagaggttataaatatgaatgatttaaagtaattttgtttgttaggaatttataagatgtagtaggttggatgaaggaaattaaatattattagtgtttttttatataaatgttttattagtagaggtgaaatttttttgtttttgaaagatagttgtgggggtgttggggggtagatggggaatggggagatgttggttaaagggtaaaaagttttaggagtaagttttagaaatatcgtatagtatggtgattatagtttataatgtatatttcgtaatggttgaaagagtagatttaaaatatttttattaaaaagaaataagtatgtaaggtgatggatatattagtttaatttgattattttataatgtattgaaatattatattgtattttattgtattaaagtatatatattttttttatttcgagatggagttttgttttgtcgtttaggttggagtgcggtggcgtgattttgatttatcgaaattttcgttttgtaggtttaagcgatttttttgatttagttttttaagtagttgggattataggtattcgttattatgtttagttgatttttgtgtttttagtagagtcggggttttttattatgttttttaggttagtttcgaatttttggttttaagtgatttgtttgtttcggttttttaaagtgttgggattatagatatgagttattcgcgttcgattataattatatataattgtttgttaatttaaagaatttaaggatagtttgttttatattcgaataattttagattgaaagttgtagagagttattatggagggaatttattttgtttatattgaagttatttattttttattaaatattcgttattgttaaggaggtagaaattgttgttttttggtttgttttgataataatttttttttttttagttatttatagtgattggttaaaggttttttaatgaaaatagaattttattttggttaatttagtgaaatttcgtttttattaaaaatataaaaaattagtcgggtttggtggcggtcgtttgtagttttagtttttcgggaggttgaggaaggagaatggcgtgaatttaggaggcggagtttgtagtgagttgagattacgttattgtattttagtttgggcgatagagggagattttattttaaaaaaaaaaagaaaagaaaagaaaaatagaattaattttttttgttattgtgtatatatagttattatagaatataatattttatttttagttattaaaatgtgtgtgggttgttttttattaataattagttttttagttgtgatttggtgggtgttttattatttaatttaattttgatgttatttattaggagatagtgtcgtatcgtataggttgagggtttagttttataagagtgttttttattttagatgttagttataagttttaggttgttattattttgttattgggttatattaatttgttaggatggtttataaaatttaaggaaatattttacgtacgttataaaggatgttataaaggatatagatgaatagttagatggaagagatgtatggggtatagtatgtggtaaggggtgtggagtttttatgtttttttttggtttattattttttatatgtttttacgtgtttagtaattaggaagttttttgaattttgtttttttggagttttatggaggtttttttatataggtgtgattgattatattattgattattggagattaatttaatttttattttttttttttttttaggaggttagggggtagaggatggagttaaaagttttaattttttaattatatggttggtttttttggtaattagtttttattttgaggttatttaggagtttattaagagttgttttattagaataaaagatgtttttgttatttaggaaattttaagggatttagaagtttttttttaggaattagggtagagattaaatatatatttttattttattataatgttataggtttttttttttttataatatagtgatatatggttattgagtatttgtaatgtggttattttaagttgagatatatattggatttgtagatagtgtaaaaatatgtaaagaatggaaatattttaatttttaaaatattgattatatgttgaaataatattttgtatattttcggtttatgtaatatattattaaagttattttttaaattttttttattttttaaatgtggttatagaaaatttaaaattatatacgtaatttttatttgtggtttgtattttattttagttggattatgtgggtttaaggtgattttgttagaaatatatataaggaagttgacggtcggggtttttggaaagttttttttaaaaaaaagaatagatttaattggtatgtgtttttggttgttttgttttattttattttttgttatagatgtgtagtggtatggtatttattattgggttataagatgataaataagagaatgaaggtttgtattttaaggatgttagaggagtagaagagtttgggtttttttttagtgtatatatatgtatgttggaaaagttaatatagtaatttaatatgttttttttatgtaatagttgttgagtgatatattatatatattgggatttgagtagtgaaaaggtaggaaaaagatatatgtaattggaaaatatgagtaattattagtagaaatatagtgtttaaattttttgaaatttttttttgttggtttttataggtaagaattatattggcggatataatttttgggttaaataaagtagttattattttgtaattggttgtgaattttttgtatgattattttaagttttgaaaaatattgtgtttttttgtatttattttttattttttatttgtttagtatttttgtttgaattgagttattttatttttaaatgatattattttgggttgagtgaggtggtttatttttgtaattttagtattttaggaggttaaggtgggtggattgtttgagtataggagtttgagattagtttgggtaatatggtgaaattttatttttataaaaaaaaaaaaaaaattagttaggtttgatggggtatgtttgtagttttagttatttgggaggttgaggtgggaggattatttgagtttaggaggcggaggttgtattgagttgaggtcgtatttttgtattttagtttaggtgatagagtgagattttgttttttaaaaaaaaagttattttgatttagtaatagttatagtgagatattaagatgttttattagttaaaagattaaggggaattatatatatttataggtttttagaaataatgtaagtgtgtagttattttttaagtatagagtttttaaaaatgaatgttaaggtttaatatatagtaggttagggtatatagaattaaaatagtattatgattatttttattattattattattaatttattattagtagtttatatttgatatttttaattggatttaataagagttaatgagttattttaaaggaggaaatataaatgaagatattacgataggaataagattttgtgtattttaatagtaattgttagaaatgatttttagtttttaataatagaaaatttaattagagttgatttatataaatatgggtttttttataaaaatgtgagggtaggatttaaggttaaatatggtttaattattttttggataatttttgagagaaggaaagaattttttttaaatgtagggttt

SEQ ID NO: 1221 - DNA, 5163 bp, Artificial Sequence
  chemically treated genomic DNA (Homo sapiens)
tttgtagtttatagttgagttggttttagtttaaatattttatgagggttcgataagtagaaagagaattgggaaaatataaagtaagttgtttgtttgatttttttttgtgttataagagaaagataataatgtgttttttgggttttataaaagagaaaaggttggaattaaatttattgaatgtttatttggttttaaagagtggtttattagggtttttagtgtttagttgagtaagaagtattttttgttttattaattgggattggtgtttgtatatattttaaaatatagttgtttgtttaggttagtaggttttatattttttatatagaaataatttttaagtttgttaaaaatgtaggtttttaaattatattgtagaggggttgttttttggaggttttttgaaatggatttttgtgttgatgatttttcgaatttttaatatttgatgtattttttattaggaaattgaaggttttatgattttttgatttttttatataaagggaattagaggaaagttattcgataattatagtgagagtggaagtatttgattgatgtaaattttatagtgttttgtttattaaagtgtgttttatagattatttgtattagagttataagggtgtttattaaaaatgtagatttttggaatttattatttgacgtgagttaggatttttaaattttaagttaagaaatttgtattttaataaattatttagaggattttgaaggaatttatagtttgggaattgttttttttagggttaattttttttagtaaattgttagagatggaattttgtgaaattaggggtttgtatgttatagtataatggtggaggttttatttttgggttgttaaaggttagatataggtgtaaagaattgttttttaggtggaatttaggagtattgtttaggatttgtatgattttgagaaggttttttaatttttttttattttagttttttaatatataaaatggagataataatagttgttttttcgtaggattgttgtgaggattgaatggataattatttttagatatttggaatattgtttggtttatagtaagtattatgtatatgttggttgttgttattgtttttgttataattattattatcgttttaatttttattattttgagggttattttttaaaatttaggggttagtaaattatgattttttgttttgtttttgtgaataaagttttattggaatatagttatgtttatatttttatattattgtttatagttattttatgttatatataataggagagttatatagttataatagggtttatatggtttataatgtttgatatatatttttttgttttttatagatagtttgtcgatttttgttttatatatttttgggtttttgttaatatgttgattgttttgggaggaataaggattgttgtgttttaggttagttgatagttggttgaaggtagaattttgtgagtgaagtagaaggaattagtattttgtaatagagtagaaagagggtagagaatatttttgagaagggtttggggtgagaggattttgtaagttttttagtttaattttttgtttgagtttttatgaagttggagagtgtgtggaaatagttgggggcgggtttttttattttttatttgttaatggttttttttttttaagttttagattatttttttaattggttagtttatgaaatgttttttttgagattaaagtaagttattttattcgatatttttagagaaatttttatttattttttttagttaaaatgagaattaattatttattatgtttttaaatattggggtaaatataggaaataaagtatggattttgattatagagtgtataattttttttaaattgaaaagttataaattttttaaatgaaggatttaaggttttagttttatttatttgatattttgatataatgaagaagtgattaggattgtaaatagttggtaattaattaatatttgttattaagattgtgataataaaataattgggggtaagttgtgtttgttgaagatttatgtttttattattggagattttattgagtaaggagtgggttgagttgtgtttttagtgtttatgttttgttaggaggtagttgttaattagtaggtagaaggagtagtttattgagtgttttttatgtttttagtagttgtggtttatatatgttattttattgaatttttatattggttttatgaagtaggtattattatttattttatatataaaaagtaggtattaaaattattgtagttagttaatggtagaggtggagtttttgtttatttgattttaaagttattgttgtagtatattatttagataagtttaagaaggtagggaaagataaaaatatatttggttggaagtaagagaaggtggagagaattaaatagttttattattttttgtttgaaattttgatatttgagatttagtagagaggtgtattaaagtaatagtattgtttttttttttagaaaataaaataataaatttttattttttggtttttaagattaataaatatttagttttattaaatatttagttttattataattgttttagaatttgagaaaaattaaataatatatttaagaaataaaagttttatatgttttttatattgatatttaaagttaattatttttacgatgttggttagttttaaaatttgattattgtttaatttttaaatggtttagattgtagttgtttatttaagttattgcggttgttgggtaaatttggttttttgttttgttttgtttcgtttaaaaaataatattagtggtttgtaatggttagagacggtggaagatggttttttattattttattattagtggtttaggtaaaataaaaattagttatagaacgtttttgtttattagaagtaggtttttagttgatatgttttttattttatagtttaagaagttttattgtttattttttaaaagttttttgtgataggaaatgtttttttgatagtaggattagtttatttgtttagtagtaagtttgaggtagagagatgtaggttttagattttgaagattgttttaatgttaaagatttttatatttggtgtaggtaagaataggtgggtgtgtgtatatatttagtattgtgttggcgtagatggagtttattgtgtatatttttttttaatattgtatttagtgatatggtgttggtagtttgaaattgattatggtaattaataaatattataaataaaggtttggttttgtttgtttgtttgtttgtttttattttttttaaaagagtcgattattaaatatttatttgtgtatggttgaatatattttataatttatttttttttttagtataaatatattttttttattttttattataataaaaaaattttaatgaatatgttatgtggaattttgtgtatatatgtgtgagtttttttagtatatagatttagaagtgaagtttttattttatgaattgtgtatattttaattttattagatagtattaaattgatgttttattagattttttatttttttatttttttgttgatatttgatattgttagtttttttaatttatgttaattttagtttgaggtggtattttattgttatttgaatttataatttttttgattatttacgaggttaaaaatttttttatatatttattggttatttgggttttttgtgaatttgttatttatattttttgtttattttttttttagataattttttgttttttttattgatttgtagaaattttttatatattttgaatatttatttttatttaattatatgtagtatatatattattttttatttgtggtttgttttttaattatgttatgtttttgttataaagaagtttaaattttgatatagttaaatgtattattttttttttttgtaatttttatgttttttttatgtttaagtaattttttttgatttaaaggttaaaaatatgtttttatatttttttttttgaagtttatatttttatatttaaatttttaatttatttagaatttatttttgttaatggtattaggtgtatatttaatgtatttttttatatggaaatgtaattatttttatattattatgaaagagatttaagttttttttttgtttttttggttttttttatatataaaagttttgtatatgtttgtatttatttggatattatttattttagtttatagatttattttatttttatttttggaattattatattttaattattgtaattttattaaagtttttgatatttttttgaggtaatttttttttttttatttagtttttttagaatttttttatttattttttaatgtttatttttttatgcgaattgaattatttgttagtttggtaagttttattgaaaattttgttagattttttattagaatgataatgaatttatagattaatattaaaataatttattaatattttatatatatgtatatatagagagagagttaggtatttttatgttttttaataattgttttataatatttttataaaatttgaatttatattttattagaattaaataataataattttataaattatttttatttttattgttaaggggatcgtttattttgttttatgatatgaatggttatggttgttttataggaatgttattagtttttatatgtttattttcgtattaattttttaaatttttttttagtttttggagtttaagtatttaaggtaaatttagtgtttgttttcgaaagagttaatgatgttatttttgataatttttattggtattacggtatatatggaagggttaaagtttttaatacgatcgttagggtaaagtttaaacggtatttatgataaggtgtgtgttaaaattagtttatttgtagtaatggtttggattagatttatttgtatttttttttttattttgttttttgtttatatagtagttgtatcggtaagtcgagttttgttttttggatatttagaaatattaattttagtatatattatttattttttgtatatttattttttttaga

SEQ ID NO: 1222 - DNA, 5163 bp, Artificial Sequence
  chemically treated genomic DNA (Homo sapiens)
tttgaaaaaaataaatatatagaaaatggataatgtatattagaattaatatttttaaatatttaaaaagtaggattcgatttatcggtatagttgttatgtgggtaaaaagtaaggtaaaaaagagaatgtaagtggatttaatttaagttattgttgtaagtgagttgattttagtatatattttgttataaatatcgtttagattttattttgacggtcgtattagaaattttgatttttttatatgtatcgtagtgttaataaaggttgttaaagataatattattgattttttcgaggataaatattaagtttattttaaatgtttaagttttaaagattggggaaaagtttgaaaaattaatacggaaatgagtatataagaattaataatatttttatagggtagttatagttatttatattataaaataggatagacgatttttttaataataaaaataaaaataatttataaaattattattatttaattttaataaaatataaatttaaattttatggaaatgttataaagtaattattgaaggatataaaaatatttgattttttttttatatgtatatatgtatgaaatattaatagattgttttaatattaatttataaatttattgttattttagtaaaaaatttaatagggtttttagtggaatttgttaagttgataaatggtttaattcgtatgaaagagtaaatattgaagaatagataagaaaattttgaaaaggttgaataaagagaaaagaattgttttaaaagaatattaggagttttggtaaagttatagtaattagagtgtaatagttttaaaaataaagataaaatgaatttatagattggaataggtaatatttaaatagatgtaagtatatgtagggtttttatgtataagaggaattaaaaaggtaagagggaaatttgggttttttttataataatgtgggaataattgtatttttatatgaggaaatatattaaatgtatatttgatattattgataaaaataaattttagatagattaaaaatttaaatatgaaaatataaattttaaaaaagaaaatataggaatatatttttaatttttaggttaagaaagattgtttaaatatgaaaaaaatatagaaattatagaggaaaagaataatatatttgattgtattaaaatttaaatttttttatgataaaaatataatatgattaaaagataagttataggtgagagatgatatgtatattgtatataattgaataagaataagtatttaggatatgtaaagaatttttataaattaataaaaagaataggagattatttaaggaaaaaatgaataaaaaatatgagtagtaaatttataaaagatttagatggttaataaatatgtaaaaagatttttagtttcgtaagtaattagaaaaattataggtttaaatagtagtaaaatattattttaagttaagattggtataaattaagaagattgataatattaagtgttaataagaaggtaagaaaataggaaatttagtaggatattaatttgatgttatttaatgaagttgaaatgtgtatagtttataagatagaaattttatttttaggtttatatgttaaaggaatttatatatatgtgtataaaattttatatagtatatttattgaagtttttttgttatggtaaagaatggggaaaatgtgtttatattaaaagaaaagataaattatggaatatatttagttatgtataggtaaatgtttaataatcggtttttttaaaaaaagtaaaaataaataagtaaataaataaaattaagtttttatttgtagtgtttgttgattgttatggttaattttaagttattaatattatgttattgaatgtagtgttgggaagagatgtatatagtgggttttatttgcgttagtataatattaaatatatgtatatatttatttatttttgtttgtattagatataagaatttttggtattagagtaatttttaaggtttagagtttgtatttttttattttagatttattattgggtaggtgggttagttttgttgttaaaaaagtattttttgttataaaagatttttagaaggtgaatagtagagttttttgagttgtaaaataggaggtatgttaattgggggtttgtttttgatgggtagaagcgttttatggttgatttttgttttatttaagttattgatggtgaggtgataaaaggttattttttatcgtttttaattattataaattattaatattattttttaaacgaaataaaataaaataaaaagttaaatttgtttaatagtcgtaatgatttaagtgagtaattataatttagattatttaaaaattgggtaataattaaattttaaaattggttaatatcgtaagaataattggttttaagtattagtgtggaaaatatatgagatttttattttttaaatgtgttgtttaattttttttaaattttgaagtaattatggtaaaattgaatatttggtaaaattgaatatttgttaattttggaaattaggaagtaggagtttgttattttattttttaaagaaaaaggtagtgttgttgttttggtatatttttttattaaattttaggtattaggattttaaatagggaatagtgaggttgtttaattttttttatttttttttgtttttagttagatgtgtttttatttttttttgtttttttaaatttatttgaatgatatattataataatggttttggaattagataagtaggaattttatttttattattgattagttatagtaattttagtatttgttttttatgtgtagaatggatagtggtgtttattttatggggttaatgtaaagatttaatgagataatatatgtaaattatagttattagaaatataggaagtatttaataaattgttttttttatttgttagttagtaattgttttttagtaaaatatgggtattaaaaatatagtttagtttattttttgtttagtagaatttttagtgatgagaatataggtttttagtagatataatttgtttttaattattttattgttataattttaatggtagatgttaattagttattagttatttgtaattttagttatttttttattgtgttagggtattaaatgagtaaggttggggttttaagttttttatttgaagggtttatggttttttagtttaaagaagattatgtattttgtggttaaggtttatgttttattttttgtatttgttttagtgtttggaaatatagtaggtaattagtttttattttaattgaaaaaagtaaatagaaatttttttgaaggtatcggatggggtgatttgttttgattttaggaagggtattttataaattgattagttgagaaagtggtttgaagtttagaggaagaaagttattgataggtagaaaatggaaaaattcgtttttagttatttttatatattttttagttttataaaagtttaggtaaggagttgggttaagagatttgtaaagtttttttattttaaattttttttaaggatgttttttgttttttttttattttattgtaagatgttgattttttttgttttatttatagagttttgtttttaattagttgttagttaatttgaaatataatagtttttgttttttttagggtaattaatatattaataggggtttaaaggtgtatagagtaagagtcggtaaattgtttgtaaagggtaaagagatatatgttaagtattgtgggttatatgagttttgttgtagttatgtaatttttttgttgtatgtagtataaagtagttgtagataataatgtaaaggtgtgaatatggttgtgttttaataaaattttatttataaaaataaagtaaagggttatagtttgttgatttttgggttttagagaataatttttaaggtggtggaaattgagacggtgataataattataatagaagtagtagtagtaattaatatgtatatagtatttattgtgggttaggtagtattttaagtatttaagggtaattatttatttaatttttataataattttacgaagaagtaattattattatttttattttatatattaagaaattgagatgaagaaaaattaaggaatttttttaaggttatgtagattttgaataatgtttttaaattttatttgagaggtagttttttatatttatgtttggtttttgatagtttaggagtgaggtttttattattatgttgtagtatgtagatttttggttttatagggttttatttttaatagtttattaagaagaattaattttgagggaaatagtttttaagttatagatttttttaaaattttttggatggtttgttgaggtataaattttttggtttggaatttggaaattttgatttacgttaaatggtgagttttagagatttgtatttttaataagtatttttgtgattttgatgtaggtagtttgtggaatatattttgatgaataggatattgtggaatttgtattagttagatgtttttatttttattgtggttatcgaatagtttttttttgattttttttgtataagaaaattaaaagattatagaatttttagttttttaatagggaatatattagatgttaagaattcgagagattattaatatagaagtttattttagaaggtttttaggaaatagtttttttgtagtgtggtttgaggatttgtatttttaataagtttgggggttatttttatatggaaaatgtgagatttgttgatttgggtaggtaattgtgttttggagtgtgtatagatattaattttaattggtgaggtaaggggtattttttatttagttgggtattgaggattttaataagttattttttagggttaggtgggtatttaatggatttggttttagtttttttttttttatagaatttaaagaatatattgttattttttttttatgatataaggaagaattagataagtagtttattttatgtttttttaattttttttttatttatcgaatttttataaagtatttaaattgaagttaatttagttatgagttataag

SEQ ID NO: 1223 - DNA, 6591 bp, Artificial Sequence
  chemically treated genomic DNA (Homo sapiens)
gttttggaaagtattatatttgagttggagtttgtttgggtagatgtttagtgtgtagtgtattggagagagaaataggggatttaggatttaatattaaaattatttttttttttatttttataagttatttaatttattgggtttaagtgtatgtagatttttaatttgtattgtattattttaaaggattttgagataattattattttaaatgtgtatattttaattttgtgtaattttgtttttagttatgaaatttgaaatttaaggaattttgtaagacgtaattataaaattatttaagtaggtgttagaatttggagggattttatatggttgtattattattaaaaatatacgatttgatattaaatagttttgcgttttaattttgtttttgttatttagttgttgtgtgattttggataaattattttatttttttgagtttttatttttttatatatgagatgtgggttattatatttagtttataggattattaagagaagtaaataaaaaataaagagtgattattagagtatttaatatatagtaagtatttgatatatgataatagcgtttggatagatgtataatttttatttgatatttgttattttatttaaaaattgaagttttttttaagaagggtggaggaaataatcgataggggaggaaaagaaaaattttagttatttttagttaaaagttttttattttttagatttttttatttttattttgtttaataattaggtatttttaattttttttggaagttttagtttatgagtttttagatgttttttttatgtttgagtttgataaatatttatttttatttagtttaattaagataaattaaggaaaggaaagaaggattttatttgtgtttaggaagttatgttagttaaagaatttgatatatagaatttttttaaggggttttttttaaaagaaaagaattaagagtatggtattgttttacgatattggttgggtttttgttttttagtttattgttttttgatgttttagagagtgatttttgtttttgtttttagggttgtttttttttaattttttttttatttgcgttttttttttaatggtaagggtaaggattttagtgttgttagtttaaaaaaaattataaaattaaaatttagtaaataaagttgaattttatggaatagtaaaaaagaaaaagaaatttgattggagttaggaaaattttttaaagagataaaatgtttagttatttgaaaaagagttagttaaaggataagtaaggatagaaagagaaggaggtagaattgatagggaaatatattatattttttatttttatgttattattttagttatagaaatattatgtgaaagggataatttttttggtatattttttggtaaatatatttttttgagaagtttttttttatagtaatttttagaagttttgttaatgttttttttttgtattttttttttaaatttagaattatttgagttggttattagtattttttttgatgttttggaaatagagatgtttttgagtgtttataagaatggttagtttagtgagaaagtttattatttggttttttttaaggttagttggttgtttaataattttttaaataagaggagttattattaaatttttgtttaaagagtatatttgatgtatgaggatagggtttatatttgtatttttttttattgtatttttagtttagagttgataaatagtagatgtttagtatatttgttggttagatagataatttgatggatggttggttggttggttggttggatggatggatggatggatgggagaattatgaaattatgaagttttttttggttttgataggtatggttattttttttttttttgtttgagagtaggtggaataggagatttgtattattttatggttttttttgttttagtttttacgttgttaattttatatgaggagaattttatatatgtttaaaaattggtaattatattattgttttatatttttgttattatttttgggagtttttttaaatatttttttttttgaataatattttttttttgttaagggaaaatgtttatataagtgttttttataattatttaaaatttaattagaatttagagttttatgtggtttcgttttgataagatattttaattaagaaaatgtaaattagttggtaaaattaatttgtttaaattttaatattttttgaaaatttttagatagtattttgtaattttaaataatgttatttttaattaaagtaatttttatttttttgtttttatgtttcgtttttaatatgttttattttttataattgttttcgtttttttttgttatttagtttttatttaaaatttatttagtaaattaaattggtaaggttttttttattttttttttttcgttttttttttttttttatttttattttttttttttgtttttttttagatgagttaattttggttttttttaatgtaaagtttttatttttgttttatgcgttagtttaagtttttattataaaaatatatgattggagttggtatttataaagttgtttttgaaatggggagtaaggtgatagaggagaaaaagaagagttttggatttttagatatgttaataatttttatatattatatataaatgggattttgtagagaagaattagaaatagatgggagagtaatggataggaaaggtagatgagggatcgaagagatatagtttttaaaagaaagttagttttataaaaattaagacgataaagagaaatgtttaagtttagggaatttagtggaagtagtgatttaaggtgaataaaaggtgaattttaagttgaaatgagaagtgtaggatttttaagtttagtttttgggagtgtaaaaataaaaaaataattgtgatgttagaggttgaaagattatagttgttatttgaatttggggataaaggagatatttatgatttggttggaaaagatagagttaatgtatattgtaaagtatatatttatagtaggaaaatgggaagatttttttttaattttggagatggagtggggatggggagagtagattatttattttaagggtgaaatattggaatttaatttgtttgatgttatattaattggtggttaattattaagttaagtacgtataaaatttttatttatggttagtttgtttttttaaagttatgtaatatagtgaattggttttcgtattttaaattatttattgattatgtaatgatttagatgatttattttttaagatggatattgaaattaatatttatagtaggttgtggtttaaagagtggaataatcgttagttttattagtggaaattgtgatggttgaatttattaaggatgaatatatacggttttttttttgagattttttttaagattttcgtatagataatttattttttaggttttggagagaaaatttgaattttattgattttttagaatttaattttttagattttaaaggagttattttttttaatggggattttgttaatatttataaaagttttttataggatggagggtgggagggaaattttattttaataagataaaaagaatgaagtatgaggttttatttagtttattattgttttttgaaatatattagtattgaaagatatatttattttatttttaatttagttttattgttgttttagtttaagagttagaggtttcgaagttgtagtttttttataatttgttgttttgtgattttaagtttgttgtttgtaaagaaaattattgggtttttaagtaagagaggtatatttggtaggatagattttgtgattgtaaaagaagggggaaaaaaagaaagaaagaaaagatttttttatataagataattagaggtattaaattgaaatttttttgtggaaaataagttagtatttttgggtttgatggtgtagtgaaaatttgtgtttgaggatatattatagtgaaagagtaaagtgaatagtaagtagttattatttatttttttagggaggtgtgttgtttgtttgtatattttttatagtatttagtatagtattttgtattttatttgttatttattaaaaagtttattaagttagttaattatcgagataacgtttttagaaatgagagaatagtatttttttatttttgttgtattttttagtattgatacgttgtttaaaagaggattagggtataggtttgaattaatgttataaaattggatgggtaagttataacggtgttgattaaggaaatagaatttatggtgtatcggatatttttattttgatgaatttttggaaaaatgttaaagatgtatatttttaggtaaatgtttgattagtttgggattgatagattggtttaggatttagttttattgggaagatgtttaaattataattagtgtagaaagcgaagtttttttagaagaagaggtaaaggttaaaaagaagaaaagaaaagaaagtgaagtttttttttttttaaaattttttattaattaattagggtaataaatagaatattagggttttgtttgtggattaaatttaaaagttttgcggttagggttaggagggtagattatgtgtttgtggtaattttttttgtgggtttttgtttaggtttgtttttaagtatacgatggttaaaatttttgtattagagtagtattttgtgtaatatagttaggtttagtagttagggaaaattgtttatttagagtagataatatttggaaggaatgattgtttgggaaaagttttaatgttagtttagtgttaatttttttttattttttttagtttttttttattggtttttttttttttaattgttttggtttttataaaaattttatagttttttattaatatttcgtaggagtttttttttttattgttgttatataagattttgagattgatttgtaggacgaaattatgaagagtttgattttttttgttattttggtcgttttagcggtagtaattttgtgttatggtgagaaattttttttttatttttttgtgtttatttttttgtttttgattttggtttatttttattttttttttttttttttttttttttttttttttttttgttataattttaaagtattattatttttatattttttagttttcgtagaaattgatttgttttattaagttttttttatattttaaatatttagagttttatgtaatttaataggtaaattcgtttagtggtaagtttttgtatatttagaaatttatattttagaaagaagatattaaatttttagttttttgtatttttatttttaaggatatttatttagattttggtattaatgggttaagggtattgtttaaattatttgtttttgagaaaatttatttttatgtgaagtattaagtatagttttttttagggattggataattttatgaatttattatgtttgtttagttaattaattttaaaataaagttttatattaaaagaattttagaaaagaattatttttataatttttgttgttagaaaataaattttgtttgttttttatatgttattaaatatatttgtatttgtttaaagtttataaaaggaaatttgaagtaaagttatttatttattttagttttttgttttaattatttagatatttttattgttttaaaatttaaattatattaataattataaagattatgttttttatttttgtatttataaattttttgtattagaggatttgatttttttattttttttttaagttttgaagaaaatttatttgttggtaaatattaatagaagttttttattttaaaatttatttgttgtgtttaggagagtggtagaaagaagaaaatttcggttttgatatcgttttagttttttttttgaattggtatcgtgtttagggtgagttgttagttggagttagtggtttttgtggttgttaatttaatataggtttttaagaggttttcggaatttttttagaaatttgttttagtaagtttagtagagtaattgttttgtagtttttttgtttggagaaatttggttgttttttggattttttttaattttttttgattttgtttttaaataggttttgaataaattagagaagaaggttttttggagatttttgtatagtatttaaagtgttttattttgtttgtttgaagacgttatagtttttgggaaattttagttgaaaatggttatttttttttttaatattagagaaattaaaatatagagatatttatagtaaggttagagttagagaaaaattttataaattttaaatttttgaaatttttaataattatattgttaaatatattttttatgtttttagatttttttttttttttttatttttgtatttaaattattatagtgtttaaattgataaataataatataatgaattatggataaatattgatataatgaattttttttttttaattttaga

SEQ ID NO: 1224 - DNA, 6591 bp, Artificial Sequence
  chemically treated genomic DNA (Homo sapiens)
tttgaaattaaaaaaaaaagatttattatattaatatttatttatgatttattatgttattatttattaatttagatattgtgatagtttaaatatagggatggaagaagaggaaagagtttaaaaatatgaagaatatatttagtagtgtggttattagaaattttaggaatttaggatttatgaggtttttttttagttttggttttgttgtggatatttttatattttagtttttttgatgttgaaggagggagtggttatttttagttaaaattttttaagggttatgacgtttttagataagtaaaataagatattttaagtgttgtatagaagtttttagagaatttttttttttgatttatttagagtttgtttgagaatagggttaaagaggattaagaaggatttagaagatagttaggtttttttaggtaagagaattatagggtagttgttttgttgggtttattagggtaggtttttaagagggtttcgaaagttttttaagaatttgtgttaaattggtagttatagaaattattagttttagttgatagtttattttgggtacgatgttagtttagagagagaattgaaacgatattaaagtcgaagtttttttttttttgttatttttttgagtatagtagataaattttggaataagaagtttttattaatatttgttagtaagtgaattttttttaaaatttaaaaaggaggtgaagaaattaaattttttaatatagaaaatttgtgaatataagagtgagaagtataatttttatggttgttaatgtaatttaaattttaaaataatgaaaatatttaggtaattgaaataaaagattgaaataagtaaataattttgttttagatttttttttataagttttgaataaatgtaggtatatttaatgatatatagaaaataggtaaaatttattttttgataataggagttatgaaaatgatttttttttaaaatttttttgatgtaaaattttattttaaaattaattaattgaataaatatagtaagtttatgagattgtttagtttttagaaagggttatatttaatattttatataaaaatggatttttttaaaggtaagtggtttaaataatatttttaatttattgatattaaagtttaaataaatatttttaaaaatgaggatgtagggggttgggaatttggtattttttttttgaaatatgagtttttagatatatagagatttattattgaacgggtttgtttgttaagttgtataagattttggatatttaggatataaaaaagatttaatagaatagattagtttttgcggagattgggaaatgtgaaagtaatggtattttaagattataatagagaaagggggaagaagaggaggagggagaggaaaaatagaagtaagttaaagttagaggtagaaaagtaaatatagagaaatgggagaaaagttttttattataatataaagttattatcgttaaggcggttaggatggtaagaaggattaggttttttatggtttcgttttgtaggttagttttagggttttgtgtagtagtagtagggagagaggtttttacgggatgttagtggaaggttgtgaggtttttataagaattagagtagttgagaggggaggaattagtgggagagagttggagaaggtggggaagggttggtattgaattagtattggaattttttttaaatagttattttttttagatattatttattttgagtgggtagttttttttaattgttggatttgattgtgttatataggatgttgttttggtgtagaagttttggttatcgtatgtttggggatagatttgggtaaaagtttatagaggaagttgttataaatatatgatttatttttttggttttgatcgtagggtttttgggtttggtttatagatagagttttagtgttttgtttgttattttgattgattgatgagaggttttgggggagaaaggattttatttttttttttttttttttttttaatttttgtttttttttttaggagaatttcgttttttatattgattataatttagatatttttttagtagggttgaattttagattaatttattaattttagattaattaggtatttgtttggggatatgtatttttggtatttttttaagggtttattaggatggagatattcggtgtattatgagttttgtttttttaattaatatcgttgtaatttgtttatttagttttgtgatattaatttaaatttgtgttttagtttttttttaggtagcgtattagtgttggaaagtgtagtaaggataagagggtattgtttttttatttttgagggcgttgtttcgataattaattaatttgatagattttttagtgagtggtaggtgagatgtaaggtattgtgttaggtgttgtgggggatgtatagataaataatatatttttttaaggaggtaagtaatagttatttattatttattttgtttttttattgtaatgtatttttaagtataggtttttattatattattaggtttagaagtattagtttattttttataggaggattttagtttgatgtttttggttattttgtatagagaggttttttttttttttttttttttttttttttttttgtaattataaaatttgttttattagatgtgttttttttgtttgggaatttaatagttttttttgtagataatagatttgaagttatagagtagtagattgtagaagagttatagtttcgggatttttgatttttgagttggaatagtaatagggttgggttgggggtggggtggatgtgttttttaatattgatgtattttaaggagtagtgatgaattaggtggagttttatgttttattttttttgttttgttgggatggagttttttttttattttttattttgtgaagagtttttataaatattaatagagtttttattaaaagaaatagtttttttgaaatttgaaagattgagttttgagggattaataaaatttaagttttttttttaaaatttaagaaatagattatttgtgcgaaaattttaaagaaaattttagaaagaagatcgtgtatgtttatttttgataaatttaattattataatttttattaatgagattggcggttgttttattttttaaattataatttattatgagtgttagttttagtgtttattttggaagatgaattatttgaattattatatgattaatgaataatttaaagtgcgaaagttagtttattatattgtatgattttggggggataagttagttatagataaaagttttatacgtatttagtttagtaattaattattaattaatataatattaaataagttgaattttaatgttttatttttaaaatgagtagtttattttttttatttttattttatttttagaattaaagagaaatttttttatttttttgttataaatatgtgttttgtaatgtatattagttttgttttttttagttaagttatagatgttttttttatttttaagtttaaatgataattataattttttaatttttgatattataattgtttttttatttttatatttttagaaattaaatttgaaaattttatattttttattttaatttaaggtttattttttgtttattttaaattattgtttttattggattttttaaatttaagtatttttttttatcgttttggtttttgtaaggttaatttttttttgggagttgtgttttttcggttttttatttgttttttttgtttattgtttttttatttatttttggtttttttttgtaaaattttatttatatatgatatgtaaaaattattaatatgtttgagaatttagagttttttttttttttttttgttattttattttttattttaaagataattttgtgaatgttaattttagttatatgtttttatgatgaggatttggattaacgtatgaagtagggatgggagttttgtattagaaaggattaagattgatttatttgagagaagatagaagaaaagaatggaagtaggaaaaaaaaaaaaacggagaaggggaaatgagaagagttttattaatttggtttgttgggtgagttttaggtagagattgagtgatagagaaaaacggaggtagttgtagaaggtgagatatattaaaagcgagatatgggaatagagaaataaaagttgttttggttaggaatagtattgtttgagattgtagaatattgtttgaaaatttttagaaaatattgaaatttgaataaattaattttgttagttagtttgtatttttttaattgggatattttgttaagacgagattatatgaaattttaaattttaattagattttagataattatgaaagatatttatatagatatttttttttaataaaaaagaagtgttatttagaggagagaatatttgaagaaatttttagaagtgataatagaaatatgagatagtgatatgattgttagtttttaaatatgtgtaggattttttttatgtgaggttggtaacgtaggaattgaagtaagagaagttatggagtaatatagattttttattttatttatttttaggtagaaaagagaagaatgattatgtttgttagggttagaaggagttttatgattttataatttttttatttatttatttatttatttagttagttagttagttagttatttattaagttatttatttagttaataaatgtattgagtatttattgtttgttaattttaggttggaaatatagtagagaaaaatatagatatgggttttgtttttatgtattaagtgtgttttttgaataaaaatttaatagtggttttttttatttaaaaaattgttaggtagttaattggttttaaaggagattaagtgatgagtttttttattgggttgattatttttatgggtatttaggagtatttttgtttttaaagtattaagaaaggtgttagtgattagtttagataattttgaatttagggagggaatgtaggagaggaatattggtagagtttttgagaattattgtggggagaagttttttagaaaagtatatttgttagagaatatattaaaagagttattttttttatatggtatttttgtgattaaaataatggtatagaggtagaaagtgtaatatatttttttattaattttatttttttttttttttgtttttgtttattttttaattaatttttttttagatggttaggtattttgtttttttgaggaatttttttggttttagttagattttttttttttttttgttgttttatgaaatttagttttatttattgaattttgattttataattttttttaaattggtagtattaaagtttttatttttgttattaaaggaaaaacgtaaatgaaagaagagttaggaagaagtagttttgaagataaaaatagaaattattttttaggatattaaagaataatgaattaggagatagaagtttagttaatgtcgtgggatagtgttatgtttttagttttttttttttaagggaagttttttgagaggattttgtgtgttagattttttaattgatataattttttaggtatagatagaattttttttttttttttttaatttgttttagttgaattaagtaagaataaatgtttgttaaatttaggtatgggaggagtatttggggatttatgggttgaaatttttagggaaagttggaggtgtttgattattaaataaaataaaggtggagaagtttgagaggtggagagtttttggttgggaatggttgggattttttttttttttttttatcgattattttttttattttttttaagaaaagttttaatttttaaataagatagtaaatattaaataaaaattatatatttatttaagcgttattattatatgttaaatgtttgttatatattagatgttttgatagttattttttattttttatttattttttttaataattttataagttaagtataatgatttatattttatatataagaaaatggaagtttaaagaggtaaaatagtttatttaagattatataataattaaatggtaaagataggattaaaacgtaggattgtttgatgttaaatcgtgtgtttttaataatgatataattatgtgagatttttttaggttttgatatttgtttaaataattttgtgattgcgttttatagggttttttgaattttaaattttatagttagagataaaattatataaaattaagatatatatatttaaaatgataattgttttaaaattttttaaaatagtgtaatataaattaaaggtttatatatatttaagtttagtgagttaaatgatttataaaaatggagagagggatagttttaatattggattttaagttttttgtttttttttttagtatattgtatattaaatatttgtttaaataagttttaatttaaatatggtattttttaaaat

SEQ ID NO: 1225 - DNA, 6184 bp, Artificial Sequence
  chemically treated genomic DNA (Homo sapiens)
ggtggtggtttatatttgtaatattagtatttcgggaggtcgaggtcggtagattagttgaggttaggagttcgagattagtttggttaacgtggtgaaattttatttttattaaaaatataaaaattagttaggcgtggtgatgggtgtttatagtcgtagttatttaggagattgaggtataaggatcgtttgaatttgggaggtggtgagttgagatcgtgttattgtattttagtttggataatagagtgatattttgttttaataaataaataaatagaagaagaattaatttttaaaaattaaagatatatggaaggttttcgtaggaggttgggagttattaagggttaggttgaaatgtgtaacgtggttacgtgggtttttcggaaatggttagaatatggttattttttgaggttttattggtgaaataaacgggaaatatggaggttgttttagtagtgagttttttattttttttttagtttagtttgtggtttttaaaagatgtttttcgtggtatttggatataatttagaaggtttttttaattaatttaatttttattttggaggttacggttttttggtgttagttttagagggtttgtagaatattatggaaatttatatttggagttaaagaatggtagcgttaaaaaaaaataaagaaaaaaggtaaaaggtatttaattaaatgaattagaaatagaagttttttaaatgtttatttgtgagaatatagataaaaagttttaaagtttggtttttagaagttgatgttgtatttttattatggttggcgagaatgatttgcgttttttttgaaaggtagttagagtttagattttattggaatataatggatagttagaggagggaagttttatttgtagtgtcgtttaaatgttagaggttggagatggtttaggggagggttttttttttggcggtaatgggggtgaagtaggaagtttatagggagaggggtgtttggagtgtgagatagtaggaagattttgcgttttttttatttttgttttattttaagttagatttgttttaggatgttaaaatgttcgggtagttttagtatttttttgttttttaaaatgagtttttagggtttttttatttgttttgatttaggatttatatttttttttgattttagtttaggattgtggttagggaaaaagaaagtgttaattgatagagagttaatgttacgtggggaggtcgggggagaggtgtaggagaaaatattagagaaggagttttggttgggtagtttattcgggtttattttaagaggtaatattttaaaggtggtgtttttatgaagaacgattatattttttttatatttttaaagtgtaattatgttgttggggttttgttggtcgaaaagaaaacgaaaaagaaaagaaaaaatttttcggtgtgtaagtttatattgttattttttaagatgtgtattatttatattatcgagtttatattgttgagtaggtttttggggtataggtttagtttttttagttttgtaggtttttgatttaggggtgtaggtgatttagggaggggtgggtatggtcgtaggtaggggatagtttaagattatttgatttagtaattttattattaggtatatatttaaacgattataaattattttattataaagatatatgtatacgtatgtttttgtagtattagttataatagtaaagatttggaattaatttaaatgtttattaataatagattggataaagaaaatgtggtatatatatattatggaatatacgtagttataaaaaaggatgagtttatgttttttgtagggatacggatgaagttggaaattattatttttagtaaattattataggaatagaaaattaaatatcgtatgtttttatttataagtgggagttgaataatgagaatatatggatatagggaggggaatattatatattagggtttgttggggggtggggtgtaatgggagagagagtattaggagaaatatttaatgtagatgatgggttgatgggtgtagtaaattattatggcgtgtgtatatttatgtaataaaattgtacgttttgtatatgtattttagaattttttttttttttttttgagacggagttttgtttagtcgtttaggttggagtgtagtgttacgatttcggtttattgtaagttttgtttttcgggtttacgttatttttttgttttagttttttgagtagttgggattataggcgttcgttattacgttcggttaatttttttttgtatttttagtagagatggggttttattatgttagttaggatggttttaattttttgatttcgtgatttatttgtttcggttttttaaagtgttgggattataggcgtgagttatcgcgtttagtttgtattttagaatttaaagtataataataataataataaaaagataggtgttattttagatttttgatttagtcggttgggtagtaagtatgttagtttaggaatgggttaatagatgaggtagggttttgtaaattaaaaataaaattttttaagaggttggagtgggtggattatttgaggttaggagttttagattagtttggttaatatggcgaaattttatttttattaaaaatataaaaattagttaggcgtggtagtaggtgtttgtaattttagttatttaggaggttgaggtaggagaatcgtttgaatttgggaggtggaggttgtagttagttgagatggtgttatagtattttagtttggtcgagagagtaagatttcgttttaaaaattaaataaattaataaaataaaataaaattttaagtttttatcgttttttatttttaaaatatttgaatggattttttttttagttagagttttttaaaaatttaatttgagagagtgttttaagtcgtgacgggaagtaggggttgaatatgtttttcggtgttttttcggcgttaatatttatatagtttttaagtttgagaagaaatattttataattttttttttttgattttagtatcggaagggtttttgtttaaataagaatttgagtttttataattttttattttaatttagatatttttttttattgattttaggattttaaagaaatttaagtaattgttaattagaaaattttaaaatttatttataagttggaagttttttgttttgggttgtttcgtttttttggataaaattaatgtgttttttaaattttattgatgttttatgtttttttaaaacgtataatattaagttgtatttcgattattttgaggatacgttttcgggattttttgagggttgtgttatgggttatggttatttatatttggtttagaataaatttttttaaatatgttagagttggattttttttttttttttttttttttttttttttttttttgagacggagtttcgttttgttatttaggttggagtgtagtggtttgattttggtttattgtaatttttattttttcggtttaagcgatttttttgtttcggttttttgagtagttgggattataggtgtatattattatacgcgtttaattttgtattttagaagagatagggttttattttgttggttaggttggtttttaatttttgattttaggtgatttattcgtttcggttttttaaagcgttgggattttaggcgtgagttatcgcgttcggtttagtttgatttttttcgtggatagtttgaagtgtggaatgtaagaatatttagggttatttgttaggttgtaaagttgttttattattttgcgggaaaatggatataattttaggtttaggtgttaatagataatattgttaagtgtgggaagggcgataattgtattgtagttgtggttagtggcgcgggagggtgtttaaatttaaagtttattggaaggcgagtcgtttatgattaggattagggtttaggtgttttagatagaaggtatttcgttttttattgttttttattaattttcgtgattaggagtttttatttttaattttgttttggggattttggggagaaattgttttagcgtagaggttattttaagggttgtttttggttcggcgtaaagggttcgttcgttattttttcggttgcgtatttcgcgttcggacgttttagaaaggatttgggacgggggttgtttgtggagcgggggtttaggttttttgagtagggagaggattgtattttgttttttttggggaattttttgaggtgagtagcggggaggggtttttatattttttttagtaggggagtcgggagttttttttgtttttattgtagagtaggggagggtttttgttaggggcggagaaggggttgtaggggcgagtggggaggggggttatacgtttttaagaagggcggtagtttcgtgtcgttatagttgtaggcgtgtatttaggaggttgtagatagggagggattcgtattttttcgagtaggggagttgttgggaaagtttgtttttttgtttttattggagattagggggtgaggggcggagaagtggttgtaggggcgagtggggagagggggttttatgtttttaagaagggcggtagttttgtgttattatagttaagggtcgttttcgggcgtgtatttagagggttgtaaatcgggagggattcgtattttttcgagaacgttgtagtttattttgtttcgggtcggcgtcgttttggttacggttttgtgggtgggtgagggggcgtgggtagttttttgagaaggggcggggcgtgtatcgtatttttttcggcgttgtttgggttattttcgttcgtttattttttttgtttttttttcgggttcggcgttttcgttttttttgtgcgcgcgtggaggtcggggcggggcgggcgtagtcggcgttgagtttgtagggtcgttttttttattcgtttttttcgagttttcgggtttcgttttattcggttcgtgggggagtatttgttttgtcgttttcgtttacgttttgtatttcgggatcgtttttgcgcgttttgggcgtattatggttcgcggggttgcgttggcgttgttgtttttcggtttgttgggtgttttggtcgtcgtttcgggtgagcgagcggagggattcgggttgggggacgcggagggcgcgggtcgggattggggattcgtttgagatgcggcgttgggggcgtttcgcggggatattcggagttttttttttgttcggtaggacgcgttgtgtttacgggggtttaggttcggaggaggcgtttattttttttttaacgttttttttggagtcgttttagagagaaaagttagcgtttgttgtcggagttgtaaatttttatatgtggggcggttttgggagaggtgcgttcgattttttttaatttaggggatttttttatagatttttttttttttgtatgagttttttattttatttcgttatttatttttagggtttggggatttgcgtttttaggtcgcgcgcggaggtcgttttggagttgtttgttatagttacgttttgcgtttcgggtttaaatttggaatcgttaggagtttgagattcgggtggtggggggaagggaaggaaaagttagaaaaaaattttgagttttgaaaatgtttaaaaatattttgtggatgcgggtttcgggaattttagcgcgtgttgtgcgttaagtaatacggggcgtagaaagaaacgtgtgtttattaaattgtttatttgcggcggtggagaattcggaaaatagaaaaagtgggtagggaagaaagagttacggttatttttttacgttttaaatcgggtttatttttaattattattttaattatgtttttttgtttttttttttttgaaacggaaacggagattttgtcggatgtggtatgttataaattttttttttatgttataaattttttttttaatggttagtgtattttttgtttttcgtatgggtaggtttttaagtagatcggtttgcgggtagtgtggattttaggacgggttttattagggttggacgtatttaggaaggagacgcgggaacgttcggttttggggaggacggaggaggttcgatttgtgtt

SEQ ID NO: 1226 - DNA, 6184 bp, Artificial Sequence
  chemically treated genomic DNA (Homo sapiens)
aatataaatcgggtttttttcgttttttttagggtcgggcgttttcgcgttttttttttaaatacgtttagttttgataaggttcgttttgaagtttatattgttcgtaagtcggtttatttaaaagtttgtttatacgaagagtaaaaaatgtattgattattgaaaaaagaatttataatatgaaaaaagaatttataatatattatattcggtagggttttcgttttcgttttaaagggagggaaatagaaaaatatgattaaagtaataattagaaataggttcggtttagggcgtgggagggtgatcgtggtttttttttttttgtttattttttttgtttttcgaattttttatcgtcgtagatggataatttggtaagtatacgtttttttttgcgtttcgtgttgtttggcgtatagtacgcgttgaaattttcggagttcgtatttatagagtatttttgaatatttttagggtttaaagtttttttttaattttttttttttttttttttattattcgggttttaggtttttagcgattttaaatttaggttcgggacgtagggcgtggttgtgataggtaattttagggcggttttcgcgcgcggtttgaagacgtaggtttttaaattttgggggtagataacggggtggggtgaggggtttatgtaaagggagagagatttgtaagaaggttttttagattgggaaaaatcggacgtattttttttaaggtcgttttatatgtaagagtttgtaatttcgataataaacgttgatttttttttttggaacggttttaggaaaagcgttggggagaaagtgggcgtttttttcgggtttgggttttcgtgggtatagcgcgttttgtcgggtagggaggaggtttcgggtgttttcgcggggcgtttttaacgtcgtattttaagcggatttttagtttcggttcgcgtttttcgcgttttttaattcggattttttcgttcgtttattcggggcggcgattagaatatttagtaggtcgaagagtagtagcgttagcgtagtttcgcgggttatggtgcgtttagagcgcgtagggacggtttcggagtgtagggcgtgggcgaaggcggtaggatagatatttttttacgggtcgggtggggcgaagttcggggattcgaagggggcgggtgaggggagcggttttgtaagtttagcgtcggttgcgttcgtttcgtttcggtttttacgcgcgtatagaaggggcgggaacgtcgggttcggggaggagatagagggggtaggcgggcgggggtggtttaggtagcgtcgaggggagtacggtatacgtttcgtttttttttaggaaattgtttacgtttttttatttatttatagggtcgtagttagggcggcgtcgattcgaagtaaagtgaattataacgttttcgggaaagtgcgggtttttttcggtttatagttttttgaatgtacgttcgagggcggtttttaattgtagtggtataaaattgtcgttttttttggaaatatagagttttttttttttattcgtttttgtagttattttttcgttttttattttttggtttttagtgggagtaaaaaaataaatttttttagtagtttttttgttcgggaaagtgcgggtttttttttgtttatagttttttaaatgtacgtttgtaattgtagcgatacgaaattgtcgttttttttggaaacgtgtagtttttttttttattcgtttttgtagtttttttttcgtttttagtagggatttttttttgttttgtagtgggagtagaggaaattttcggtttttttgttgggaaaagtatgggggttttttttcgttgtttattttagggagttttttaaggggagtaaagtgtaattttttttttgtttaggaagtttaggttttcgttttataggtaattttcgttttaagttttttttagagcgttcgagcgcggggtgcgtagtcgggagggtggcggacgaattttttgcgtcggattaaggataatttttggagtagtttttgcgttggggtagtttttttttagaatttttaggataaggttgggagtggggatttttggttacgggagttagtgaggggtaatagggaacgaggtgttttttatttggggtatttgggttttagttttggttatgggcgattcgttttttagtgggttttgagtttagatattttttcgcgttattggttatagttgtagtgtagttgtcgttttttttatatttaataatgttatttgttaatatttaagtttaaaattgtatttattttttcgtagggtagtggaataattttgtagtttgataaataattttgaatatttttgtattttatattttaaattgtttacgaaaagagttaaattaggtcgggcgcggtggtttacgtttggaattttagcgttttgggagatcgaggcgggtggattatttgaggttaggaattggagattagtttgattaataaggtgaaattttgttttttttaaaatataaaattagacgcgtgtggtggtgtgtatttgtagttttagttatttaggaggtcgaggtaagagaatcgtttgaatcggggagatggaggttgtagtgagttaagattaggttattgtattttagtttgggtgatagagcgagatttcgttttaaaaaaaaagaaagaaaaaagaaaaaaagagaaaggagtttaattttaatatatttgaagagatttattttgagttaaatatgagtgattatggtttatgatatagtttttaggaggtttcgagaacgtgtttttaaggtggtcggggtgtagtttggtgttatacgttttagggaggtatgagatattaatgaaatttaagagatatattggttttgtttagaaaggcgggataatttaaagtaggaggtttttagtttataggtagattttagaattttttgattggtaattgtttgggtttttttaaagttttgggattaatagaaaagaatgtttgggttaagataaagaattgtgaagatttaagtttttatttgaataggaattttttcggtgttagggttagagagaagaggttgtaaaatgtttttttttaaatttaaaggttgtgtggatgttaacgtcggagaggtatcgggaggtatgtttaatttttgtttttcgttacggtttgaaatatttttttaggttaaatttttaaagagttttggttgaggaagaagtttatttagatgttttgaaggtggggggcggtgggggtttagaattttattttattttattaatttatttagtttttgagacggagttttattttttcggttaggttagagtgttgtggtattattttaattaattgtaatttttattttttaggtttaaacgatttttttgttttagttttttgagtagttgggattataggtatttgttattacgtttggttaatttttatatttttagtagagatggggtttcgttatgttggttaggttagtttggaatttttgattttaagtgatttatttattttagttttttaaagaattttatttttggtttataaagttttgttttatttattggtttatttttgggttggtatatttgttgtttagtcgattgagttagggatttgagataatatttgtttttttattattgttattattatattttaagttttggggtataggttgggcgcggtggtttacgtttgtaattttagtattttggaaggtcgaggtaggtggattacgaggttaggagattgagattattttggttaatatggtgaaattttatttttattaaaaatataaaaaaaaattagtcgggcgtggtggcgggcgtttgtagttttagttatttaggagattgaggtagaagaatggcgtgaattcgggaggtagagtttgtagtgagtcgagatcgtggtattgtattttagtttgggcgattgagtaagatttcgttttaaaaaaaaaaaaaaaaagttttggggtatatgtgtagaacgtgtagttttgttatataggtatatatacgttatagtggtttgttgtatttattaatttattatttatattaggtattttttttaatgtttttttttttattgtattttattttttaataggttttggtgtgtgatgtttttttttttgtgtttatgtgtttttattgtttaatttttatttataagtgagaatatgcggtgtttggttttttgtttttgtgatagtttgttgagaatgatggtttttagttttattcgtgtttttgtaaaggatatgaatttatttttttttatggttgcgtatattttatggtgtatatgtgttatattttttttatttagtttattattgatggatatttgggttggttttaagtttttgttattgtgattagtgttgtaaaaatatacgtgtgtatgtgtttttatagtagaatgatttataatcgtttgggtatatatttagtaatgggattgttgggttaaatggttttgagttattttttgtttgcggttatatttatttttttttaggttatttgtatttttaggttagaaatttgtaaggttagaggggttgggtttgtgttttagagatttgtttagtaatgtgagttcggtggtgtgagtgatgtatattttaaaaagtaatagtgtgagtttgtatatcggaaggtttttttttttttttttcgtttttttttcggttagtaaaattttagtaatataattgtattttagaagtatgaggaaaatgtaatcgttttttatgggaatattatttttaaagtgttattttttggagtgaattcggatgaattatttaattagagttttttttttggtatttttttttgtatttttttttcgatttttttacgtggtattgattttttattaattagtattttttttttttttggttatagttttgggttggggttaagggagggtgtggattttaggttagggtaagtaggaggattttgggggtttattttgaggagtaagaggatgttggagttgttcgggtattttggtattttgaggtaagtttgatttgggatgaagtagagataaaaagaacgtagggtttttttgttgttttatattttaaatatttttttttttgtgagttttttgttttatttttattatcgttaaaagaaaggtttttttttggattatttttagtttttgatatttggacggtattgtaggtgaagttttttttttttgattgtttattatgttttagtagagtttagattttggttgttttttagggagggcgtaggttattttcgttagttataataaagatgtaatattagtttttgaaagttaggttttgaggttttttatttatgtttttataggtaagtatttggaagatttttgtttttaatttatttagttagatgttttttgttttttttttttatttttttttaacgttgttattttttggttttaaatatgaatttttataatattttgtagattttttggaattggtattaagaggtcgtaatttttagaatgaaaattaaattaattgaaaaagttttttgaattgtatttaggtgttacgggaagtattttttgaaggttataaattaggttgaagaagggatggggaatttattgttggggtagtttttatgtttttcgtttattttattagtggaattttaagaaataattatgttttgattattttcgagggatttacgtggttacgttgtatattttaatttaatttttggtagtttttagttttttgcggaaattttttatgtgtttttaatttttaagaattagttttttttttatttatttatttattgagatagagtgttattttgttgtttaggttggagtgtagtggtacgattttagtttattattttttaggtttaagcgatttttgtgttttagttttttgagtagttacggttataggtatttattattacgtttggttaatttttgtatttttagtagagatggagttttattacgttggttaggttggtttcgaatttttgattttaattgatttgtcggtttcggtttttcgaagtgttggtattataggtatgagttattatt

SEQ ID NO: 1227 - DNA, 5395 bp, Artificial Sequence
  chemically treated genomic DNA (Homo sapiens)
tatttatttagtcggaattggttttggttattttgggagggcggggtgggggttgtaagttttttgttacgtagggagttttttagttagggagaggagatagggttttaggataggattttgaagataaggaagggtagtgtagagaggggtgagagagttagattgggtttttagggggtggtttagggtgggagttgatttgtttttgttgagattgcgttttaggtgtgagtattgatgtttagtttatgtagttggagaggagttatagttatgttttttagttttagtttatttttttagattttagatttagtgtggtttttttttattttttagagtatgtggttaagttttttttttagttcgaattttttttttatttgttaattattaggatttatatgttttagttttttagggttaggggatagggtttcgtttatttggtaggtttaagttggttgtttggttgtcgggatttaggcggcgtttataaggatttgggtttgtatagtttttaaagggttgttgtttatttttttgtatttgtttttattttttttttttttggattttttgagtttttggtttttttttgttgggatttagattattttgtgttttagttgaattatttttttttttagtttatatatatttatttagggtttattatatttagaggttttcgttttagtttttgtttttaggttgtgtttagggttgtgaggatggcggtggtttttattttgtaaaatagttttttagtgataataatgtttagggataatatttatggagggttttttatgtattaggattattttgagtattttttaagtgttagtttttttaattttggaaaggattttatgaaattagtatttttattatttttgttgtatatatgagagattgagtaaaagtcggtggtttgtttagggttatatagttaattggaatggttaggagtagatttggtgattatggattttagattttgattattgtatacgttgcgtttgggatttcgtttggtatttgaggttcgtggcgcgttggtgttgattatttagagtgtttatgggaagtgtagtttagagtttgtgtgttttttgatttttttgatttttattttattgaggaggtttttaggttattcgaggggtttagagtgattttgtggattagtagtggagtttagtttgagttagcgttttttaggggtcgtgttttgtttttattttttggtttattttgtaggtagtagggaattattgaagattagagagaattaaatatttggagagagatgattttgttcggggagtttaggtttttgtttgggtgtatattttagggttagatggtgattttttagttattttagttttataggtttatagtgtatgtgagtatttatgtggatatacgtgtacgcgtatatatatggatatatatatatatatatatatcgttgtttttggaattagattatgaaaatgtttttttagaggtttaggggtgaggaagttgaggtgagttgtgtttttagttggatgtgttgggatggggtgggagatgaggtggttatatttgggtggtaggaattttggggtagtgaattttttaacgaatagatttgggatgttgttatgaggaggaagagggagttagtagttatgtttgttaatgttttttagcgtatttgtttatggttagcggataattattgtgtttttatgggttttaaggtgtattattttttttttgtttttataataaattaatataaatttttagtagttttaaataatacgtatttattattttatagtttttgtgggttagtagttcggcgtgatatgattaggttttttgtgtaaggattcgtatggttaaagttaaggtatttgaagggataagggaaaaatttatttttaagtttaatttggttgtgagtagaatttagttttttgtggttgtattatgaggtttttggttttttttatttttaaagtcggtaatggatatcgagtgttttttttgtttggaatttggtattttagttggagaaaattatttgtttttaagagtttatgtgattagattgggtgtatttagatgttttatgttaatttttttattatgtatagatgtataattttaattgtatttgtgaagtgttttttgttaggtaatatggtatatttgtaggttttagggattagtgtttgttttttttttgttattttttagtgggtagggggttatttgtttattacggaggtaaggggttaggaggtatgtatatagtaatgtttaaaaagagattgtttttattgggatggagtttatcgtttagatatgtagttttaatttagaaatatggagatagtttcgaaggataggataggtattgggtacgtgtgggaatggattaagttaggtgtttcgggggtttttttaaggaattaaggttgagttaagaattgaaggatgagttggagttagatgagggaaaatgtgggtaaattggattttagaattaatttttaattttggagttaggagttatggtattgaaggatagtgcgttataatttagagaattagggagggttggcggaggtttatagggatcgggttattttagggttttgtgatagtattatttttagtattagaggagattgttattggtatttaggttatttggtgtttataatatttttatgttaggtgaatattattgttatttttaaattatagatggggaaagtgagttaaatgtttatgttagtaagaggtaaattatattatttttttgggtatttttttagaaggatgaggttgattgttattggaaatagttggggagggtataaggagatgataagtggtttagaggttgttttggttataagaattaaagaggaaagaaatattaagggtggttcgatagttaataaggataggtttattttggaaaataaatttgagaggggtttttggttaagttaggttagagttatatttttttataaattaaggatatttaagggttttggagggggtttttattataggttttgaatgtttttgtgtgagggaaagtttattgcggggatggaatgtttttggttagaagggaggttgttttcgggttggtatgtttttggttagagaagggtttattttagggttggaatgtttttggttatgttgatattagttattaggttgatattttcgggttggatttaggcggtttttaattaagggggaatttagaatggtggtgtttgtttaagatggtaatgtttttgtttcgttattggttaggtaaggtaattttttgttatggtaataatttgagattggtaggggtttatttttaggggtagtttatgtgtttgttggcgaggttgtattttgttatttaggtttatagggtataggttaattaggttttggttttttagttttttgtttggagtgatttatgtaattttgtttagtttttatagggtatagggagtcggggttaattttgttgtttggggttggaaatagattttttttttgaggagtagtagtttattatagggaagttatagtggtttaggttaaaggggatgtaggtagtgtagattaggcggtagtttagggaatggagagaagtgggaataaagggatagtgaaaggaagtatattttattggtaggtgatgaggtgtaggaggataagttatatatttggattttatagagtagtggatatttagttagttgttgttagcgtttgggatttaggggagtgtttttggttggagatatggtatggagtgttattagttagggagttttgggtataggtaagagaaggtgtgatattaggagggaaagagtttggggtttagttgtaggaattaatatttataggttatttgtataaatgggttatggggttttttagttggaggttggttggtgttacgagggttttataggtatgggtgttttttttatattatatggtttttattgagattggtatatggattgtatttattagagattaaggataggatttttttggaaatttttgaggatttggtttgtgatttagttgttgttttgttttttttttgttatgttatggtttatttttttttatttatttatttatttatttatttagtagtattagttaatgttttttgtatgtttggtatttgttagatggttttcgagtttattattagtggaaaagatatttaagaaatttattaagggttttatgagaggttatatacggtggatttgattagggtgtggtttttttgaggagttgaagttgtttagaggtttagagaaggggagttgagtacgtttgaattattgaatttgttttggatttcgttttttttttttcggtgttttttagtattttattttttttaaagagtaggggtttagggaagttttttggatggtgattcgtaggggtagttttttttttatttgtcgcgatgattatttcgttttattttaaatatataagtttacgtatgcgggattggagtttttgaggatatgtggtttaaagataggaggtataggggtttagtgcgtgtagtggaatgaattgggttttatttttggaagggtaaggggttatttttcgggtttatcgtcgtatttttattttcggtatagcgttttttggcgattaatatcggtgatttagtgaaaggattaagaaagattcgaggcgaggtcggaataggtcgatttttagtcgttaagtggagaataggttggagcggtgcgtcgggtttagcggcggttgttggaggaacgggcggagtcgtttagggttttgttttgcgggggtcgagtcgaggtaggcggtgatttttttattcggggcggagtcgtagtttcgcgggggcggggtttggcgtcggcggtggcgttataaaaggcgggattatagtggtgttcgagaagttaggtacgtagtttagcggcggtcgcggcgcgtgcgtttgtgtttttgcgcgggttttttggtttttttgttattatgtcgatgtttatcgtaaatattaacgtgtttcgcgttttcgtgtcggacgggttttttttcgagtttatttagtagttggcgtaggttatcggtaagtttttttaggtttgtcgggaggggataggaagaggggggtgtttatcggacgaggggtttcgcgttgggagttggggaggcgatttttgaacggagttggggggcggggcggggggaggacggtggttcgggttcgaagtggacgttcggggttcgacgaggtcgttggggcgggttgatcgcgtttttttttcgtagt

SEQ ID NO: 1228 - DNA, 5395 bp, Artificial Sequence
  chemically treated genomic DNA (Homo sapiens)
attgcgaggaaagggcgcggttagttcgttttagcgatttcgtcgggtttcgaacgtttatttcgggttcgagttatcgtttttttttcgtttcgttttttagtttcgtttaggagtcgtttttttagtttttagcgcggaatttttcgttcggtgggtatttttttttttttgttttttttcggtaaatttgggggggtttgtcggtggtttgcgttagttgttgggtgagttcggagaggaattcgttcggtacggaggcgcggggtacgttggtgtttacgatgaatatcggtatgatggtagaaggattaggagattcgcgtagaggtatagacgtacgcgtcgcggtcgtcgttgagttacgtgtttgatttttcggatattattgtggtttcgttttttgtgacgttatcgtcggcgttaggtttcgttttcgcgaggttgcggtttcgtttcgagtggggaagttatcgtttgtttcggttcgattttcgtagggtaggattttgggcgatttcgttcgtttttttagtaatcgtcgttaagttcggcgtatcgttttaatttgttttttatttggcggttagaaatcggtttgtttcggtttcgtttcgggttttttttagtttttttattaagttatcgatgttagtcgttaggaggcgttgtgtcgggggtggggatgcggcggtgaattcggaagatggttttttatttttttagagatgaagtttagtttattttattgtacgtattgagtttttgtattttttgtttttgggttatatgtttttaagggttttagtttcgtatgcgtgagtttgtgtgtttgagatggggcggggtagttatcgcggtaggtgagaggggagttgtttttgcgaattattatttagggaatttttttgaatttttgttttttaaagaggataggatgttgggaggtatcgaagggaaggaggcgaggtttagagtaggtttagtggtttaaacgtgtttagttttttttttttgggtttttgggtaattttagttttttagggaagttatattttagttaggtttatcgtgtatggttttttatagagtttttggtgaattttttaaatgttttttttattaatggtaaattcggggattatttagtaggtgttaggtatataagagatattgattaatattgttgaatgaatgaatgaatgaatgggtgaaagaagataagttatgatatagtaggaagaggataaggtagtaattggattataggttaggtttttagagatttttagggaggttttgtttttggtttttgataggtgtaatttatatattagttttagtgaaggttatgtgatataggaaggatatttatgtttgtgggattttcgtggtattagttagtttttagttgggaggttttatggtttatttatataaatagtttatgggtattggtttttgtagttgggttttagatttttttttttttggtgttatatttttttttatttgtgtttagggttttttaattgatggtattttatattatgtttttagttaggggtatttttttaagttttaggcgttgatagtagttgattgagtgtttattgttttgtaaagtttaaatgtatgatttgtttttttatattttattatttgttagtaaaatatgtttttttttattatttttttatttttatttttttttattttttgaattatcgtttagtttatattatttgtattttttttggtttggattattgtgatttttttatggtggattgttgttttttaagggaggagtttgtttttagttttaggtagtagagttagtttcgattttttgtgttttatgaaagttgagtagaattatataagttattttaggtagaagattgaagagttagggtttggttgatttgtgttttgtgaatttgaatgataaggtgtagtttcgttagtaagtatatgagttgtttttggaggtgagtttttgttaattttaggttgttattataataaagggttgttttatttggttagtgacggagtaggagtattgttattttgaataaatattattattttaagtttttttttaattaaaagtcgtttaaatttagttcgaaaatattagtttaatagttaatgttagtataattagaaatattttaattttaagataaatttttttttgattagaaatatgttaattcggagatagttttttttttgattagagatattttattttcgtaataaatttttttttatatagaaatatttagaatttatgataagaattttttttaaaatttttaaatatttttagtttgtaagagagtgtggttttgatttaatttggttagaagttttttttaagtttgttttttaaaataaatttgtttttgttgattgtcgagttatttttggtgttttttttttttttaatttttatagttaggatagtttttgagttatttgttatttttttgtattttttttagttgtttttagtggtagttagttttatttttttagaagggtatttaaagaagtgatatgatttgttttttattagtatggatatttggtttattttttttatttgtaatttggggatgataatagtgtttatttgatatagaggtgttatgagtattaagtggtttaaatgttaatgatagttttttttgatattaggggtagtattgttataaggttttggggtaattcggtttttgtgagttttcgttaattttttttggttttttgagttatggcgtattgttttttagtattatggtttttggttttagggttgggggttggttttgaaatttagtttgtttatatttttttttatttgattttaatttattttttagtttttggtttagttttagttttttgggaaagttttcggagtatttggtttggtttatttttatacgtgtttagtatttgttttgtttttcgaggttatttttatatttttgagttaagattgtatgtttaggcggtaaattttattttagtggggatagtttttttttgggtattgttgtatgtatattttttgattttttattttcgtggtaggtagatgattttttgtttattaaagaatagtagggggaggataagtattaatttttggaatttataagtatgttatgttatttggtaaaaagtattttatagatgtaattaggattatgtatttgtgtataatagggagattagtatggagtatttgggtatatttaatttaattatatgaatttttaaaagtagataattttttttagttagagtgttagattttaagtaagagaaatattcgatgtttattatcggttttgaagatgaaggggattagagattttatggtataattataaggaattgaattttgtttataattagattgaatttggaagtggattttttttttgtttttttagatattttgattttggttatgcgagtttttatatagaagatttagttatgttacgtcggattattgatttatagaaattgtgagataataaatgcgtgttgtttgaagttgttaaaaatttgtgttgatttattataagagtaaaaaaaaaataatatattttgggatttatagggatataataattattcgttaattatggataaatgcgttaggaggtattggtaggtatggttgttgattttttttttttttttatggtagtattttagatttgttcgttagaaggtttattgttttagagtttttgttatttaggtgtggttattttattttttattttattttagtatatttagttggaggtataatttattttagtttttttatttttaggtttttgaggaagtatttttatggtttgattttaaagatagcggtgtgtgtgtgtgtgtgtgtgtttatgtgtgtgcgcgtgtacgtgtgtttatatgagtgtttatatgtattatgagtttatgaagttagagtagttgagaagttattatttagttttggagtgtgtatttagataggagtttgggtttttcgggtagagttatttttttttaggtgtttgattttttttaatttttaatgattttttgttatttgtagaatgaattagagaatgggggtagaatacgatttttgaagagcgttggtttaagttgagttttattgttaatttatagggttattttggatttttcgggtggtttaaaggtttttttaataaaatggagattaaggagattaggaagtatatagattttagattatattttttatgagtattttgaatgattagtattagcgcgttacggattttaggtattaggcgaggttttagacgtagcgtgtgtagtgattaaggtttggggtttatggttattaggtttatttttggttattttagttagttgtgtgattttggataagttatcggtttttatttagttttttatatgtataataggggtaataaaagtattaattttatggggttttttttaggattaaaggagttaatatttggaagatatttagaatggttttgatatatagaaagttttttatagatgttatttttgaatattgttgttattgggagattgttttgtaaggtaaggattatcgttatttttataattttgggtatagtttgaggataaggattgaggcggaagtttttggatgtagtggattttaggtggatatgtgtaaattgaagggaaaaatgatttagttgaggtatagagtgatttgggttttaataagagggaattagagatttagagggtttaagaaaggagaggatgagaataaatataagagaatggataatagttttttggaggttgtgtaagtttagatttttgtgagcgtcgtttggatttcggtagttaggtagttaatttgagtttgttagatgggcggggttttgttttttggttttgggaagttgggatatgtaggttttggtaattagtaaatgagggagggattcgggttaggagaggggtttgattatatgttttgggaggtggggagaggttatattgggtttggggtttggggaggtgggttggagttggggagtatggttgtgatttttttttagttatatgggttagatattaatgtttatatttggaacgtagttttagtagaggtaggttagtttttattttggattattttttagaaatttagtttggtttttttatttttttttgtattgtttttttttgtttttaaggttttgttttgagattttgttttttttttttaattgaggggttttttgcgtaataagggatttgtaatttttatttcgtttttttagagtggttagagttaatttcggttgggtgggtg

SEQ ID NO: 1229 - DNA, 14950 bp, Artificial Sequence
  chemically treated genomic DNA (Homo sapiens)
tgtgacggtattaggagatggtgtttttgggaggtgtttaggttaggagggtggagtttttttgaatgggattagggtttttataaaagagaatttagagagatttttagttttttttattacgaggatatagtgaaaagataattaattataaattagaaagtggttttttagtaaatatcgatttgttataggtttagttttgtattttaagtttttagaattgtgagtaataaatttttgttgtgtataagttatttagtttgtggtattttgttataatagtttgaaatgattaaaataaaattataaaattgagttatgattttgatgaatttatagagtaagggggtagaaattttagttaagggtttgttaaagatagaaaatgtaaaaagaaattatttattttaaagttggtattataatatattatatttttagggtaagtttgtattttaaattattatgtttttagggtaagatagaattagatttattaaattatagatttgtagaaaatttatattggtagtaagtagattggagagattgtatattaagaaaattattttgagatattataattatggttgttgtatttgtagtttatatttttttttttagtattgtgttttaagaaattataagttataaatttagagtagtattgaattaatagtgtttttaaatagttgagagaaataaatgttaattatttttaggggaagggatatatattttaagttttaaggaatttttataaatattttttttaattacgataagtagtatataattaaagataattaagtatataaggaaataagtcgtgtaagtaataaatagtagaaataataagtagaagaaaataaagattgtaaatattgttattattagatattttattaaaatgatgtttattatatataaaagaagaaaaaagaaatttgaagttatatgtgtgagagaatttatatgtagtgatatagaatatttgaaaaggaattaagaaaattttaagaattgaaaaatatattattgaaatggaaaattttaatggataggtatgatagtatattgtaaaaatagaaaagataattagtagtgaatttgaggataggttaaaagaaagtatttataaattataatgatgatattaaaaaataagaaaaagaaaaaagaaaaaaaatagagtagagtggttaagagataggaaagagagagtgggaaaaggtttatatatattttattgtaattttgaagaaggagagaaaatggagtatagatagtatttgaagaaataatggagtgtttagggaaagaggatgattggtatttatagaataggttattttatttatttgattattaaatttttttttgttaagattatttattggtgaatatttatatggaatataaatattatgtttttgtttatttataaaaatttgtttatttattttttgttaaatttttatgttattattttttttttagttttttaattatattttttggttttagattatttagttaaattattagttatagtattaagtaatattgaattgtatttatagttatttttttttttaagtaaaatgaataattagatgtattgtttgaagttttttttattggaagaatttttttttattattgtttaaggagttttagaagggagttatagtgttatagttgtttaattttgaatggtatttgtatattgtatagaatcgtttgtaaattaagtttaagtttttttttttttagtaatgaggtgggtagagttagtagagttttgggatttttggtggagtggatgtgggggataaggaaaaaagaaggaatgaaggattatttaggttttttatttatatgtttaggtagatgatagtgttattttttgaagttcgtttatttgataaatattgttgattatttgttatatgtaaggtataatgttgggttttgggattatataatattgagttgtatcgataaaaattttatgtttattaaatgatattttagtagggggtgatatatagtaataaataatatagtatgttaaataatgaaaagtgttgtgaaaaaaagataataggaaagtatttatgtatgttgggggtgagatgggtattgtagttttaaattggatagttagggaaggtttttttgagatagtaatttttgagtgaaaatttgaaggatatgagggagagttgtgtatatgtttaggaagaatgatttaggtagaaggaatagaaggtataaagattttggggtaggtatgtttggtagattttaggaatataaaggttagtgtggttttaaatagggaatgaggaaagggggtgaatttgggattttattttttaatgagatggaagtttttatagggttttgagtagaagaatatatgaattattttatatgagaataagattatcgttatttgaggatagattgtatgtaggagggtaaagatagaagtagagatattatataagaagttattggaattatttatagtaagagatgatgttgggttgagtggtgttaggatggtaataggaagtagtaagaagggtgattagattttggattgggtaggtagagaaagttttggggatttttaatatttaaaggttagtgagtttttaagtaattggaaaaagggattgagaaagtagttagtgaagttttgaggaaaattaggaggtgttttggaagttaagtatagaagatgtttttaagggagggagaatttaagtatattagatgttgatgagttaaataagatgaatattaaaagttgattattattaaatttagtaatatggggtcgggtacggtggtttatatttgtagttttagtattttgggaggttaaggtgggtgaattatttgaggttaggagtttaagattagtttgattaatatggtgaaattttatttttattaaaaatataaaaattagttaggtgtggtggcgggtatttgtgattttagttattttagaggttgaggtaggagaattgtttgaatttgggaggcggaggttgtagtgagtcgagatcgcgttattgtattttagtttgggtaataagatgaaattttattttagaaaaataaaataaaaaaaaattagcgatatggatgttattggttattttgatttattgagtagtttgggaagaggaatgggtgtaaaaatttgattatagaaggtttaaaaataattggagtatgattttatgtatatgaaatgtatatgaatagaatatgtttagaataggtgtatttatatggatggaaagtagattagtgtttgttagagttgagggtaaggggtataggaaataattgttaatggattggggttttttttggtgatgatgaaaaatttatggttgtataatttggtgaatatattgaagaatcgaattgtatatttttaaaagggtaaattttatggtatatgaattgtattcgattgtgtatatataaattatagtttttttatttatttattgattgatgggtatttgggttggttttatgattttgtaattgtgaattgtgttgttataaatatgtatgtgtaagtatattttttaaataatgatttttttttttttgggtagatatttagtagtgggattgttggataaaatggtaattttgttttttagttttttaaggaatttttatattgttttttatagcggttgtgttagtttatatttttattagtagtgtagaagtgttttttgattattaagtttatattaatatttgttgttttttgattttttgattatggttatttttgtaggtgtaaggtggtattatatcgtggttttgatttgtatttttttgattattagtgatgagtatttttttatatgtttgttggttattcgtgtatttttttttgagaattgtatattgatgtttttagtttattttttaatgggattgtttgttttttatttaatgatttgtttgaatttattttagattttggatattagttttttgttaggtatatagattgtgaagatttttttttattttgtgggttgtttgtttattttgttgattgttttttttgttgtgtaaaagttttttaattaggttttagttatttatttttatttttattgtattttttagttattgttaatttgggttttttatatgtaattgattttttattttaattaatttattagtttaaaaaataatattgtagtaggaatgatatagaatgagtttattattagtagaaaatgatttggttttagaggaaattaaggtgttttaagttgttaagtgggtaatataagaaaatattaatgtagttatttattatatagaagaatatgttataaatagtaagggaatttgaaaagtatattatttatttggattttaatattttttatttggaaattatatttttaatttttgttgtataatattagtatatttattatataatttattttttatataggtgagtaattgtgaatgtgttaaaggttattagtgttgttagttttatattttttattataaattatttatttatgtgaaatggaaataaaaatatgtagaaatttttttggatttgagattagggttttttttagtataattaagtttgtggttaatttagttagtttagttaaagatattagttaattagagtttaggagagaaatgaatattttaaataaatatgatttttaaaatgtgttttttaaagaattttttaggtttaaaatttaatataggagtgatttggaattttattttattattatgaagaaaagtggtgtttttttttttttgggtattattttgttggttttgattggagtgtaaggtaaggggttttgagttaggttgtaaagtaagagaagtgatttattgtaaaagaattttgattagttagataaaggtgaatgttttgtttgtattgaagagtaatatttggttagttataaaagttttttagtgatatgattagttatttaaagtttataatttcgatttgttaagttaaatataagtttttgtagtttaggtgtatgaatttttagtaagtgtttaataaatgtttattgaattgggtaataatgagaattttattttttaaattatttttttttttttgatattgttttttgttaagtatatttgtggttaattaattaaggatttaattaataattagagaatttgtttttaatttatttattaattatttttgttattttggataaattatttaatttttttagattttagtttttttattatttgtaaaatagaattttgtagttatattttttttgattgttatataatgtatggtatatggtataataagtattaagtaaatatatgaatttaagaattaagataatgtattttaaggggtttttaaaaatttaaaatattattgaaaagtaaggtagtggggaggagagaggatgaggatgaaagtggtgattggttataaaggagtgttttttatttaatattaatattagttttattttttaaggttagataataaataatagatggtttaggagttgtttaagaaattgtgattagtatagtatatatgaataaaagtaaaagaaatgagttagggatattgtattaataaattgaagtgtacgaagtatgatattttatataaataggatgaattgatttgaaaatttttagagcggtagaagagagagtatagattttggagttagttagatttgggtttgaattttagttttgttttttaatagttaaatttttattaattttaagaatttttatgttattatttataaaatggggataattttagataagttatattttttgtttttaagttgttttaagtgaggttatgttaaagtgttcgattttagtagttgtttaagaaatgataattaatgttattagttatttgaattgtttttatttttatttttaatttaaatttatgatataagtatattaaagagtttaagtttaagaaaagtatttgtatatgtgttttgtattaattataaatgaaaaaagagtttattttttaagagataaatatatatatattattagatgttttttttgtagagtttaattattatatttaaagatattttggttgcggttgtattgttattttttaatatggtgtatatgaaattttgtaatatttgtagaaaaggaggagaaagaagatttaatgtattgatggtataatgttgtaaatatggaagatagaagagtatttattatatttattttattgtttttgtgttttgtatttatatttttgatattagttataatatgtgtgtataaagtttgaggaaaagaaataaaaatatatatattaaatttaattaatatttttaattttgttaaatttggagaatagtatgaatgtataggatgatttaattttatttattttttattttattttaaaagaaatttaaattaagtaaataaataaaaaagtaattataaagtaaagtaaagttgtttttaagaagttaaatatggagtttaatgtaatacggtataatttttttaggtatatattttagaaaatgaaaatattagtgtttatataaatatttatagtagttttatttatagtggttaaaaagtggaaataatttaaatttttattaattgatgaatggataaataaaatgtggtatatttatataatggaatattatttggtaataaaaaggaataaagtattgatacgtgttataatatgaatgaattttggaaatattatgttaagtgaaagaatttagttattaaagattatatattgttatgattttatttatataaaatttttaaaatatataaatttatagtgatttaaagtagattggtgattatttagagttaaaagggatgaggaataggattaattattaattggaatagagttttttttgggggtgataaaatgtttaaaaattgattgtagtgatggttgtattacgttgtgaatatattaaaaaatattgaattgtatattttaagtggatgaattttatataaattatattttaataaaagtgttattaaaaaaaaaatgttttaatttattaagtatttaattgtatgtaggaaaatattgtgaatgtatatattattggtgtttatattatgtttttatggattatttttattttataaattagattaagaagtataattgttaaaattaaatagtggtagttttttaatattttgaaaaaaattttaaattaatgaatgtaaatttaaattttttttttttttttttttttaaatatagtagtggttttgttgtgttgtttaggttggttttaaatttttggttttaagtgatttttttattttagttttttaaaatgttggtattgtaggtgtgagttatagtgtttagttaagtttttttattttaaattttttttataaatttttagtttttagttttatataagtaaatgtaaaattatgggaaaatgttaataataataaaaaagttttttgtgggggagtgggttagttatagttgtgagtattaatgttttgatttagttagttagtatggtgtagtagtaaaaggtttgggttttggaattagagtttgggtttatatttaattttattattaagaagtagtgtgagagtgggtaagttattttatttttttttaattttagtttttttatttgtaaagtaagaataataataatgaggattttttttttatagggttttgtgagtaaatgagtaaatatataaagttttgagaatggtgtttggtataaagtatgtatttaataaatatggttattaatattatatagtatgtatataatggttgtttttttttgttaaagttattattaataatgtaaagtatcgataatttaagagataataaaattttatgtcgttttaaggaagatgtagggaaatatttgttttgttttttatttttcgtagaagtttattatggtaacgaaaaagtttaaagaagagttttagtaggtttgatggattgatgagatttttattttttagtaagattaaagttttgtaaaatgtttcgggaaggaaaaaaatatattataagataatggtaaagttaataaggtgagaaaatatagcgtatatgttttaagattttaatgttttttattaattagatattattgtaggatttagaatagttagtttttgtttttatggagtttatattggggatagagtagaacggaggatagataagttaagtaagtatataaaaaggaggatttaagaaaataagtgttatgaaggaagtaaaatagggttatgtaattgattaatagtgattgagggagggttatagggaggttaagtaaggtttttttgtagtgttattatacggtaaaattttgaatttataaagataggtgggataataatataatatattaaattggaataattaatgagagtttatgattttacgaggtatttttttgaagtattattagtattaagaatggtttaatagtagttgttgtatgtttgtttttcgttttttttttttttttttttagtattttgggaggttgaggtgggagaattatttgaggttaggagtttaagattagtttgggtaatgtagtgagattttgtttttatataaaaaaaaaaaaaattagttgggtgtggtggtatatattttgtggttttagttatttggtacgttgaggtgggaggattgtttgagtttaaaagtttgaggttacggtgagttaagatcgtattattgtattttagtttgggtagttgagtgatagattttgttttagaaaaaaaaaaaaaaaaaaaaaaatttcggggaaattgttaaaaggattaaaaatttttttttggtaagggggggataatttgaatataaagtaattaaaataataattttaaaaaaaagttttaaagtttataaaaaggtatttttaatgttaatgaaatatatataatttgatttttattgatttgattaagtaggtaaaaattattatatatggatattttattttttttaaaaaaaatataatgtttttatttgtgtaagtaggatagagtgaataaaattttgggaatgatttaaaaagttttggaaaaatagtaaatatattaggtagaaagatagtttagtggttgataagaattgttggttattttaataattaattaaaaagagttttttttagtgtgtttaatgttttttttaaagagtaatgttaattatatagacgtaattttttattttttagtaaaggaaatttttattattattattattatttttttttgagatagaggttggagtgtaatggcgcgatttcggtttattgtaattttcgttttttaggtttaagtaatttttttgattgagttttttaagtagttgggattataggtacgtattattatgttcggtttattttgtatttttagtagagatagggtttttttatgtaggttaggttggtttcgaattttcgattttaggtgatttttttgtttcggttttttaaagtgttgggattataggcgtgagttatcgcgtttggcggaaatttttattattttttaaaaatttattaattattataaagtattataaagaaatatatatatatatttttttttatttaaaaaaaaatttagaggtgggattttgttatgttgtttaggttgtagtgtagtggttatttataggtatgtttatattatattttagttttaaatttttgattttaagtaatttttttgttttagttttttaagaagtcgggattataggtgtatttggtatatatattaatttaataatgtttatagattagtttggtggggtattgttaggaaaataaaatttaaagaaattttaattatttggaaagttattaagtttttatatttaaaatattaaatttttatgatttataaggattttaagagtaatatgatataggtaaaagtttttagattaggggtttaagtttggagttttttgggttatattgttaggttttatgtattagttgagtattaattagttgataatttagggtttgaaattttggtttgtttgagatagtattttttttttttttggtttaattaaattattaaaattttaaagtagtataaaaatgatagaaatataaaaaatttgagaaagtttaaaagaaaataaatatttatttaaagatttggtatttttataagttgtgttataggatattagtacgttttgtgattatatttgcgtatttatttgttgtaaagaggtttgaaaagtagatgtattaaatttggaaatgttttagtttttagaagtagagattgatttattataagtgatttgttgggggtatgattttagaaaggaagtgaaggaaggaggatagtgtagagatacgtaaagtaaagtaaggatgtgtttttgattggagattagttttagttttaatataggaaaatattggagtatattttgtattggagttagagttattttgaggtaatgggttgggtttttgtattatatgataatgggttgtgggttattagggtaggaggatattttttaggtattaggatttcgatttagttgaggataatgttgtagagaaagggtagttgagggttattagtagttgatatttataataagtggggtaaataggtatacgggtttcgtgaagggaatgttagttaggatttaattttaattattaaaaggataatgatgaaatgtttaaattgattgtttaatgggtaagtttattaatttaaggtattataaaaatgataagttgtgattaggattttatatgtatatgagatttgaatgattagaagaaattattttaaaaggttaaagagtattttgtagggttagtgtgttggaagaatagaaagattatagtgtagttgaaaataatatgatattagaaatataggttggaagtagattatgtaggtatttttgagttaggttattaagttttcgttttattttaagtataaatgagaagttatagaaggatttttaggaaaggataatatattataatttacgttttttgaagataattagtttagaggttgtttttatttaaatatatatgaacgtagtatatatgaatatagtataatttatttatttaattattggttttattattcgtagatttggatttaatacggtatgattgtaggagagaagattttttattttttgaggaaaattatttaggtattttgggtagtagtgattaatttgtaataaagtaaaggtttttttgaagttgtttttttttttttttataatttagatgtatatatttaggatgttttgtaaaacgagagtaaaaggttatgttttatagaagtagatggttttaaataatttttttttttttttatatgttaatttttttaatatttattatggtttttttagttttagtaatatttatggtatgatttagtatttgtttttatgatgaatttgaagaaaaaaaatagttttaaagttttgttttggttagttatgtaaaaagatttagtgatattttttaatttatgatagggagaaaataaaatttgtaaaaagggaaagttagaaaaatattttaattaagtttttattttagagtggaataaggttgagtattagtgaaaaaatattcggtaaattgtgtgttaatattggtttttatttaagtaattatatttttatttgtgttataaatattattagttttgttagttttttgttgggtttatttggttgtaatttgaaaattttgtatttttttttatttttttatattgtatttttatgtagtggttagagagagttttaaatggattaggttatttttttaatttttttttttatttagagtaaaagttgaagttttttagtggtatagaaggttgttatgaattgtatgattgtgtttcgttaaatttatatgttgaaattttaatttttaatgggatggtattaggaggtaattagtttatgaaggtggagtttttatgatgagattattatttttgtaagaagagatataagaaagtttattttttttttttttgatttttgttatgtgaggatacgagaaaatatttgtttgtaaattaagaagagtgttttattaaatattaagatattagatttgttggtatttagattttggatttgttagtttttagaattgtgaggaataaatgtttgttgttgaagttatcgagtttgtggtaatttgttatagtagtttaaaattttatatgatttgattttatattattttattgggttttttttttattatttttttttttgtttattttgtatttttttaattttgtaatgattttttagttgttttaaatgtgttaaattttaggtttttatatttgttgttttttttgatttaagtgttataagttttgtttttttattgtttttaagtttttgtttaaatgataatttattagagatgttttttttgattttatagttttttgtttattttatattttttttttttgttttattttttttaaagtttttattcgtttttgatatatcgtatatttattagtttagttgtttattgtttgtttttatgtattagaatatgagtttaatgaagattgttttgtttattgtttattttgtatatttggagtaatgtatgtatataataggtaattagttaatatttgttgaatgaatgaatgaatgtatggataatttttaatgatttttaattttttaattgtgtgatttattaaagtaggaatttaaaatattttggataaacgtagataaaatttatttgaaaattagtaagtgattaacgtgtgaatttttgttattattttttttattagaaattaatgatattgattgtgttcggaaaagttagttatgtttttatttttttttgattaaaatatattgttttattattattattatttgagatagggttttgttgtgttatttaggttggagtttagtggtataattatggtttattgtaattttagttttttgggtttaaattatttttttgttttagttttttaagtggttgggattataggtgtgtattattatgtttggttaatttttaaatttttttgtagaaatgagggatcgggtgggtgggtttggttatgttgtttgggttggttttaaatttttgggtttaagtgattttttcgttttagttttttaaaatgttgggattataggtgggagttgcgatgtttggtttattgtttaaaaaaattgttagattagttattagagggagtttatgttttttttgttaacgggaaaattatatgatttgatatgtttataaattaaatagaaattttataaagaattatagtttttaaagttaatttaattttttattgtatttttttttttttttttttttttttttttttagacggagttttattttgttgttacgttggaatgtagtggtacgatttcggtttattgtaattttcgattttttggtttaagcgatttttttgttttagttttttgaatagttaggattataggtatgcgttattacgtttagttaatttttttagttttagtagagacggggttttattatgttggttaggatggtttcgattttttgatttcgtgattcgttcgttttggtttttttaagtgttgagattataggcgtgagttatcgtattcggttttttattgtattttttttttttttttttttttttatagttttgttatgagttttttttataagtttatgtatttttttgtttttgtgggtagcgaaaatttttggttttgtttttggataaatttattagggttgatagattttgttattggtataggttttcgttttttatttatttttattgtttttttttttgttgatttaaggtttttaatattttttttagttggtagagattatttttgtttttttattatttagagaaatttagtttagttttgttttaatttttatattattaaaagttttaggtttatttttttttaattaaaggttttatataaaagagatatttgttttgaggtaaattttgaggtttttagtattgtagaagtgattgttggtatttttttttttaagtaatatattttttttttttttgttatatagtttattttgatatgtatttttttatttaatagattgtgatttttagttttttattttagaggaaatgtaggttgtttattttaatggttaaagaaagttggtggtagatggttgtatttatttggttttatattttattagaaggtagaggttaagatttagttttttggagatggagatattagtaagtttttttttttttttttttttgagtaaaataaattttttattaaaatagttgatttgaaatagtatattatatttaaaggaagagtttttttttaatttgtatagtagatttttaaagaaagtaattagttatgtataatttgatatttttttttttaattttttgttagtttgttttagtttataattttattaatggatttagattagattgtttttttgtgatttatttatttttttaaaatgtagggtttaaagttgaaagtttttttttaaatagagatgatattttttttaaaggtttgtggtgattatttttaggtattcggtaaatgatagtaataattatgatttagttaagtgtattattttgatagattatttaaattgaaatattggtttatattgatgtgttttattttttttttttttttagg

SEQ ID NO: 1230 - DNA, 14950 bp, Artificial Sequence
  chemically treated genomic DNA (Homo sapiens)
tttgagggaaagaaaaagatagaatatattagtataggttaatgttttagtttaggtgatttattaaaatgatatatttgattgagttatgattattgttattatttatcgagtgtttaaaaataattattataaatttttgaaggaggtattatttttatttaggagggaatttttaattttggattttatattttaaggagatgaataaattataaaggaatagtttaatttaagtttattaataagattatgaattggggtaaattgataaaagattagagggaaaggtgttaagttatatataattagttgttttttttaaaagtttgttatatagattaaaaaaaaattttttttttagatataatatattgttttaagttaattgttttaataaagaatttgttttgtttaaagaaaaaaagaaggaaggatttgttggtatttttatttttagaaaattaaattttggtttttgttttttggtagagtataggattaagtaggtatagttatttattattagttttttttaattattggagtagataatttgtattttttttggaatgaagaattaaaaattataatttattaggtaagaggatatatgttaaaataaattatataatagagagggaaaaaatgtgttgtttagaaaaagaaatgttagtaattatttttgtaatattgaaagttttagaatttattttagggtagatgttttttttgtatggagtttttgattagggagagatgggtttaggatttttgatggtatggaagttaaagtaaaattaagttaaatttttttgaataatggggaaatagggatgatttttgttagttagggagaatgttggggattttggattagtaaaaagagaggtagtggaggtggatgagaagcgagggtttgtattaatgataaaatttattagttttgatagatttgtttagaggtaaggttaaaagttttcgttgtttataggagtaaagaaatatatgggtttgtggggaaaatttataataaagttgtaaaagagagagaggaggaagaaagtataataaaaggtcgggtgcggtggtttacgtttgtaattttagtatttggggaggttaaggcggacggattacgaggttaggagatcgagattattttggttaatatggtgaaatttcgtttttattaaaattagaaaaattagttgggcgtggtggcgtatgtttgtaattttagttatttaggaggttgaggtaggagaatcgtttgaattagagagtcggaggttgtagtgagtcgagatcgtgttattgtattttagcgtggtaatagagtgagatttcgtttaaaaaaagaaagaaagaaagaagaaagaaaatgtaataaaaaattaaattagttttaaggattataattttttatgagatttttgtttagtttgtgggtatgttaaattatgtaattttttcgttaataagaaaagtatgagttttttttagtggttaatttaatagtttttttaaataataggttaaatatcgtagtttttatttgtaattttaatattttgagaggttgaggcgggaggattatttgagtttagaagtttgagattagtttaggtaatatagttagatttatttattcggttttttatttttataaaaaaatttaaaaattaattaggtatggtggtgtatatttatagttttagttatttgggagattgaagtaggaggatagtttgaatttaggaggttgaggttatagtaagttatgattgtgttattgaattttagtttgagtgatatagtaagattttgttttaaataataataataataaaataatatattttaattagaaaaggatgaagatatgattggttttttcgaatatagttaatattattggtttttaatgagaaaggtaataataaggatttatacgttagttatttattgatttttaggtaaattttatttgcgtttgtttaagatattttaagtttttgttttaataaattatatagttgaagaattggaagttattagagattatttatgtatttatttatttatttaataaatattaattgattatttattatatgtatgtattgttttaagtgtataggatagataatgaataaaatagtttttattaagtttatattttagtgtataaagataggtaataaataattaaattagtaagtatacgatatattagagacggataagggttttggagaaaatgaagtaggggaagggagtgtggggtgagtagagggttgtgaggttagggaagatatttttaataagttgttatttgagtagagatttgaagataatgagagagtaaggtttgtggtatttgaattagaggaaatagtaagtgtgaaggtttgaagtttgatatatttaaggtagttaggggattattgtagggttgaaggggtgtagagtaagtaaaggggagagtgatgggagaggagtttagtgagatagtgtggggttagattatataaggttttgggttgttataataaattattatagattcgatgattttaataataaatatttattttttatagttttggaggttggtaagtttaaaatttaggtgttagtagatttagtattttagtatttgatgaggtattttttttgatttgtaaatagatgttttttcgtatttttatatggtagagattagagagaaaggaggtaagtttttttgtgtttttttttataaggatgataattttattatgaggattttatttttatgaattaattattttttaatattattttattgggggttagggttttaatatatgaatttggcgggatataattatgtagtttataatagttttttatgttattgaagaattttagtttttattttgagtgagaagggaagttggaagaataatttgatttatttaaggttttttttgattattatatggaaatatagtgtaagagggtaagggaaaatgtagaatttttaaattgtaattaaataaatttagtaaagaattagtagagttggtgatgtttatggtataggtaagaatataattgtttaaataaagattagtattaatatatagtttgtcgaatgtttttttattaatatttaattttattttattttggaatgggaatttaattaaaatatttttttaattttttttttttgtaaattttattttttttttattatgagttagagaatgttattagatttttttgtataattaattaggataaaattttaagattattttttttttttaaatttattataaaagtaggtattaaattatgttataaatattattaagattagagaaattatgataaatgttggagaaattaatatgtagaaggaaaagaaggttgtttggaattatttatttttatgaaatatagttttttattttcgttttgtagaatattttaaatgtatgtatttgaattataggagagaaagagagtaattttagaagagtttttgttttgttatagattagttattgttatttagagtatttaagtaattttttttaagaggtgaaagatttttttttttgtaattatatcgtattggatttagatttgcgaatggtaggattagtagttggatgaataaattgtgttgtgtttatgtgtgttgcgtttatatatatttaaatgagaatagtttttaagttaattatttttagaaaacgtaaattataatgtattatttttttttaaaaatttttttatggttttttatttatatttagagtaaaacggaaatttaataatttggtttaaaagtgtttgtatgatttgtttttagtttgtgtttttgatattatattgtttttagttatattgtgatttttttatttttttagtatattaattttataggatgttttttaattttttgagatgattttttttagttatttaaattttatatgtatgtagaattttaattataatttgttatttttataatgttttaaattagtaaatttatttattagatagttagtttgagtattttattattgtttttttagtggttggggttgagttttggttgatattttttttacgaggttcgtgtatttgtttgttttatttgttgtgaatgttagttgttggtggtttttagttgttttttttttgtaatattgtttttagttaaatcggagttttagtgtttgggaggtgtttttttattttagtagtttatagtttattattatgtggtataaaagtttagtttattattttagggtggttttgattttaatgtaggatgtgttttagtgtttttttgtgttgggattaaagttagtttttagttaagggtatatttttgttttgttttgcgtgtttttgtattatttttttttttttattttttttttgagattatatttttaataaattatttgtaataaattagtttttgtttttagggattaagatatttttaaatttaatatatttgttttttaaatttttttatagtagataagtacgtaaatatgattataaaacgtattaatattttatagtataatttgtagaaatgttaagtttttagatgaatatttgtttttttttagatttttttaggttttttgtatttttattatttttatattattttaggattttagtaatttgattaggttaaaaagaaaaagaatattgttttagataagttaaggttttaggttttgggttgttaattgattgatatttagttggtatatgggatttggtagtatagtttaagggattttaaatttgaatttttagtttaaaggtttttatttatgttatgttatttttgaagtttttgtaggttatagagatttgatattttgagtatagagatttaatggttttttaagtaattaggatttttttaagttttatttttttggtagtattttattaaattggtttgtgggtattattaaattaatatatatgttaggtgtatttgtagtttcggttttttgggaggttgaggtaggaggattgtttgaggttaggagtttgaggttgaggtgtggtatgagtatgtttgtgaatagttattatattgtagtttaggtaatatagtaagattttatttttaaatttttttttaaatggaaaaaaatgtgtatgtatatttttttatagtgttttatgatgattagtaggtttttaaaaaataataaagattttcgttaggcgcggtggtttacgtttgtaattttagtattttgggaggtcgaggtaggaggattatttgaggtcgggagttcgagattagtttgatttatatggagaaattttgtttttattaaaaatataaaataagtcgggtatggtggtgcgtgtttgtaattttagttatttgggaggtttagttaggagaattgtttgaatttgggaggcggaggttgtagtgagtcgagatcgcgttattgtattttagtttttgttttaaaaaaaaataataataataataatagagattttttttattaggagataaaggattgcgtttgtatagttagtattgttttttagaggaagtattgaatatattggaagaagttttttttaattggttattgggataattaataatttttattagttattgggttatttttttatttggtgtatttgttatttttttaagattttttgaattatttttaagattttgtttattttgttttgtttatatagatagaaatattgtattttttttggaagaaataaaatatttatatatagtaatttttatttatttagttaaattaataaaagttaagttatatgtattttattgatattaaaaatatttttttatggattttaaaatttttttttaggattattattttaattattttatgtttagattgttttttttttgttaggggaaggtttttagtttttttagtaattttttcgaaatttttttttttttttttttttttttgagatagggtttgttatttagttgtttaggttggagtatagtggtacgattttagtttatcgtagttttaagtttttgggtttaagtagtttttttattttagcgtgttaagtagttaggattataaggtgtgtgttattatatttagttaattttttttttttttgtgtagagataaggttttattatattgtttaggttggttttgaatttttggttttaagtgatttttttattttagttttttaaagtgttgaaaaaaaaaaaaaaaaaggcggggggtaggtatgtaataattgttgttgagttatttttagtgttgatggtattttagaagaatgtttcgtaaggttataaatttttattgattattttaatttagtgtattatgttgttattttatttgtttttatggatttagggttttgtcgtatgatgatattataaagagattttatttgatttttttgtggtttttttttagttattgttgattaattatataattttgttttattttttttatgatatttatttttttagatttttttttttatatgtttatttggtttgtttgtttttcgttttgttttatttttagtgtaagttttatgaaggtagagattgattattttgaattttataatagtgtttagttagtaaaagatattaaggttttgggatatatacgttgtatttttttattttgttaattttattattgttttatggtatgtttttttttttttcgagatattttgtaaagttttgattttgttgagaaataagaattttattaatttattaagtttgttagaatttttttttgaattttttcgttgttatgataaatttttgcgaaaggtaaagggtaaaataaatatttttttgtattttttttgaggcgatataaaattttgttgttttttgaattatcgatgttttatattgttaataataattttaataggaaaaagtaattattgtgtgtatgttatatggtgttaatagttatatttattgagtgtatattttgtgttaggtattatttttagagttttgtgtatttatttatttatttataaagttttatgagagagggatttttattattattatttttattttgtagatgaaagggttgaggttaaagagagatagagtaatttgtttatttttatattgttttttagtggtgggattggatataagtttaggttttggttttagaatttaagttttttattattgtattatattggttggttaaattaggatattggtatttatagttataattgatttatttttttataaaaaatttttttgttgttattaatatttttttatgattttgtatttgtttatataagattagaagttgaagatttatgaaagaaatttaagatggaaaaatttggttggatattgtggtttatatttataatattagtattttgggaggttgaggtgggaggattatttgaggttaggagtttgagattagtttgggtaatatagtaagattattgttgtatttaaaggaaaaaaggaaagaaaaatttaagtttatatttattaatttaaaattttttttaaagtattaagagattattattgtttgattttagtaattgtattttttggtttaatttgtggaataaaagtggtttatgggagtatggtgtgggtattagtgatatatgtatttatagtatttttttgtatgtagttaggtgtttggtaaattggagtattttttttttaataatatttttattgagatataatttatgtaaaatttatttatttaaagtgtataatttagtgttttttagtgtatttatagcgtggtataattattattgtaattaatttttgaatattttgttatttttaaaagaaattttattttaattagtagttaattttgttttttattttttttagttttaggtaattattagtttattttgggttattatagatttgtgtgttttggaaattttatataagtggaattataataatatgtggtttttagtgattagatttttttatttagtataatgtttttaagatttatttatgttgtagtacgtattagtattttatttttttttgttgttaaataatattttattgtatggatatattatattttgtttatttatttattagttagtggaaatttaagttatttttattttttggttattatgaataaggttgttatgaatgtttgtgtgaatattgatgtttttattttttaggatatatatttaggagaattgtgtcgtattatattaaattttatgtttaattttttgaggataattttgttttgttttgtagttgtttttttgtttgtttgtttggtttgggttttttttgggatagaatgaaaaataggtaaaattaagttattttgtatatttatattgttttttaaatttagtaaggttaaaaatgttggttaggtttaatgtatatatttttgttttttttttttagattttatatatatatattgtgattgatattaagaatataaatgtaaaatataagaataataaagtgaatgtagtaagtatttttttgttttttatgtttgtagtattgtattattagtgtattaagtttttttttttttttttttttgtaggtattgtaaaattttatgtatattatgttaagagatagtaatgtaatcgtagttaagatgtttttagatgtaatgattgaattttatagaaggaatatttggtagtgtatatatatttgttttttgagaagtagattttttttttatttgtaattaatatagagtatatatataaatattttttttgagtttgagttttttaatatatttatgttatagatttaagttggaagtaaaaatagaggtaatttaaatgattaatgatattggttattattttttgagtagttattgaggtcgggtattttgatatgattttatttagaataatttgagaatagaagatgtagtttatttggaattatttttattttataagtaatgatatggaagtttttagagttagtaaaagtttagttattaagaggtagagttgaaatttagatttagatttaattgattttaaaatttgtgtttttttttttgtcgttttgaagatttttaagttaatttattttatttatataaaatattatgtttcgtatattttagtttgttgatatagtgtttttaatttattttttttgtttttatttatgtatgttatgttgattatagttttttaagtaatttttaaattatttattatttattatttgattttaaggaatggaattggtgttggtgttgaatagaaagtatttttttgtaattaattattatttttatttttatttttttttttttttattgttttgttttttaatagtgttttaaatttttgaaaattttttaaaatatattattttaatttttaaatttatatatttatttggtatttattgtattatatgttatatattgtgtagtagttagaaaaggtataattataaagttttattttatagatgatgaggaaattgaggtttagaaagattaagtaatttgtttaaggtaataaagatagttagtaaatagattagggataaattttttgattattggttggatttttaattggttagttatagatatatttagtaaaaaatagtattagggagaagaaaataatttaggagatagagtttttattattatttagtttaatgaatatttattgaatatttattaggaatttatatatttagattataaagatttgtgtttgatttggtagatcgaagttatgaattttggataattggttatgttattgagaagtttttatgattgattaaatattattttttaatgtaggtagaatatttatttttatttggttaattaagatttttttatagtgaattattttttttattttataatttaatttagaattttttattttgtattttaattagaattagtaagatgatgtttaagaggaaaagaatattatttttttttatagtgatagaatggagttttaagttatttttgtattggattttgagtttgagaaattttttagagaatatattttggggattatatttatttaggatatttattttttttttaaattttgattggttagtatttttagttgagttaattaaattgattataaatttgattgtgttgggggaaattttagttttagatttaagggaatttttgtatgtttttatttttattttatataaatgggtggtttatagtaagggatgtgaaattagtaatattgatagtttttggtatatttatagttgtttatttgtgtgaagaataggttatataatgaatatattaatgttatataataaaggttggagatgtggtttttagatgggaaatattaaagtttagataaataatatattttttaaatttttttattatttatggtatatttttttgtataatagatggttatattgatatttttttatattgtttatttaataatttaaagtattttaattttttttgggattaggttattttttattagtggtaagtttattttgtattatttttgttatagtattattttttaaattaatagattggttagaataaggggttagttgtatgtaagagatttaaattaatagtggttaagaaatgtaataaaaatgaagataaatagttgggatttaattaaagagtttttgtatagtaaaaggaatagttagtagagtaaatagataatttatagagtgggagaaaatttttataatttatatatttgataaaggattaatatttagaatttagaatgaatttaaataaattattaagtaaaaaataaataattttattaaaaagtgggttaaggatattaatatataatttttaaaagaagatatacgaatagttaataaatatatgaaaaaatgtttattattaatgattagggaaatgtaaattaaaattacggtgtgatattattttatatttgtaagaatggttataattaaaaaattaaaaaatagtagatgttggtgtggatttggtgattagggaatatttttatattgttggtgggaatgtaaattagtatagtcgttatggaaaatagtgtggagattttttaaagaattaaaaagtagaattattattttatttagtaattttattattgggtatttatttagaggaaaagaagttattatttgaaaaatgtatttgtatatgtatgtttatagtagtataatttataattgtaaaattatggaattaatttaaatgtttattaattaatgagtgaataaagaaattgtggtttatatatatataatcgaatataatttatatattataaaatttatttttttgaaagtatataattcggttttttagtatatttattaagttgtataattataggttttttattattattaaaagaaattttaatttattagtagttattttttatattttttatttttagttttggtaaatattagtttattttttatttatatagatgtatttattttggatatattttatttatatatattttatatatatagaattatattttaattgtttttaaattttttgtaattagatttttgtatttatttttttttttaaattgtttaatgaattagggtagttaatgatatttatgtcgttaatttttttttgttttgtttttttgagatggagttttattttgttgtttaggttagggtgtagtggcgcgatttcggtttattgtaattttcgttttttaggtttaagtaatttttttgttttagtttttggagtagttgggattataggtgttcgttattatatttggttaatttttgtatttttagtagagatggggttttattatgttggttaggttggttttgaatttttgattttaggtgatttatttattttggttttttaaagtgttgagattataggtgtgagttatcgtgttcgattttatgttgttaaatttaatggtggttaatttttggtatttattttatttgatttattagtatttgatgtgtttgggtttttttttttttgggaatattttttatatttggtttttagaatattttttggttttttttaaaattttattggttgtttttttagtttttttttttagttatttagaaatttattggtttttaaatgttgggaatttttagggttttttttatttatttaatttaggatttaattattttttttattattttttgttattattttagtattatttaatttagtattattttttgttgtggataattttaatagttttttatgtggtgtttttgtttttatttttgtttttttatatatagtttatttttaagtaacggtgattttgtttttatatagggtggtttatgtatttttttgtttaaaattttgtaaaggtttttattttattgggaggtagaattttaaatttattttttttttttattttttatttggagttatattggtttttatgtttttgaaatttattaggtatatttattttaaggtttttatattttttgttttttttgtttagattattttttttaaatatatgtatagtttttttttatgttttttaggtttttatttaaagattattattttaagaagattttttttaattatttaatttaaaattgtaatatttattttatttttaatatatataagtatttttttattgttttttttttatagtattttttattatttaatatattatattatttgttattgtatattattttttattagaatgttatttaatgagtatagaatttttatcggtatagtttaatattatgtagttttagggtttagtattgtgttttatatatagtaggtaattaatagtatttgttaaatgaacgaattttaggaaatggtattattatttatttagatatataaataaaaaatttgggtgattttttatttttttttttttttttattttttatatttattttattagaaattttaaggttttattagttttatttattttattgttaagaaagaaaaaatttgggtttggtttatagacggttttgtgtaatatgtaggtgttatttaaaattgaatagttgtggtattatagtttttttttgagattttttggataatggtgaaggggaatttttttagtagaaagaattttaagtagtgtatttggttgtttattttgtttagaagaagaaatgattgtaaatataatttaatattgtttgatattgtggttaatggtttggttggatagtttggaattaaggaatataattggaaaattgaaaaaaaaatagtgatatggaaatttggtaagaggtaagtgaatagatttttatgaatgggtaaaaatatgatatttatgttttatgtgaatatttattagtggatgattttggtaaaggaaggtttaataattaggtagataggatgatttattttgtggatattagttattttttttttttggatattttattatttttttaaatattgtttgtattttattttttttttttttttaggattataataaaatgtatgtaagtttttttttatttttttttttttattttttaattattttgttttattttttttttttttttttttttttgttttttggtgttattattataatttatggatatttttttttaatttatttttaaatttattattaattattttttttgtttttatagtatattgttatatttatttattgaggttttttattttagtgatgtattttttagtttttaaagtttttttgatttttttttaaatgttttgtgttattatatataaatttttttatatatgtagttttaagttttttttttttttttttatgtatagtgaatattattttagtaagatgtttggtaatggtaatatttgtagtttttatttttttttgtttattgtttttgttgtttattgtttatacgatttatttttttgtatgtttggttatttttaattgtatgttgtttgtcgtaattgaaaaaaatatttatggggattttttgaggtttaggatatatgtttttttttttagaaatgattagtatttgttttttttagttgtttaggagtattattagtttaatattattttaaatttatagtttatggttttttggaatataatgttaaaaagaaaaatgtgggttgtagatatagtagttatggttataatattttaagatagtttttttagtgtatagtttttttaatttgtttgttgttaatgtaaattttttgtagatttgtggtttggtggatttagttttgttttattttgaaggtatagtgatttagggtgtaagtttattttaaaagtatagtgtattgtggtgttagttttaaggtaagtggtttttttttatattttttatttttagtagatttttaattaagatttttgtttttttattttgtaagtttattaagattatagtttagttttatagttttgttttaattattttaggttgttataataaagtattatagattgggtggtttatatataatagaaatttattgtttatagttttggaggtttgaagtatagagttaagtttgtgatagatcgatgtttgttaagggattattttttggtttatgattaattgtttttttattgtgttttcgtggtggaaggaattagggatttttttgggtttttttttataagagttttaattttatttaggagagttttatttttttgatttaagtattttttaaaggtattattttttaatatcgttata

SEQ ID NO: 1231 - DNA, 5552 bp, Artificial Sequence
  chemically treated genomic DNA (Homo sapiens)
gaatttttaggcggggtaggtagaaggtttaggtggtagagtttgcggtagattataggtttgtggggattgggtttttagaagggttgggggttgtagttgaaatgtttaggtgggggtagggtggttgtgttgtgggtttgttattagggagggtagcgtttttcggttggggtattggagattggtagttgtgaggtatagggttcgtttatattttttttttgaagaagtgttattcggttttgttttggggatacgtgaaagtgttaggtttttttatattttttttgggtttggggtagtaggggtagaggtagaggtggtagtgattgtaaagggtttgttaggggtttttgagtattgggtttttagagggtatcgagttagggttacggtgttcgggtgggggtaggacgggtgattggggttttgtagttggtaagttttattagtaggaaggaagttttatttcgtaggaagtaatagaggtgggtagttgtgtggtgtttagtttggttgtttttgtgttttagttgttatatttattttggggtttatagaggtgtttggttttttttttttttgttaaggtagtggtagttggatttaggttgtttagggattagaagtttgtgggattttacgtgggttttagtggggttttggtatagtttttaggagtaaattgtgggtttttggaggtttagaggggataggcgtttttttgtgggtaggattttaagggtttatagtagaggtgtagatgttagggattttttatttatttattttttttttgtgttagggaggtttttatttatttatttttttttcgtgttagggatttttttatttatttatatttttttcgtgttagggatttttttatttatttatttttttttcgtgttggggaattttttatttatttatttttttttcgtgttggtgaattttttatttatttatttttttttcgtgttaggagttttttttggtttttattttttttttttttttttttttatgtttttatgttttttaggtgaattttagtatttttttggaagatttatttgatttgttggtatttattcgttattttgggtttttttagtgagtaggtagattttagttttttttatttagttaatttgaattttagtttttagttatttttttgtattttttatttttgggaaatttagttttaatgtgtttgttttttattggataataatttttattttttttagtagttttaaaattattttgtatttattttaggtattttttattttattatagttaagatattgatgttatttatgaatttgtttacgttaaatttatgttttttttttatttttataaaaatgttaattattttttttgtaagtatttattgaataatatattttttattttttttattttgaaagtgtgatttaaagagagatatttgttttttttttttattttattttttgtgtgtattaattattttttttattttttttatttttagtttttttttgatgattaatgaaaaattttagtaaatattttatattaatataatgtttattattttagttgtgttttgttttggatgaaattatttttaaatgtgttaatataatttattatttttatattataatagttttttaatttatttttataattgtttgttttttttttaacggattttttgatttttatttttttggggtgggttttttttttatatatttgattttttatatagggtttttttttaggttgatttaggaaggaaagttgatgagggtattgttgtagtcgtttttgttttgcggtgtttatgtttttaagtttagaattatttttgtgttatgttcggtatggcggggtttatgtgagttttatattttagggttagagatgttcggtttaataatgataaagcgtatttgtgttatgtatattcgggaaggtggtttagtgttgagtgtagttcgggttattgagttattttagggtttgtttataaatatagaagagggggagttatagtttttaaggttttatagttttttttatttttttttttgttttgagagtgagataaagggttatgattgttttgtgggttggatagatgtatgtttttatttgtaggttggaatttaagttgaggttttgagtatttttaagtattgataaagtattttaggttgtttttagaaaatattgaaaaattaatttttttgttaaaagtgtagaaataagtttttttttgaattaaatttttgaaatttttaggttaaatttcgtaattttatttttttattgtagatttttaatagaaaagttataggtgtaaggatgagatgattttggttaaatttagattttatagggttaggaaggtttgaaggagaggaggtttatgtttttacgttttagataagaattgtttttaaggatttttaaaaaatttataagaaatttttttatgttttttagttttttttgttttgataaggtttattattagatgttttttaggacgttaggaatttagataagatgtttttaagagaattattgattagtaatagtattttttttaatggattgatagtaattttggttttgaatttgtggaattagggaattttgtttttaggtagttttgttaggtttttttttgttgttgataagaattttttttatttttttatgtatagagagttttttttacggtgttttttttttatttttacgttataggaattattaatatagaaaaagatttttaggattagatgtatggggtttttttttttagacgtagtagcgaatagtagttgggtgttttttaagttagttttggtgttgtttatttagagatagtttcggattttatagattgaaggtttattttttaaaattgtttttaatattatttttaagtttagatttttagaatttttgattgattggttttaagttggggattttatgttttatttttcggtttgattaatttgttgtagtagtttatagaatttaggaaatattgatattttttggttgaatataaagtatattgtagaggatatagatgaagaaatttataggaggaggtatgggggaagaggttcggggtttttatattttttttgggcgtcgttttttaggagttttagtatgtttagttatttagaaatttatgaaatttagttttttggggtttttatgaaagttttatgatattagtatttttttttataaggaatagggtgagattgttttttgggagggttttaagatttattattagaaaggtagggaatattcgagttttattttgggttaggtgaaggaagggtaggaggaggttagaggttttcgttgaggtttagtatagttaatgttataataaaagattataataagggttatgggagttataagttaggaattgcgggtgaaaattagtatatattataatattatatttttttttttggatatattgtggtttgttatgttatgtattttatattgtaatttttgttttttatttttaaataaatttaaaatttaggtaattttggagtaatgtagttttgaattttaggggttttttatatgtatattttttttaaataaacggggattaaaattatagtatttgtgagaaataagatttgcgtatatgaacggtagattttttttatatgtagatttagtagagataacgttagggttggagtacgagtaagtgttggtatatgtagggggtattgaaacgaattgtttgtgtattttaagaaataattgtattgagagattatattttttaggggtttatttttggttttgtttttattttaggttaaagttttggatagaatatttagtgtttttttgtttatttgaagaatatgttgttatgtggaagtatatttttgagatttataaggagatattgggtaagaagataaggatgttttattgtgtagaggtttttttaataaatgttttatgaatattttggtgtttagtgtttttttttttggaattttagtaggtttggatagtttggtgtatttttttgagggaatttttttgggttgtttggggtttattttagttttaggtgtagttagaggacgtagttttttattttggtttggagttttgagttttttattgttattgtagatttcggggtttttttttcggttttatttagtggtggaaatttttattttaatgagtttttgatggtttcgggattttgtggtattttatttttggtttttgtttttttttgtgagttcgtttatatttggggtttttatatgtttttttttgtttatgattttgatattttgggtattttagaaatgttatatatacgtttttttattacggttagatgtgatattttgagtggatttattaattatttatagaatgtggagtttaatagtaagatttttttacgttttaaagttttaggttttattttggtttggaaattaagtataaatgagttttttttaatgttttaggtattattgattttataattattgtgacgagtgggatttatgataataatttgtaaaggaagaaattgaggtttagtgatgggatattataaattaaggttacgtaggtagcggatgataattagttattaaataaatattaatttttttttttattttttaaattaaagtttaaatataagttattgtttttaaaatgttgattaggaattgaggtgtagagggacggttaaggacgtaatgggtatcgaggaggtaggaaagatttagaggttttttttcgggggggagggagtggacgttggagtaaaaatatttaaaaaggggaagttaagaggggattatttggttgaaagaaaatttataatttagtgttaagaaagaagttaatttttttttttttatttttttgtattttttttttgtgtttattgttatacgtagtttaatttggacggtatagttagaggcgagatgtttttttgttgatttgagtttgtttgtagtatggatttgggttttttttgaagtatttttagggttggagggacgattgttatggtaaggattttataacgttgtgttgatggatgggttgaaggagggagggtgattatgtgggaagttgtgagaaggaaggggaagttattgttatttttattaggaagggtagatataagaagtattagttttatttgttgttatatttcggttttcggtgagacgaggagaaattagatagatagtggttgggggttaggaaagattttattatagtttgaaatgtttgtagagggtttagtgtttgtttttattttagttttaaaagaatgagagttaggtttttgggagggtagtttcgttttttgtgtggttgtagatgataatattttatgagaaggatttagtttttgagtgtttatatagggtgggaaggaggggaggttatttttttttgtgtgtttttgtttcgttagt

SEQ ID NO: 1232 - DNA, 5552 bp, Artificial Sequence
  chemically treated genomic DNA (Homo sapiens)
gttggcgggatagagatatatagagagaaatagtttttttttttttttattttgtgtggatatttagaggttgggttttttttatggggtgttgttatttgtagttatataagaagcggaattgtttttttaggagtttgatttttatttttttagagttgaggtgggggtaggtattgggttttttgtagatattttagattgtaatggggttttttttgatttttagttattgtttgtttggttttttttcgttttatcgagagtcgggatgtagtagtaaatagaattggtgttttttgtgtttgttttttttgatgagggtagtagtggttttttttttttttttatagttttttatatggttatttttttttttttagtttatttattagtatagcgttgtggggtttttattatggtagtcgtttttttagttttggagatgttttagggaagatttaggtttatgttgtaggtagatttagattagtagagaagtatttcgtttttggttgtgtcgtttaggttgagttgcgtgtggtagtgagtatagaggagaaatgtagggaagtaggggaagaaaagttgattttttttttgatattggattgtgggtttttttttaattaaatagtttttttttaattttttttttttaaatgtttttgttttagcgtttattttttttttttcgggaagaaatttttgagttttttttgttttttcggtgtttattgcgtttttagtcgtttttttgtattttaatttttggttaatattttgggaataatgatttatgtttgagttttgatttggggagtgggggagggagttgatatttatttgatgattggttattattcgttgtttacgtgattttggtttgtaatgttttattattgagttttagtttttttttttgtagattgttgttatgaattttattcgttatagtggttgtggggttagtggtgtttgggatattgggaggggtttatttgtgtttgatttttagattagggtaagatttgaggttttgggacgtgagaggattttgttgttggattttatattttgtaggtgattgatgagtttatttaagatgttatatttgatcgtaatggagaaacgtatgtgtagtatttttgaaatatttagagtattaaggttatgagtagaaaaagatatgtgaaaattttaagtgtagacggatttataagaaagaatagaggttagaggtgagatgttatagggtttcgggattattaagggtttattagggtggaggtttttattattgagtggagtcgggagaggaatttcgggatttgtaatgatagtgaggggtttagggttttagattaaggtgggaggttgcgttttttagttatatttgaggttggagtggattttaagtagtttaggggaatttttttaagggagtgtattaaattgtttagatttgttggaattttaaggaaagaagtattaaatattagggtgtttatagagtatttattagggggatttttgtatagtggggtatttttgtttttttgtttagtgtttttttgtggattttaaggatgtgtttttatatagtagtatgttttttagatggataaggagatattgggtattttatttaaagttttaatttaaaataaaaataaaattaaaaataaatttttagaaaatatgattttttagtatagttgttttttgggatatataggtaattcgttttagtattttttatatgtattaatatttgttcgtattttagttttgacgttgtttttgttgggtttgtatataggaaaagtttgtcgtttatatacgtaagttttgttttttataaatgttatagttttgattttcgtttgtttggaaaaagtgtgtatataagagatttttggaatttaaggttgtattgttttagggttgtttggattttgagtttatttgggagtgagaagtaaggattataatatggagtgtatggtatggtaagttatagtgtgtttagagagggaagtgtgatgttgtgatatatgttggtttttattcgtagtttttggtttgtaatttttatagtttttgttatagttttttgttataatattggttgtgttgggttttagcggaggtttttgatttttttttgttttttttttatttaatttaaagtaagattcgaatgttttttgtttttttgatagtggattttaagatttttttagaagatagttttattttgttttttgtgggaggaaatgttgatgttatgaagtttttataaaagttttagaggattgggttttatgagtttttgggtggttgagtatgttaaggtttttggagggcgacgtttagggagggtatggaagtttcgggtttttttttttatgtttttttttatgagtttttttatttgtgttttttgtagtgtgttttgtatttaattaggaaatgttagtgttttttgagttttgtgagttgttatagtaaattaattaaatcgaagagtggggtatgggatttttaatttgaagttagttagttagaagttttggaggtttggatttgggaatggtgttgggggtagttttggggaatgggtttttaatttgtgggattcgggattgtttttgggtagatagtattagagttgatttagaggatatttagttgttgttcgttattgcgtttggggaaaaaaattttatatatttggttttagaagtttttttttgtgttgatgatttttgtgacgtgagagtagaggaaaagtatcgtagagagagttttttgtatatagagaggtaaaggaagtttttattagtaataagggagagtttgatagagttgtttggaaatagagttttttggttttataggtttaaagttagagttgttgttagtttattggaggagatgttgttgttggttaatggtttttttgagagtattttatttgaatttttgacgttttaaagaatatttagtgataaattttgttaaagtagaaggggttgaaggatatggaagagttttttatgggttttttaaaagtttttagaaatagtttttatttgagacgtggaagtatgggtttttttttttttaggtttttttggttttgtggggtttgagtttgattaaagttattttatttttgtatttgtaatttttttattgggagtttgtagtgaagggatggggttacgaagtttaatttgagagttttaggaatttggtttaggggagggtttgtttttatatttttagtaaaagggttaattttttagtgttttttagaaataatttaaagtgttttattagtatttggggatgtttaagattttagtttgggttttagtttgtaggtggaaatatgtatttgtttaatttatagaatagttatggttttttgttttatttttagaataaggaaaaaagtggaggaaattgtgggattttagagattgtgatttttttttttttgtgtttgtggatagattttgggatgatttagtgattcgggttatatttagtattgagttattttttcgggtgtgtatgatatagatgcgttttattattgttggatcgggtatttttgattttggagtgtgaggtttatatggatttcgttatgtcgggtataatatagaggtgattttaagtttgggagtatggatatcgtagggtaggagcggttatagtaatgtttttattagtttttttttttgagttagtttggggagaaattttatatggaagattaggtgtgtgggagaaaaatttattttagaggaataaaaattaaagagttcgttagagaaaaaataggtaattgtagaaatgaattaggaagttattgtgatgtgaaaatagtaaattatattaatatatttagaaataattttatttagaataagatatagttgaaatgataaatattgtattggtgtagaatatttattaaaattttttattagttattagagaaaaattagaaatgaaaaaaatagaaaagataattaatgtatataagaaatggaatgaaaagaggaaatagatatttttttttggattatatttttagaatgaaggaaataaggagtatgttatttagtaaatatttgtaaagaaaatggttgatatttttatagaaatgaagaaagaatatgagtttaacgtgaataaatttataaataatattaatgttttaattatgatagagtaaaagatatttagaatagatataaagtaattttaaaattattggagaaaatgaaaattattgtttaatgaaagataagtatattgggattggattttttaagagtaaaaagtgtaagaaaatgattgggggttgaggtttaagttggttgaatggaaagggttggagtttgtttatttattaagaggatttaaaatagcgagtaaatattaataggttaagtggattttttaagaggatgttggggtttatttgagaaatatgaggatatggagagaagagaagagaaaaggtgggagttaggagaggtttttaatacggggaaggggtgagtgagtgagagatttattaatacggggaaggggtgagtgagtgagagattttttaatacggggaaggggtgagtgagtgagaggatttttaatacggggaaggtgtgagtgagtgagaggatttttaatacggggaaggggtgaatgagtgagagtttttttaatatagggaaggggtgagtgagtgaggggtttttggtatttatatttttgttgtgggtttttaggattttgtttataggagagcgtttgttttttttgggtttttagaggtttatagtttgtttttggagattgtattaaggttttattggagtttacgtggaattttataggtttttgatttttgagtagtttgggtttagttgttattgttttagtagggagggaggaggttaggtatttttgtgggttttagaataagtatgatagttggggtataggagtagttaagttgagtattatatagttgtttatttttgttgttttttgcgaaatggggttttttttttgttaatggggtttgttagttgtagggttttagttattcgttttgtttttattcgaatatcgtggttttggttcggtgttttttgaaagtttaatgtttagaggtttttgataagttttttgtagttattgttatttttgtttttgtttttgttgttttaggtttagggagggtgtggggaggtttggtatttttacgtgtttttagagtaaaatcgagtgatatttttttaggagggaagtgtgagcgggttttgtgttttatagttgttagtttttagtgttttagtcgaggggcgttgttttttttagtgataggtttatagtatagttattttgtttttatttggatattttagttgtagtttttagtttttttgagagtttagtttttataggtttgtgatttgtcgtaggttttattatttgagttttttgtttgtttcgtttgaaggttt

SEQ ID NO: 1233 - DNA, 6437 bp, Artificial Sequence
  chemically treated genomic DNA (Homo sapiens)
aaatgttataaagggtagaattgttgaatgattattgtggtataaatgtatatattgaatgaggtatgttagaattcggaataaggtaatttgtttaaattttttttttttttttttttttttttttttttttttagagacggttttgttttgttgtttaagttggagtgaagtggtttattgtaattttaaatttttgggtttaggtgatttttttgttttagttttttgagtagttgggattataagtgtgagttattatgtttagttaattataaaaatttttttagtggaggtgagatttttttatgttgtttaggttggtttttaatttttggttttaagtgatttttttattttagttttttaaagtgttgggattataggtgtgagttattaggtttggttaatttttaagttgttaaaagggtaatgaagttttttttttttttttttttttttgagatggtgttttattgtgttgtttaggttggagtgtagtggtgcgatttcggtttattgtagtttttgttttttaggtttaagtaatttttttgtttttgttttttgaatagttgggattataggtatatgttagtatgtttgagatagggttttattatgttggttaggttggttttaaatttttgattttaagtgatttatttattttagttttttaaagtgttgggattataggtatgagttatcgtgtttagttgggtaataaagattaacgggcgattttattttttatttgtagggtaaattgggtttgttagtaggagtcgggtttagggatttttaatttgaaatttgcggagttttacgtgttttttaagtgggttttaggggaattaaattgtatggaagtttaataaaggttgtattttagtgtttttaaattttattagaaagttaaagaattttttgttttttaaaggttaagaatgtttttttgtttagttttattgttgatgaagatggtgggttggatataatggtgtttttaaaatatttggaaataataatgtttatgttggtattgtagtatttttttagttatatatagtatttaagttataaattattttttttgtatttagtaattttagatgtattataatttagtattattttatttgttttaaattatttttatgaatttatattataaattattttgagagtttagggaattttaggtgtaattttaatttggtattgattttatatatttttgggggtaaatatttgttgtattaaaattttttttttatttatttatttatttgagattaggttttgttttgttatttaggttggagtttagtggtgtttttatagtttattgtagttatgaagttttgggtttacgtaatttttttgttttagttttttaagtagttagaattatatatttagttaatttttaaattgttttttaatagagataaggatttgttatgttgtttaggttggtgttaaatttttgtttttaagcgatttttttattttggttttttaaagtattgggattataggtatgagttattatgtttggtttgtttttttatatttaagtggtgttagattaattaatatagtttaaaaagtataattttaatattattaatgttatatttttagtttgtgttaaatggatatattatgagtaagtgttattatgaagtatttttttagtaattatgtttgatattaatttgtttatagtataaatgattatagttaatatagataaaatagtaagagaaaaatggggaaaaatagttattaaaaaattattgagagtagatttttgtttggtttttttgaatatttattattgtaaaagaaaatatgcgtataaaggtattttgttgttcgatatagattttttataaatgaaaataaatgttggttaattatggtttttagaatgatttaaggattataaattaagattgaattaaaaattttttaaaattattttttaaataagtatgatttaggtaaatggtttttaaatgaaagtagattataagtattatttggagaatttattgaaatgcgtatttttgggattttattttataaggattttattttagtagttttgtaattaggatttggagtttgtttttaatatatgttttaggtggtttgattatattttgttaaaattgaatttaggtgttaagaggttatatggaatagttgtaatatataatatttttaattaaaagaaggttcgatgagtgtggagaggtgagggagatatggaagtatttagtaaatgatatagaataagtttgtattttaattattgtgaaatttaaagagtttttgtatatgtatattttagatattatttattatattaaaaattaaaattgaggtatttaaaatatttatttttaaaatttattatatattgatttaaataaaatttttataaaattaattttttaaaattaaaaaaattattgagaaagaatggtattattttatatttatgtaaatttttttattgtttggtttaatagaagatagttagatttttatataggttatttaaaatgtttgggattagaattgttttggattttagattttttttgattttggaatatttgtattatatatttttgttttagtgagtattttttttgagcgttatgttagtatttaaaaagttttggattttggagtattttggattttagatttttagatttgggatgtttaatttaaatagattgaatttgattttttatttaatttgttgtaatgttgttttggttgaagtttataaagaaaatttaattttatatagaaagaggatgagtatttttaatattttttttgatattatattaaaattttgtaagtgttagttttttaaaggttaattgtattgtggaatttgaaatgagttttttaaaaaaattaaatttttgatatattaaaattagttggtttgttttgtatttttttttagtggattttttatttatgtatgattttggtttttgtttgagagagagttttattttgttatttaggttggggtgtagtggtataattttagtttattgtaatttttattttttaagtatttgggattagagatgcgtgttattatgtttagttaattttttgtgtttttggtagaaatggggttttattatgttgtttaggttttggtattaaatttttgagtttaagcgatttgtttgttttagttttttaaagtgttgggattataggcgtgagttattgtatttggtttatttatgtatgattttgttatattattggttattttaaaattaaggtagatttttttatataatttttattattgttattttgattttattaggaaagtttttaagtattggcgaagttggtaagattatgtggtagatgtaaaaagttttttaaaatgtttgaaagtttaaattttattattggtaataagtattgttaattgttttttttaaagaaataggtttaattttgtttatttttaatgtttgttagatatttaagttagaataattatagtttgtgaattgtttttttaagtaaaaatggtagtttatgaaaaaaaagttagtttagtttgtaatttaattatataagtgttttttttttagatagttattgtatttaagtgtgtagtggattgttttttgggtattttttattttattataaagaatattaaaaagatttatgtttaagggttaagatttaatgaacgtaataattttgattgtttgttttattaacgataattataaaggaaacgtttaaaaaaaaataacgtgtggtagtgaagaatgtagtgattattagttttatttgttgttattgttttggttagtgcgaaggcgttagtagtttttttataattgtttttgtattattagtgtaaatgttagtatagtgaaaagataatgtttttgtgttattttaaaaatagttttgatttttgagagggttttggggatttttaggaatttagtaaatatattttgagaatttttgatagaggtgttttgggttttttttttagtattgtcgttttagtgttaggtattaatatgtttgtattttacgacgatttagtaatataatttggattatttttttatgagacgggtaatgttgttatgattttaggtagaagaacggagagtttatagtgtaggtagttatttagtatttatttaagagtttttagttttttcggtgtgttggtttttatgagatgttgaagtataatttttttttatttttgtttatttaagtatttttttgtttttgaggtacggtttaaacgttttttatggttttttgagtaggaagtgatttcgtttgtgtttcgtataggatttattatattgtatgtttaagttttttgtttgttttttgttaatttttttattgtttaagattaaaatgaggtattattttttttgtaatttacgtgtagtttaaaaaaggcgggttgttttgtaaatatttgtttttatgtaaggaaattaaaattgaaagcggagtaatattaagtatgttcgttttttgagtttaagtattggaaggattaaaagtagcgaacgtggtttattgtcgcggttttgtttttgtttattgtcgtttttgggggttttatatttaataaatatttaaattggagttggagttttgagcggttgggtattgtgtattttagcggtgggtgtttgtacgtagttagaatttggtaagagagtattttcgaggagttcgtaggcggggttcggtcggggattagtagggtttgtcggcgtttaggttttgttttttattcgattttgtttgtcgtttgtcgtttgtttttggttagggtcgtcgagcgttttgtttatttaagtaggcgggtcgtattatcgtaatttttttgatagggggtatttcggcggattcggataattttaagtgagtttagaggtaatttttttttttttttaattgtggttcgcgttgtgttgttgttgggtaggcgttgggcgttggcggttttcgagcgtgggggttcgttggttttttttttttagaaattgcgtcgggggcgttcgtttgtttcggattcggacgcggcgtttttcgggttcgtttgaagtgtagatcgtcgtagaggttttagtgttcggatgtttattaggattagcgcgagttaatacgggtcgagttcggggttgcgtcgaggacgttcggggttcgagagtaggtagtttcgtaatatcggggcgtcgcgtcgggacgcgttttcgttcggtttcgttaaatggtgagcgcggcgttggtagtagggttcgcggggtgaaggcgtttatggacggaagatttttggttttataagttgaattatggtagtttagttaaggtaagtcgtgtatcggagaaattttttaaacgcgttcgtggcgaggggagttgaaggttgcgggggagggtagggtgcggggaaggagacggataggaagtagttttgttattgtttttttattattttcgaggttgtggtttgattaaatgttagataaaaagtagtttggagaatatgttggataatttttgtatagcggagagagggatggagttaaagtgaagattaaagttagatagtttttttttttttttagaattgttatttttcgggatattaagttgattttatttgttcgtttttgtttaaatttttatttagattttttgtgcgtttatttttcggttttttggattttttgttgttgtttcgaggggaagtttagaaatacgattaatgtaaaatatagtttattttggagagggtgggtgagaatttgtttggtgagtgaaaattttattgttagaatgtacgattttatataaaacggtttcgtttacgtgaatttgttgagtaggtaaagatcgggaacgcgtcggggtggtgaaggggagagaggataatgaattgtagttgttgttagaggagcgttattgtaagaatttgaagttttgtttttttatggtttgttattgtttttgtaatgagcgttgaagaagagtgatgataaggtattagtgattattatgagatttaaattgttttgtgcgattttattttagttttgatagtagttggtgttaagggagatttaggagttatatatatatttttttttaattgtgttttgttagaaagtagtttggttttatatatttaaagtagtagggttttttaagttgatatttgatgtagaatagtgattttgggaggttttagaagatttaatacgtttgaagatttagattatggagagaaatggatgttaaatgtttatgtttgggttggatgagataatgttttttttttacgaaatagaattttttaggaaggaaag

SEQ ID NO: 1234 - DNA, 6437 bp, Artificial Sequence
  chemically treated genomic DNA (Homo sapiens)
tttttttttttagaaagttttatttcgtaggaaaaaaatattgttttatttagtttaaatatgaatatttaatatttatttttttttatgatttgagtttttagacgtgttaagttttttgagattttttaaaattattgttttatattaaatattagtttgaagaattttattattttaaatatgtgagattaaattgttttttagtaaaatatagttgaaagagaatgtatatataatttttaagttttttttagtattaattgttgttaaaattaaaataaaatcgtatagaatagtttggattttataataattattaatgttttgttattatttttttttaacgtttattataaaaatagtaataaattatggaaagatagggttttaggtttttataatagcgtttttttgatagtaattgtagtttattatttttttttttttttattatttcggcgcgttttcggtttttgtttatttagtagatttacgtaagcggggtcgttttatgtggaatcgtatattttagtagtaaaatttttatttattaggtaaatttttatttattttttttaaggtgaattatgttttatattaatcgtatttttaaattttttttcgagataatagtaagaaatttagaaaatcgaggggtaggcgtataaagaatttaaatggaaatttgggtaagggcggataagtgaaattaatttaatgtttcggaaaataatagttttgggggaagaagggggttatttaattttaatttttattttaattttattttttttttcgttgtgtagaaattgtttagtatgttttttaaattgttttttatttgatatttagttaagttatagtttcgggaatgatgagaaggtaatgataaagttgttttttgttcgttttttttttcgtattttgttttttttcgtaatttttagtttttttcgttacgaacgcgtttgaaaagttttttcggtgtacggtttattttgattgggttgttataatttagtttatagagttaggggtttttcgtttatgagcgtttttatttcgcgggttttgttgttagcgtcgcgtttattatttggcggagtcgggcggggacgcgtttcggcgcggcgtttcgatgttacgggattatttgttttcgagtttcgggcgttttcggcgtagtttcgggttcggttcgtattggttcgcgttaattttgatggatattcgggtattggggtttttgcggcgatttgtattttagacgagttcggggagcgtcgcgttcgaattcggggtaagcgagcgttttcggcgtagtttttgagaagggaaagttagcgggtttttacgttcgaagatcgttagcgtttaacgtttgtttagtaatagtataacgcgggttatagttagaaaggaaaagaaattgtttttgggtttatttgaagttgttcgagttcgtcgggatattttttgttaagaaagttgcggtggtacggttcgtttatttaaatgggtagggcgttcggcggttttagttaaaggtaggcggtaagcggtaggtagggtcgggtagggggtagagtttgggcgtcgataagttttgttggttttcggtcgagtttcgtttgcgggtttttcgagagtgtttttttgttaggttttaattacgtatagatatttatcgttggaatatatagtatttagtcgtttagaattttagttttaatttgaatatttgttgaatatggggtttttagaggcggtagtgagtaggaataagatcgcggtagtaaattacgttcgttatttttgatttttttagtgtttgagtttaagaaacgggtatatttggtgttatttcgtttttagttttgatttttttatatagagataaatatttataaaatagttcgttttttttggattatacgtagattataggaaaaatagtattttattttggttttaagtaatgaagggattgataagaagtaaataaaaaatttgagtatgtaatatagtaagttttatacgaagtataaacgaaattattttttatttagaggattatggaaagcgtttaagtcgtgttttaaaagtaggaaaatatttggatgagtaaggatggagggaggttgtgttttagtattttatagggattagtatatcggaggagttgaagatttttagatgaatattgaataattgtttgtattgtggatttttcgtttttttatttagaattatgataatattgttcgttttataaagagatagtttagattgtattattaaatcgtcgtgaaatataaatatgttaatgtttggtattaaaacgataatgttgggagggaggtttaaggtatttttattaagggtttttaaagtgtgtttattagatttttgggagtttttaagatttttttagaggttagaattatttttagaataatataaagatattgtttttttattgtgttgatatttgtattgatggtgtaaaagtaattatggggaaattgttggcgttttcgtattaattaaagtagtgatagtaaatgaaattagtagttattgtattttttattattatacgttatttttttttaagcgttttttttatgattgtcgttaatgaagtaagtagttagaattattacgtttattaaattttgatttttgagtatgggtttttttgatgttttttgtgataaaatgggaagtatttaggaagtagtttattgtatatttaagtataatggttgtttagaagaaaagtatttgtgtaattgagttgtaagttgagttagttttttttttatggattattatttttatttgaaagaataatttataaattgtagttattttgatttgggtatttggtagatattaaaaatgaataaagttgagtttgtttttttgaggaaaataattgatagtatttattgttaatgatgaaatttgagtttttaagtattttggaagattttttgtatttgttatataattttgttagtttcgttaatatttaaagatttttttgatgagattagagtgatagtgatgaaagttatatgagaagatttgttttagttttgaaatgattaatggtataatagaattatatatgggtaggttaggtgtagtggtttacgtttgtaattttagtattttgggaggttaaggtaggtagatcgtttaagtttaggagtttgatattagagtttggataatatggtgagattttatttttattaaaaatataaaaaattagttgagtatagtggtacgtatttttgattttagatatttgggaggtggaagttgtagtgagttgagattgtgttattgtattttagtttgggtgatagagtaagatttttttttaaataaaaattaaaattatgtatggatgaaagatttattgaaaaaaagtgtaaaatagattaattgattttaatgtattaaaggtttagtttttttaaaaagtttattttagattttataatgtaattaatttttaagaaattaatatttatagagttttggtataatattaaagaaggtattaaaaatatttattttttttttgtgtgaagttggattttttttatagattttaattaaaataatattgtaataaattgaatagagaattagatttaatttgtttgggttgggtattttaaatttgaaaatttgaaatttaaaatgttttaaaatttaaaattttttgagtattgatatgacgtttaaaggaaatgtttattggaataagaatatataatgtaaatattttaaaattagaaaaaatttgaaatttaaaataattttggttttaagtattttggataatttgtatgagaatttagttgttttttattaagttagatagtaaagagatttgtatgaatgtaaaataatgttatttttttttaataatttttttaattttggaaaattggttttataaaagttttatttaggttaatatgtaatgggttttaaaaataaatattttaaatattttaattttaatttttaatgtagtaaataatatttaaaatgtatatatataaaagttttttgggttttatagtaattgaggtgtaaatttattttatattatttgttaaatatttttatgttttttttatttttttatatttatcgagtttttttttaattaaaggtgttatatattatagttattttatgtaattttttagtatttagatttagttttagtaaaatgtggttaaattatttggggtatatgttaaaaatagattttagattttagttgtagaattattgaaatagaatttttgtggggtgaggttttaggaatacgtattttaataaattttttaggtgatgtttgtggtttgtttttatttgaaagttatttatttagattatgtttatttagaaaataattttaagaagtttttggtttagttttgatttataatttttgaattattttaaggattataattggttaatatttatttttatttgtaagaaatttatatcggataataaaatatttttgtacgtatatttttttttgtaatagtaagtatttaaggaaattaggtaaaagtttatttttaataattttttggtggttgtttttttttattttttttttgttgttttatttatattgattgtgattatttatgttataaataaattagtattagatataattgttgaaaaaatattttataatagtatttatttataatatgtttatttagtataggttagaaatgtaatattgataatattaaaattatattttttgaattatgttaattgatttgatattatttaaatatgaggaaatagattaggtatagtggtttatgtttgtaattttagtgttttgggaggttaaggtaaaaagatcgtttgagggtaggaatttgatattagtttgggtaatatagtaagtttttgtttttattaaaaaataatttaaaaattagttggatatatagttttagttatttgggaggttgaggtaagaggattgcgtgagtttaggattttatggttgtagtgagttatgagaatattattgaattttagtttaggtgatagggtaaggtttagttttaaataaatgaataaatggaaaaaaaattttaatatagtaaatatttatttttaaagatatatggaattaatattagattagaattatatttgagattttttgggtttttaaaatggtttgtaatgtaaatttatgggagtaatttgaaataagtgggatgatattagattataatatatttaaaattattaagtataggagaaatgatttgtgatttggatattgtatgtggttaaaaaagtattgtaatattaatatgggtattattatttttaagtgttttgaaaatattattgtatttaatttattatttttattagtagtgaaattgaataaaaaggtatttttaatttttgaggggtaaagaattttttggttttttgatgaaatttgaggatattgaagtataatttttgttaaatttttatgtaatttgatttttttgaaatttatttaggaagtacgtgaggtttcgtagattttaggttaagaatttttggattcggtttttgttaatagatttaatttattttataaataaggagtaaaatcgttcgttaatttttattgtttagttgggtacggtggtttatgtttgtaattttagtattttgggaggttgaagtaagtggattatttgaggttaggagtttgagattagtttggttaatatggtgaaattttgttttaggtatgttggtatgtgtttgtagttttagttatttaggaggtagaagtagaagaattatttgaatttgggaggtagagattgtagtgagtcgagatcgtattattgtattttagtttgggtaatatagtgagatattattttaaaaaaaaaaaaaaaaaaaaaaaattttattgtttttttaataatttaagagttgattaggtttggtggtttatatttgtaattttagtattttgagagattgaggtgggaggattatttgaggttaggagttgaagattaatttgggtaatataggaagattttatttttattaaaaaaatttttgtaattagttgggtatggtggtttatatttgtagttttagttatttaggaggttaaggtagggggattatttgggtttaggaatttgagattatagtgagttattttattttagtttgggtaatagagtaagatcgtttttgggaaaaaaaaaaaaaaaggaaaagaaaagaaaaaatttaaataggttgttttatttcgaattttaatatattttatttaatgtatgtatttgtattataatggttatttaataattttattttttgtagtattt

SEQ ID NO: 1235 - DNA, 12393 bp, Artificial Sequence
  chemically treated genomic DNA (Homo sapiens)
  unsure 3032, 3094: n is a or g or c or t
aaaatttattattagttattatagaaatatattgaagtatatagattagtgatattgtgaagtaattatataaataagtttgtaaaataattagttggtattatgatgatagggttaattttatatataataatataaattttaaatgtaaatgggttaaattttttaattaaaagatatagaatggtaagttggatgaagagataagattcgttggtatgttgtttttaagagatttattttatgtgtaaagatatatataggtttaaaataaagggatggaggaaaatttattaagtaaatggaaagtaaaaaaaaagtagaggttataattttagtttttgataaaatagattttaaattaataaagattaaaaaagataaagaagggtattatataaaggtaaaggatttaatttaataagaagagttaattattttaaatatatatgtattaaataaataatgaaatattttatattagagtaaatttattttattaaataaataatgaaagtattttatattgggtaaataatgaaattaaggtagaaattaagaagttttttgaaattaatgagaataaagagataatttattagaatttttatgatgtagttaaagcggtgttaagagggtaatgtatagtattaaatgtttacgttaaaaagttagaaagattttaagttaacgagttaatattttaattaaaagaattagagaattaagagtaaataaattttaaaattggaagaagataagaaataacgaagattagagttgaatttaaagagatagagaagttaaaaagtttttaaaaaaattaataaatttgggagttggttgtttgaaaaaattaataaaatagatagattgttagtttgattaataaagaagaaagagagaagagttaaataaatataattaaaaatgataagggagatattattattgattttatagaaatataaataaatattagataatattataaatttttttatgtatataaattagaaaatttagaagaaatggataaatttttggatatatataattttttaagattgaattaggaagaaattgaatttttgaatagattagtaatgagttttaaaattgaggtagtaataaatagtatattaattaaaaaaaaagtttaggattagatggatttatagttgaattttattagaggtataaagaaaagttggtataatttttattgaaattattttaagaatttgaaaaggagggatttttttttaatttattttatgaggatagaattattttgatattaaaatttggtagagatataataaaaaagaaaattttaggttaatatttttgattgatgatgaatattaacgtaaaaatttttaatgaaagtattttattgttagtaggtaaattaaatttagtagtatattaaaaagtttaattattacgattaagttggttttatttttgagatgtaaggttggtttaatatatgtaaaataataaatgtgatttattatataaatagaattaaaggtaaaaattacgtgattattttaatagatgtataaaaggtttttaataaaatttaatattattttatgttaaaaatttaatgaattggatattgaaggaatatattttaaaataataagagttatatatgataaatttatagttaatattgtattgaatgggaaaaagtatgaagtatattttttgaaaattagtataagataaggatatttttttttattatttttttttaatatagtattggaagttttggttagggtaattagttaggagaaagaaataaagtatatttaaataggaagagacgaagttaaattatttttgtttgtagatgatatgattttatatttagaaaattttattgttttagtttaaaagttttttaagttgataagtaattttagtaaatttttaggatataaaatcgatgtgtaaaaattgttagtatttttattattaataataggtaagtagagagttaaattatgaacgaatttttatttataattgttataaatagaataaaatatttaggaatatagttaataaggtaagtgaaggataaggtaagtttaaggagaattataaattgttgtttaaagaaattagagaggatataaataaatggagaaatattttatgtttatagataggaagaattaatatcgtgaaaatggttatattgtttaaagtaatttatagatttaatgttatttttattaaattattgttgatattttttaaagaattagaaaaagtattttaaaatttatatggaattaaatagaagtcgtaatagttaagataattttaagtaaaaggttggaggtattatgttatttgattttaaattatattatagggttgtagtaattaaaatagtatggtattggtataaaaatagatatatagattaatggaatagaatagagaatttcgaaataagattatatgtcgataattatttgatttttgataaatttgataaaaataagtaatgggaaaaggattttttatttaataaatggtgttgggagagttggtttattaaatgtagaaaattgaagttgtattttttttttatgttttatataaaaattaatttaagatggattaaagatttaaatgtaaaatttaaaattatagaaattgtattagaaaatttaggtaatgttatttaggatataagtataagtaagattttatgatgaaaatgcgaaaaatagttgtaataaaagtaaaaattgatagattgattttaattaaattaaagagtttttgtatagtaaatgaaattattattagagtgaatagataatttatagaatgggagaaaatttttgtagtttatttatttgataaaggtttaatatttagaatttataaggaatttaaataaataagaaaaaaataaataattttattaaaatgtgagtaaagtatatgaatagattttttttaaaagaagatatatatataattaataaataaantttagtaaaagagatacgtttatttttttaataatgaatattcggtaacgtttgcggagttngtcgtcggtttcgcgtgttagggttttaggttcgggattttttttgttttcgttcgtcgttcgcgttttgtcgacgtgagatcgatgtttagttcgttgggtcgggagagtgcgcgtgacggtgggtttcgcgggaaagttgggacgttcggcggggatttttggttgcggggacgtcgggggtagttttaagttggggatcgaggggtattagagtttggggttaggattagttcgcggcgttgtcgttgtcgtttttatttttagggagtttttgattggagcggttgagagtttaagttttagttttgggttaggggttcggaatttcggagtttaattaattgttaaggagaggaggggtttttgggtatagggtgtttttcggtttttcgtttcgggttttggcgggcgcgaagcgagggtgaggcgggaggtcgtatagttgtcgtcgtcgggttgcgggtcgtcgagggtcgggggattagatttaggtgtatacgttattgatgttgatttcgggttagcggggagtttaaaacggggttttatatgagaagtttaaaagtttttagaaattaaagttaggaattttatttttttgtttagtaattgtagtatttgggtgggcgggaggagaatcgaggagggggcggttggagggaaatcgaaatttttttatgtagataatcgatttttagaaaatagtttggttttttttttttttttgtttgttttttttatttatgtgatttattttttttatttattataacgtgaatattttcgatggtaagtttgtttttaaattgaattagtggaaaaatttaatattaaagtagtaagtatagtgataaaattataaggaagtagaggagtagtttttgtttttgttattttttttatttattttttttttttttttttttttttttttttttttttttttttttttttggtgttaggggtttaagggatgggaggaaagttgtgtttaaagggtttttttagtacggttaaaataattaaatttaaatcgagtgaacgtgatcgttttgttcgttggtagcgaaggttgttgttgttttgttgagaggtaattttggagatagtggaaaggggttgggagaggaatttcgagggtcgggtgaagtttatttagagtttttttcgcgcgcggacgttgttgggcggcgttagggtttgggttgtagtttatttggagttgtaggtggagagcgtgaggggacgatattttgttcgcggaaaaatcgatttttttcgcgttagtatattttttatatttttttagatattttggggtcggttagaaggagagtagggtggacgtaagtaagtttggggcggtcgagcgatgggggtgggggtagcgtgcggaggtcgtttgatgtagttatcgttcggtattttaagttttcgtcgcggttgcggttttaaggaagttgtcgagtttaggttgtgtcgtagtaattttgtattagttatgtcgttcgtttggtgattgatagtttggattgtttaataagaagttcgtttgattcgtgcggcgtggagttttgttttttttcgggttaataggaagggtttaggggggcgggatagtaatttgaattttatttggatatgtgattcgtttttaaaagggttagttttttagttgggtttatttttttttcgggttttcgttcgtttttttttttttttttttttgttcgttttggttttgtttttgtttttgttttttttttttagttttttcgcgttcggggtgttattgggttcgggagacgggagttaattttaggttgtttagaggaagttcgtgtagttagttatttgggtgtaagagcgttgttgtttcgggttttttcgttgtagggagagcggtattcgttggtttggatgtggttggatttaggggggtttcgtagtaggggtttcgtggcggtggtaagcgttgtaataggtagacggcgagagacggatttcggtcgaggtaggtgtgtaggggcgcgcggcggggtatcgtttgtcgtgttcggcgtgcggtcgcggcgcgggagcgtgtattttgtagggagaagtggttgcgtaattcggaggtatagttagtatggtgttgtgtgtttgttgttttgttttggttttttatttttttttttttttggtcgttagaggattattttgggaaagtttggttattttggataaatgttttttaattagtagtttttaattgtttttggtagtgggaggtttattatttttttttttatttaaagatgaatttcggattattttttttgtataatttttaaaggacgtttgaataatattttttttttttattaattgcggacgtttttaaattttagtcggaggtgtagcgtataagggtagttgaaggagatatagattttaatagattttgtataaaaggggttttggaaattcgtgtatttttcgttcgttagtattcgcgaaatttttgagataggttacgttttttatggtattagttggaattttaagggtaagggagaaggggacgaagttttttttggtggtatttttattttgttattgaattttaggtgcgtggttttgtttatttaatttaaaaagattaggtttaaataataatggtttatggtattattagttttaattatttattatgatataggagttaggaaaatttttgatagtagacgagtttttgaaatcgtcgaattttaaaggtattaaattgttttttaatattttgtattgttatttttttaggtgttgttattgatgatatttatatagtaatgataatagtattttttatttgtgaagttttgttgtgaagtttaaattttatgtttgatatcgtggtagttattatggaaaagtttgagaggagaagttttaaaaaataatttaaagtggagtttttttttttaagggaggtatagttttgtttggcgatttttggaaagattaggtggttcggtaaattaggtgagtgaatagaaattaggtgtgtttagttttaattggttttttcgtttttttaggtgattttgggtagatttttattatttattttatttataaaagagaggaatataatagttatgtagtggggaatgataaaaaatagttatatatagtgaatttttataattatgtagtttatagatgattgtgagatttttaagttttagtttttaaagtgttattttatagttaaataaatataaaaaagatgttttttttattatttttattatgatgagattgggttttgggggttattaaaagtgaaagtgtttttagataaaatataaattcgtaaggatttttgttaatattttcgaaaaaagtatttttttatggaaaagggtaatttaatatagattgtaaaacgtaaaattttaaggtttttttttgtgaaaatagtattttttttgtgtttgagagtatatgtatggtttaaagtagtatttttattagtgttttttttttagtgaatttttttttgtgttttggggcgaggtttatttgtatgaaaattaaaagtttataatgttttttgtatttgttttaagagaatttttggtatggtttttattgtgaggtaggtaagtttgatttttgttagttagatttgtatatttttatttgttttattttatattttagtaatataaattttttttttattttttagatattaagttttatgaggattatatttatcgattagtatttttagtatttattagttagtataggttgattgaaattttgtttaagttatggttattgtgttagttgtaaaaagataatttttgttttttggatgatatagtaaataaatttttaattggatttatttgtttatagaaaagattaattaaaatattagggagatttaaaatattttaataatgttatttgaaaaatatttgattttaaaaaaatgtttgtgtagaagtcgtgtagatgttagatgttttgtatttttttgtgtttgattattgttaatttgtattgttttttttgttgagaggtgtattaggttggtagatgagaatattttaaataaagtaatttagattttagtaaagttttttgtaaattttttaatgagatttttgttaataatgtggtgaaatatagtttattttatgttattaagggagtttaaggttagttaaataggatttggaaagttgtgattagttgtatgatgttagttggtaaggtgttattttgtttagggtatattatggaatattatgtagttataaaaaggaatgagatcgtgttttttttagggatatgtatggattggaagttattatttttagtaaattaatataggaatagaaaattaaatattatatgtttttatttataagtgggagttaaatgataaaaatatatagatatatgcgggtaaataatatatagtgggattttttagaggaggggttgtggggaggaagagtattagtaagaatagttaatggatgttgggtttaatatttaggtgataggatgatttgtgtagttaattattatggtatatatttatttatgtaattaatttgtatattttgtatatgtattttaaatttaaaagttgaagggtaaaaaaatttttaaatttattttttaaaaaaagagaaagaaaaaaatataggatgaaagatttttaaatggtatgtttgtataggttatttattatgaatggagtttgtatgattggaagttgttttgggtgagttagtgagtgaatgtgaaggtttaagatattatattattgtagattttataaattttgtatatttaggttatagtaaaattattttttaatgttttttttttaataataaaattaattttagtttattgtaatttttttattttataaattaattttttaatttttaatttttataaaaatatttggtttaaaatataaatatattgggtcgggtatagtggtttatgtttgtaattttagtattttgggaggttaaggcgggtagattatgaggttaggagtttaagattagtttgattaatatggtgaaattttatttttattaaaatataaaagattagttgggtatggtggtaggtatttgtaatttttgttattcgggaagttgaggtaggagaatcgattgaattcgggaggtggaggttgtagttagttaagattatattattatattttagtttgggtaatagagcgaaattttattttaaataataataataataataataataaatataaatatattgtatagttatataaaaatattttttttttttttatttttattttatagatttttttttattaattttttattttattttttaaattttttgttaaaaaattaagatataaatatatatatgtttagtttgtatagggttaggattatgaatattattgttttttatttgtataatttgttttattgtaaggtttatgggggtaatagtacgtatggagttgttattttttatgataataatgtttttttttggaatgttttttgaagggtttttttgaagttgttttatagttaatttttttatatataagtagaatgaggatattttaaaataataataaaaagtatagtaaatatataaattagtattatggttgtttattattattaagaattatttattgtatataattgtatgtgttagatttttatatgattgatagtatggtaggtttgtttatattagtattattatatacgagtaaggtgttgtatgatgatattatgatagttatgatattattaggtaatagaaatttattattttattgtaattttatgggattattgttatatatgttatttatagttgattgaaatgttattatgtggtatataattgtattattttttggtattttttgaataatataaattaatagttttgggttatatgagttatatcgttaatgttgtaatattgtagagttggaagggattttaaaaatattttggaattttattttttttttaattttttgagagtttttattataaataggtgttggattttgttaaatgttgtttttgtatttatcgatatgatataattatgtgttttttttttttttagtttgttaatgtgatggattatatttttttttgaatgttgaattagttttatatatttgggataaattttattaggttgtagtatataattttttttatatgttgttgaattttatttattaatgttttttgtggaattttagtatttatgtttataagagatattggtttgtagtttttttgaaatgtttttgtatggttttattattatggtgatgttggtttatggaattagttaggaaatattttttttgtttttattttttggaagagattataaagaattgatataaatgtttttttaatgttaggtagaattaatttattagtgaatttagttgagttttttgttttttgttttggaaagtagttaattattgattagaattatattttttaagaatattaattggttattttttaaaaatgattagatattaaattatttttttgaaaattaatgaggttatgtgagtgacgtagagtgtgttagtgaaggtttttaggtaaagttgttgagataagagtaatttttaggtatttggttagatggtggtgtagtttgttaagagagcgaatgtgaatttgggggtgtgtggggggagagatgtgtagaaagtgtttagttttgaatataaatagatatatttattgtgttgtttaatggatttggatttgaattatttatattttagttatatagtaatttatttttagtatggggaagataaaatatttttaggtagaaatagaagtagtatataatatttattgttattttttaatatatagttatgattaaatggttttttagtaaagtataaaaggttagttttagttatttggattttaatttattgttttttagtttagttttttattagtttttatttggtttttatttatattaaatattttggttggaattattattaatagataattattttaatttttgtaattttatttattttttattgttttgtgattgatttttgattaggaatttataggatgttttttaagtgaaaatatattatataattggtagattttaatgtttggaaattgagtattgatattataatagttgaaaatttttttaatgtatttatttgggatattgtagtgaaattgattatttttgttttttgagaaggtaaattttagtgtaaaaatatagaaaagtaagaggtaattataatatttggataatttggatattaaatttttttatagggttttgtgttatttaatgtaaatttatttatgagtttagttaagatttatttaatgtaaatttatttagtagtattattttttaatgttaatatatattttgtaataaaaggatttcgtgttttttgtttttttttaaatgaagggaaggtaggtagggtggagatagtgataaagaggggaaaggatgagaggttaaaaataaaatttgtgtatagaatggtagaaatagtattttttagattaggattttttttgggttatagattgtttatagattttgaaatgtttgaaaaatgtataatatagattttaggagttttaaaatattaaaatgtaaaaataaaattttattgtgagtgagttaattttttttaagatatgtttttttatagtggtggttgttagttaagggtgattttgttttttatgggtatttggtaatgtttggagatatttttagttgttataattggggaggtggaatgttattggtatttagtgggtaggggttagggatattgttaaacgttttagtaatgtattattgatttttataattaagaattattaggtttaaaatgttaatgtgttaagattgagaaattgtatagagagagatttgcgattaaattgtagttttaatatttggttgtgtgtttggtgttttagtttttatatttgtattatttggataatatttttattagttatttagggttgtgtgtaaggataaatgaattaatatatgtaagaagtttgtaatattgtattaaattatatgggtaagaattatattaatatagtttattatgaagattttgtttgtgaagtaaattgatttatagagcgtatggatatgggtatatatttgaaataatttggtgggttgtttgaggatggggattgtgttttttttgtttattattgtttgtttattgattggtttaaggttaagggtgtagtaggtatttggtaaatattgttgaatgaatgaatgaatgtttaaattttcggggttttttttaaaagttattatttattattgagagtaaatatttttggttgttggtagtcgttttagtagaggtattattggtattatgtataggttagggtgtatgttaaagtttttgttagtattgaaatatagagaagatattagttatttttgaattgttatatagtttttttgagatatggattatttttattagaatgtatagatttttttagaattgatattaaattatttttattattaatttaaagagagttttatttttaaaaaaattaaaaattattttttttatgataatttatttggtatgtttatgtttggaaagagtaattttaattatatttttatattgtttttaataaggttatgaattaaatatggaaggtagtttttatatgatttaaagattttaaaggtattggagttaaaagatttagatttaaatttaattttgttattatgtttttgattttgggtaagttatttattttattaagtttttagttatttttttttgtttgttttaataatttttaggattattttgaatatttaataagttaatatttgtaaatattttttgtagattttaaagattgtattatagtaaatatgttatttttatttagatttaaaatagttttatatgatcgttttttttgttttgatatttcgataagttgtagttaatattttgttatgttagtatttaaaaaggtaatagttttaaattagttagaaatgttgtttataataagtagaatatgttttgtggtttagtaaatgtaattttagaatgttttttagagtaatattgttataattgattttaattttttaatgtaaatttatttgttagt

SEQ ID NO: 1236 - DNA, 12393 bp, Artificial Sequence
  chemically treated genomic DNA (Homo sapiens)
  unsure 9300, 9362: n is a or g or c or t
gttaataaataaatttatattaaaaaattagagttagttatagtaatattattttaaaagatattttaaaattgtatttgttaagttataaaatatattttatttattatgagtaatatttttagttaatttaaaattgttatttttttggatgttgatataatagagtattgattatagtttgtcgagatgttagaataagagaagcgattatataaaattgttttggatttaaataaaagtaatatgtttgttataatatagtttttagagtttgtaaaaaatatttataaatgttaatttattagatatttaaagtaattttgggaattattaaggtaggtaaaaaaaggtaattgaggatttagtgaagtgggtggtttgtttaaagttaaagatatggtgataaagttgggtttaaatttaaattttttgattttaatgtttttggagtttttggattatatagaagttgttttttatatttaatttatggttttgttaaaaataatatggaaatgtaattaaagttattttttttaaatataaatatattaagtgaattattataggaaaaataatttttgatttttttaaaagtaagattttttttagattagtgatgaagataatttaatgttagttttgaaaagatttatatattttgataaagatggtttatattttagaagggttgtatgataatttaggaatgattggtgttttttttgtattttagtattggtaaggattttgatatgtattttgatttgtgtatggtattagtggtatttttgttagaacgattgttaataattagaaatgtttatttttaatggtaaatggtgatttttgagaggagtttcgaaaatttaagtatttatttatttatttaataatatttattaagtgtttgttatatttttggttttagattagttagtgaataggtagtgataaataaaagagatataatttttatttttaagtaatttattaggttgttttagatatatatttatatttatgcgttttatagattaatttattttatagatagaatttttataataggttatattgatataatttttatttatataatttaatgtagtattgtaagttttttgtatatattaatttatttatttttatatataattttgaatgattgataaaagtattatttaaataatataagtgtgaaaattgaggtattagatatataattaagtgttggagttgtaatttgatcgtaagtttttttttatatagttttttaattttggtatattgatattttgggtttgataatttttagttgtggaggttaataatgtattgttaaggcgtttagtagtatttttaatttttatttattagatgttagtagtattttatttttttagttgtgataattgaaaatgtttttagatattattaaatgtttatggggggtaaaattatttttggttgataattattattgtaaagaaatatattttaaaggaaattaatttatttatagtaaaattttatttttatattttagtattttaaaatttttaaaatttgtattatgtattttttaaatattttaaagtttgtaaataatttatggtttaaaaaaagttttgatttaaaagatgttgtttttgttattttatatataagttttatttttggttttttatttttttttttttttgttattatttttattttgtttattttttttttatttaaaaaaaaataaaaaatacgaagtttttttgttatagaatatgtattaatattgaaaaataatgttattaaataaatttgtattagataaattttagttggatttataaataaatttgtattagatagtataaagttttatgaagaaatttaatgtttaaattgtttaagtattataattattttttatttttttgtgtttttatattagagtttatttttttaaagggtagaaatgattaattttattatagtattttaagtggatatattgaaaaaatttttaattattataatattaatgtttaatttttaaatattaaaatttattaattatgtagtatgtttttatttaaagaatattttatgaatttttaattaaaaattaattataaaatagtagaaaataaataaaattataaaggttgaggtagttatttattaatagtaattttagttaaaatgtttggtgtggatgaaagttaagtaaaagttgatagaaaattaaattaaaaaatagtgaattgggatttaaatagttaagattggttttttatgttttattaaaaaattatttagttatagttatgtattgaaaaatagtagtaaatattatatgttgtttttatttttatttaagaatattttgttttttttatattaaagataaattattatatagttaaggtataaatggtttagatttaaatttattaaataatataataaatatgtttatttgtatttaaaattgaatattttttgtatatttttttttttatatatttttaaatttatattcgtttttttggtaaattgtattattatttaattagatgtttggaagttatttttgttttaatagttttatttgaaggtttttattggtatattttgcgttatttatatagttttattagtttttaagaaaatgatttggtgtttagttatttttagaaggtgattaattaatgtttttaaaaaatgtaattttgattaataattaattattttttaaagtagagagtaaaaaatttaattgggtttattggtgagttagttttatttaatattaagaaagtatttatattaattttttataattttttttagaagatggaaatagagggaatattttttaattaattttatgagttagtattattatgataataaaattatataaagatattttaagaaaattatagattaatattttttatgaatatagatgttaaaattttataaaaaatattagtaagtaaaatttagtaatatataaaaagaattatatattataatttagtgggatttattttaggtatataaggttggtttagtatttaaaaaagaatataatttattatattaataggttaaagaagaaaaaagtatatgattatattatatcgatagatgtagagatagtatttgataaaatttaatatttatttgtgatagaaatttttaggaaattaggaagagagtggaattttagaatatttttagagttttttttaattttatagtgttataatattgacgatgtaatttatatggtttaagattgttgatttgtgttgtttagaaaatgttaaaaaatagtatagttatatgttatatagtaatattttagttaattatggatggtatatataatagtggttttataagattataatggagtggtaaatttttattgtttagtgatgttatagttgttataatgttattatgtaatattttattcgtgtgtagtgatattggtgtaaataaatttattatgttgttagttatataaaagtttagtatatataattatgtatagtagataatttttgataataataaataattatagtattggtttatgtatttattatgttttttattgttattttagagtatttttattttatttatatataaaaaagttaattgtaagatagttttagggagattttttaggagatattttagaagaaggtattgttattataggagatgatagttttatgcgtgttattgtttttatagattttatagtgggataagttgtgtaggtggaagatagtgatatttatgattttgattttgtataggttagatatgtgtgtgtttatattttagttttttaataaaaagtttaaaaagtgaaatgaaaaattaatagaaaaaagtttatagaataaggataaaaagaaagaaaatatttttgtatagttgtataatgtgtttgtgtttgttgttgttgttgttgttgttgtttgagatggaatttcgttttgttgtttaggttggagtgtagtggtgtggttttggttgattgtaatttttatttttcgggtttaatcgatttttttgttttagtttttcgagtagtagggattataggtgtttgttattatgtttagttaattttttgtattttagtagagatggggttttattatgttggttaggttggttttgaatttttgattttatgatttgttcgttttggttttttaaagtgttgggattataagtatgagttattgtgttcggtttaatgtgtttgtattttaagttaagtgtttttatgagagttaaaagttaaaaaattagtttataaagtagaagagttgtagtaagttaaagttaattttattgttgaagaaagaatattaaaaaataattttattgtagtttaagtgtatagggtttataaagtttatagtggtgtaatgttttaggtttttatatttatttattgatttatttagggtaatttttagttatgtaagttttatttataataagtgatttatataggtatattatttaaaaattttttattttgtatttttttttttttttttttttaagaaataggtttggaggtttttttgttttttaatttttaagtttggggtatatgtgtaggatgtgtaggttagttatataagtaaatgtgtgttatggtggttagttgtatagattattttattatttaggtattaagtttagtatttattagttgtttttattgatgttttttttttttataattttttttttgaaaggttttattgtgtgttgtttgttcgtatatgtttatgtgtttttgttatttagtttttatttataagtgagaatatgtggtgtttggttttttgtttttgtgttagtttgttgaggataatgatttttagtttatgtatgtttttggaaagaatacgattttatttttttttatggttgtatagtattttatggtgtattttggataaggtagtattttattagttaatattatatagttgattataattttttaagttttgtttggttaattttgaatttttttaataatataaaataggttgtgttttattatattattgataggagttttattaaggaatttgtaaaaggttttgttgaaatttaaattattttgtttaaggtatttttatttattaatttaatgtattttttaataaaggaaataatatagattggtaatagttaaatataaaagaatataagatatttagtatttgtacggtttttatataaatatttttttaagattagatattttttaaatagtattattgaaatattttgagtttttttagtattttaattagttttttttgtaaataaatgggtttagttaggaatttatttattatgttatttaggaagtagaggttatttttttgtaattggtataatgattatggtttgagtagaattttagttaatttgtattaattagtgaatattgaaaatattagtcgatgaatatgatttttatagaatttaatatttagaggataaagaaaaagtttatgttattaaagtataaaatgaagtagatagaggtatataaatttaattaataaaaattaggtttgtttgttttataatggaaattatattaaagatttttttaggataaatgtaaaaaatattatgaatttttaatttttatgtaaatgggtttcgttttaaaatataaaaaaaaatttattaaaggaaaagtattggtggaggtgttattttaagttatatatatgtttttaaatataaaagaaatgttgtttttataaaggaaaattttaaagttttacgttttatagtttgtgttaaattgtttttttttataaagaagtatttttttcgggaatattaataaagatttttgcgaatttgtattttatttggaaatatttttatttttagtaatttttaaaatttaattttattatgatggaaatgatagaaaaggtattttttttatatttatttgattataagatggtattttaaagattaaagtttaagaattttataattatttatagattgtatagttgtaaaagtttattatatgtaattattttttgttattttttattatataattattatgttttttttttttatagatgaggtaaatgatagaaatttgtttaaggttatttgagagagcgggagaattagttagaattgagtatatttgatttttatttatttatttaatttatcgagttatttgatttttttaaaaatcgttaaataaaattatgttttttttaaaggaaaaagttttattttaaattattttttaaaatttttttttttaagtttttttatgatagttgttacgatgttaaatataaaatttaaattttatagtaggattttatagatggagaatgttgttattattattatgtaaatattattaataatagtatttagagaaatggtaatataaaatgttaggaagtaatttggtgtttttaaaattcggcggttttaaaagttcgtttgttattaaaagtttttttaatttttatgttataataaataattaaaattgatggtgttataaattattattatttaaatttggtttttttaaattgagtaggtaaagttacgtatttaaaatttagtagtagagtaaggatgttattaaaagaagtttcgttttttttttttttgtttttaaaattttaattgatgttataggaagcgtagtttgttttaagagtttcgcgaatgttagcgaacgggaaatgtacgaatttttagagttttttttatataggatttattaggatttatattttttttaattgtttttatgcgttatattttcggttgagatttgggagcgttcgtaattgataaaggaaagaaatattatttaaacgttttttaaaaattgtatagggaaaatgattcgaaatttatttttgggtaaagggaagggtggtagattttttattgttaaaggtagttaaaagttgttagttagagggtatttatttaaagtggttaaatttttttaaaatagttttttggcggttaaagggggagaaaagtggaaaattaaaataaaataataagtatatagtattatattgattgtgttttcggattacgtagttatttttttttgtaaagtgtacgttttcgcgtcgcggtcgtacgtcgagtacggtaagcggtgtttcgtcgcgcgtttttatatatttgtttcggtcggggttcgtttttcgtcgtttatttgttgtagcgtttgttatcgttacgaaatttttgttgcggagtttttttaaatttaattatatttaggttagcgagtgtcgttttttttgtagcgggagagttcgaggtagtaacgtttttgtatttaggtgattgattgtacgggttttttttgagtagtttgaagttggttttcgtttttcgggtttaatgatatttcgggcgcggaggggttgagaggagggggtaggggtaggggtagggttagggcgggtaaaaaagggagggagagagggcgggcgaaagttcggagggggagtgggtttagttggagggttggtttttttaaaagcgggttatatgtttagataaagtttaggttgttatttcgtttttttgaattttttttattggttcgaagagaagtaaggttttacgtcgtacgggttaggcgggttttttattggataatttaggttgttagttattaggcgggcgatatgattgatataaagttgttgcgatatagtttggattcggtagtttttttaaagtcgtagtcgcggcgggagtttggggtgtcgggcggtggttatattaggcggttttcgtacgttgtttttatttttatcgttcggtcgttttaaatttgtttacgtttattttgttttttttttgatcgattttaggatatttggagagatgtgaaaagtgtgttgacgcggaagaagtcggttttttcgcgagtaaagtgtcgtttttttacgttttttatttgtagttttaggtgagttgtagtttagattttggcgtcgtttaatagcgttcgcgcgcggggaggattttgggtgggttttattcgattttcgaggttttttttttagtttttttttattgtttttagagttattttttagtagagtagtagtagttttcgttgttagcgagtaagacgattacgtttattcgatttgaatttagttgttttaatcgtgttggaaaaattttttaaatatagttttttttttattttttagatttttaatattaaaaaaaaaaaaaaaaaaaaaaaaaaaaaaaagagagagagagaaagataaatgaaagaagtggtaggggtaagagttgtttttttatttttttataattttgttattgtatttattattttagtattggatttttttattagtttaatttgaaagtaagtttattatcgaggatatttacgttataatgggtggagggggtgggttatataagtgggagaaatagataggaggggggaaggaattaaattgttttttaaggatcggttgtttgtatgaagaaatttcggtttttttttaatcgtttttttttcgatttttttttcgtttatttaaatgttgtagttattaagtaaaaggatggggtttttaattttgatttttaaggatttttaggttttttatgtaaggtttcgttttaggtttttcgttggttcggagttagtattagtgacgtatatatttaaatttggtttttcggttttcggcgattcgtagttcggcggcggtagttgtgcggtttttcgttttattttcgtttcgcgttcgttaaagttcgaggcgggggatcgggggatattttgtgtttaaaggttttttttttttttaatagttagttaagtttcgggatttcggatttttaatttagggttgagatttgaatttttagtcgttttagttaggaattttttggagataggggcgatagcggtagcgtcgcgagttggttttgattttagattttaatgtttttcggtttttagtttggagttgttttcggcgttttcgtagttaggagttttcgtcgagcgttttaattttttcgcggggtttatcgttacgcgtattttttcggtttagcgaattgggtatcgattttacgtcggtagagcgcgggcggcgggcgggagtaaggggagtttcggatttagagttttggtacgcgaggtcggcggtnggtttcgtaagcgttgtcgaatatttattattaaagaaatggacgtgttttttttattaagntttgtttgttggttgtgtgtatatttttttttaagaagggtttgtttatgtattttgtttatattttaatggggttgtttgttttttttttgtttgtttaagttttttgtagattttggatattagatttttgttagatggatagattgtaaaaatttttttttattttgtaggttgtttgtttattttggtgatagttttatttgttgtgtagaagttttttagtttagttagagttaatttgttaatttttgtttttgttgtaattgtttttcgtatttttattatgaaattttgtttgtgtttatgttttgaatggtattgtttagattttttaatatagtttttatagttttgagttttatatttaagtttttaatttattttgagttaatttttgtataaggtataaggaaggggtgtagttttaattttttgtatttggtgagttagtttttttagtattatttattaaatggggagttttttttttattgtttgtttttgttaggtttgttaaagattagatggttgtcggtatgtggttttatttcggagttttttattttattttattggtttatgtgtttgtttttgtgttagtattatgttgttttggttattgtagttttgtggtatagtttgaagttaggtggtatgatgtttttagttttttgtttaagattgttttagttattgcggtttttatttggttttatatgaattttaaaatattttttttaattttttgaagaatgttaatagtaatttaatgggaatagtattgaatttataaattattttgggtagtatggttatttttacgatattgattttttttgtttatgagtatgggatgtttttttatttgtttgtgttttttttgatttttttgagtagtagtttgtagttttttttgaatttattttgttttttatttattttgttaattgtatttttaggtattttattttgtttgtagtaattgtgaatgggagttcgtttatgatttggttttttgtttgtttgttgttggtgataggaatgttaataatttttgtatatcgattttatattttgagaatttgttgaagttgtttattagtttaagaagtttttgagttgagataatgggattttttagatataggattatgttatttgtaaataaagatagtttgatttcgtttttttttatttgaatatgttttattttttttttttggttgattgttttggttagaatttttagtattatgttgaagaggagtggtgagagagggtatttttgttttgtgttggtttttaagggatatgttttatgtttttttttatttagtatagtattggttgtgggtttgttatatatggtttttattattttgaggtatgtttttttaatatttagtttattgagtttttaatatgaagtgatgttgaattttattgaaggttttttgtgtatttattgagataattacgtggtttttgtttttagttttgtttatgtgatgaattatatttattgttttgtatatgttgaattaattttgtattttagggatgaagttaatttgatcgtggtggttaagttttttgatgtgttgttggatttggtttgtttattggtaataaagtatttttattgaggatttttgcgttgatgtttattattaattaaagatattggtttgaagtttttttttttgttgtatttttgttaagttttggtattaggatgattttgtttttatagaatgagttagggaggagttttttttttttaagtttttaaaatagttttagtggaaattgtattagtttttttttgtatttttggtagaatttagttgtgagtttatttggttttgggttttttttttggttggtatgttgtttattattgttttaattttagaatttattattggtttatttagggatttaatttttttttggtttagttttgggaggttgtatgtgtttaggaatttatttattttttttagattttttagtttatgtgtatagaggaatttatagtattatttgatgtttgtttgtatttttgtggggttagtggtgatattttttttattatttttgattgtgtttatttgattttttttttttttttttttgttagttaagttagtagtttatttattttattaatttttttaaataattagtttttagatttgttgatttttttgaagattttttaatttttttatttttttaagtttagttttgattttcgttattttttgtttttttttagttttgaggtttatttgtttttggttttttagtttttttagttaagatgttagttcgttaatttgagatttttttagttttttgacgtgggtatttggtattatatattgtttttttaatatcgttttagttgtattatagggattttggtaagttgtttttttgtttttattagttttaaagaattttttgatttttgttttaattttattatttatttaatatgaaatatttttattatttatttggtgaaataaatttattttaatataaagtattttattatttatttggtgtatatatatttaggatagttagttttttttattgaattgaattttttatttttatgtaatgtttttttttgttttttttggtttttgttggtttaaagtttgttttgttagaaattaggattgtgatttttgttttttttttgttttttatttgtttggtaaatttttttttatttttttattttgagtttatgtgtgtttttgtatatgagataggttttttgaagatagtatattaacgggttttgtttttttatttagtttgttattttgtgttttttagttagaggatttagtttatttatatttaaggtttgtattgttatgtgtgaagttggttttgttattatgatgttagttggttattttgtagatttgtttatgtggttgttttatagtgttattggtttgtgtattttagtgtgtttttgtagtggttggtaatgggtttt

SEQ ID NO: 1237 - DNA, 6834 bp, Artificial Sequence
  chemically treated genomic DNA (Homo sapiens)
agtggggtttagttttttttggtatttagaatttacggatttttttattatttttagtattaatttattttaggagaaattattttttttttaaattgtatttattttagtggatttaggtttttggaaagaagtaagaatgtgaataatgtgtttagggttataaatgtcgaggtaagtaatgtggtttttttttagtatttttttgaggttgggattttaggagaataattttttttttaggtagaagaaaaagaggttttttgtatagtttttggtatttatttgtaaattttattttttttaagttttgtgatttgatttttaggattttttggtgttttttttgaaaatgaggataatggttgggtgcggtggtttatatttgtaattttagtattgggaggttaaggcgagtggattatttgagtttagaagtttaagattagtttggttaatatggtaaaatttcgtttttattaaaaatataaaagttagttgggcgtggtggtgtgtatttgtaatttcggttatttaggaggttgagataggagtatcgtttgaatttgggaggtagaggttgtagtgagtcgagattacgttattgtattttagtttgggtaatagagggaaattttatttttttaaaaaatgaggataataatttttgtttgtgttgatgtatatttgtagttttagttatttggaggtcgagttggggggattatttgagtttaggagttgtagtgagttatgatcgtgttattgtattttagttttagtaatagagtgagattttatttttaaaaaaataaataagtaacgtttgtttttttatgttttagtgatgattaaatgaggtaatgtattataaatattgggatatattatcgttgtttattaatatttatttttttttttttagttcgagaggaaaatatcgtgtatttaagtttgtagttagatgagattttggttttttattattgtatttttggtgtttagaattattttgaagttagtaggtgttcggtaaatatgtatgaatgaatttagtaagataatagggtttaaaggatattaggagtgaattttttttgtggaatagttattatagggaggatgtgtttttaagatttattgaaagtaagaattggttttaattatagtaggaaggaatttgtttttggaagattggcgggaagttttttgagagagttgtaggatgtaagatatagaaaaaaaagttgttaaagatataaagaagtgaaagtatgtttttattggaaataaaaataggatattgtatttagattttgattttttttaggttttgatttattaagtgttttagataggttaagtatgaggcgattaagattttttgggtagttatggaatattgacgtcgttataaattaaggtcgtggagttaagatgattattttgggtaaaaaagaattttatttcgatttgataaagttatgtttaagtgatttgtttaataaagttatgtttaagatgatttgttttggaattttagttttgatattttatgattttgggtaattattttaagtttttttttatttaatttttttattcgtaaaattggaataataatggtagttattggaaaagagttgttataataattttattaaataatagggaaaagtatttagtttacggtttgatatattgaggggttaatgattgttatttttttttattgtatttttaggtaagtttttaaaagaggttggtaaagggaatgagaagggagattaattatttgtttagattttttttttgtggtagaaaggagttatgagatgattttgatataggtttagattggaagttgggggttttagtaaagatatggtttttaggggttatattgaggaaagtaagaattaagggattattgttaatgttttgtgtgaagaagagtacgtttacgaaagtgtagaaagtagttgattttagagttgttcgtgagaaagtgttgagagtagtttttttattataaggtagattttgtagtattaattttttaaaagtatttattatgtttttttttttttagttagatattaggatattttagggtatatttttgatataattatttgaagttatttgtggtattatttttaggaatttagaggtaaatttaagtacgttattagtaaggataagaagggaagaatttttttaagatatataaagaaattttttttatacgttaagagtttgtttatggaggaagaaaattttagttagtttatttttttttttatggatgaagaaatggaaatttagaaaagggaagtgaattgtttaaggagatatttgggagattttttgattttgttttgatttgttgttataatatattttattttgttattttgatgtttttttaaatttggtttttttatgaatatttttttttttaaagatagggttttgttgtgttgtttaggttggtttcgaattttaggtttaagagatttttttattttagttttttgagtagttgggattatagttgtaagttatttttttaagttttatgagtattttattattgtaaatattataaaaataatattgtgatatatatttttttgttttttagttaaagttatgttattttttttgtttttgtaggtgttaggaataagtagatagttttagtaatattgtaggtggatttgggtttttaagggtggtagtagtttaaggtttgttttttggaggataaatttttgttatttttttttttgttatggtttgagtagtgtttcgttgttaaggtgattttagttgttagggttttttaggaattggtttagagtatttttgaggagtataatgtttggagttattttaggtagttgtgtttatatagaaaaattatttagttttacgtgtatattataaggtagagataatgtgatgatatatatatatgtgttgttagtgatttgattatttttttgtttttattttttaataataaggtaaatatttggggataggagagaatgatttaagtatttttgaattgattttgattttgtagtttggtttaatggaagtagaaaggttttggaaagagatttggttttaaattttagttatgttatttattagttgtgtggttttggataagttaagtttagtttttttatttataaatgattattgtgaggattaaataagatggtgtatgaaattgttggtagttgttaaagtttttttataaattttagttttgttttttttataatatatagattagggttttttaatatttattattatttttgataaagaggttttgtagatattttaaagatttttttttatataaatttaatagtagatataaattgtatatttgtttatgtgttgtatgtatatttgttttttatatataaaaatatatatttttgtttttgatgattaattttttatttagttgggggtgatatcgtttttattgagaaaggatattttaatggagtagtttgtaatttatattataagattagtaagtgatttatgatattagtgttatttggtttgatgtggtattttattagaggattgataataattttttggaaaatatttataaagttaagtgatttggatttagagatattatttagattatagaaggtaagtttgttaaattttgtgttattaaaaagtgatatttttatagtagaataattagttgtatttgtaggttagatagatatagagaaaataaattaatggttagagagaggagaatagattagtaagaatttgtatagttttttgtaagagtgaggtaagataatttttaaattggaaaattattttttttttatatttttttttttttttttaagttttatttaagtagttagtagattgttttttaggttattgaggtgggtaagagtaatggttaaattttaatatatttttacgtgtattttatcgtattatttagatcgtttttatataattaggaggtagcgaatttatggtgtgatttgaaggggtgttgagtagaatttatttttatatcgtagtattattgtttgtaattttatttttggaattttattttttgatttgtaaaagtttttagtgtttaaatattttttattgagtaagagatagattttgtgtaatgggataattaggttaagagggaaagaagttgaggtgataggtagatagattttagaggtaaattttttttatttgttaaagttgaaaagagttaatttatattttattaacgttagataatttaggatgtagggaaagtttgtttttggaatttatttaggtatttagttgggattgagttttagtttagatgtttgaagatgttaagttatagaattaggatttgagtcggtataatacgtggaataaataatgaagtcgatgttataaatttttttttgttatatgtaaaatttttgtattatatttttttagggagttggatttcgtttagaaagtatttatttattttaggaaaaggattttatttaattttttaatatttattttaaaaatttttttttatttataatgaatataaggaaagtattataatgaaaattaagaatattaggttttaagaaaatatattttaagtttttttttttttttagttgtttgatattttttttataagggtttattttgtaggataggtggacgtagaggtttatttattattttgaaggtatatattttgaattgtttgagtgatggattagatgttaattgatttattgtcgtttgaataaagttatgtttttgtttgtatgtttttgagatagattaagggatgatattaattatgagttatttataggatttatatttatagaattcggattaagggttatataaagaggaatagtttaggaatttaggttagaaaggaatatagtaaattgaattgattcgtttagaagtttataatgaagttttttttaatattgtttttgtaggttattgtttttggagttttttttttgaatagttttataagtttggaaaaaaataatgtgttatttggtgaagtaagtatggatattatagtatttatcgagtttgatgtttgtttttaagatttaattgtattaattagtttgtttgtttgtttgtttgtttgtttttacgtattagttgaaaattggtttaggaggttgtttgtttttagtattaagttttattttgttaaagaggaatataaaaaagaggtattggttttgaaggattgttatgaaattggtaagtgaatttgtttttttttttaaaaatttttggttaagaaatttttatttaatataattggagtttatttttgttatggtattttatattaattattaaatgttagttaataatttgagatttgaataatggtaggattaatataattattttaggttgttatgataatttaagtatattttttttatttttagttattttagttatatttttatagttttttttttttttttttatggagatggggttttattatgttgtttaggttcgtttgtaatttttgggtttaagtaatttttcgttttagttttttaaagtgataggattataggcgggagttattatgttaggttttatttttatagtattttttatggattttttttaatttttaaatttttttttttaattaaaagagtttggtttttttattttttaagatgattttaatattgaatttattatagttatttattttgtttagttttgagtttttaagtaagaaatttgtgttttaatttatattaataatattaataatttatgtatttttttgtttttttttttttttttttttttttttttttttgagatagggttttattttgatatttaggttatagtgtagtggtattattttagtttattgtaattttcgttttttgggtttaggtgattttattgatttatttttttaagtagttgggattataggtatgtgttattatttttggttaatttttgtatttttagtagagatagggttttattttgttgtttaggttggttttaaattttggggtttaagtaatttttttattttggttttttaaagtgttgggattatcggtatgtattattgtggttagtttgggtgattaagagaaatttttttgttttaaaaatgaataaatgacgttttaaaaaagatatttttattgggatttcgggaataaatttagttaatagtttatgatatgtttttgtttttttgtttgtttttgttttttttttttttgagatagggtttgtgtttgttatttaggttggagtgtagtggtataattacggtttattgtagtttttattttttaagtttaagtgatttttttattttagttttttgagtagttgggattataggtatgtattaacgttttgggataatttttgtgttttttgtatagaggaggtttcgttatgttgtttaggttagttttgaatttttgggtttaagaaatttttttgttttagttttttaaaatgttgggattataggtttgagttattgtttttggttgatatgtttttgatagtataaaaaattaaggtttttttttttgattataattaattgtttaaaaaataataatttaatttgtgagtaagatgtgtaaaatttttggtttaaaagtattagtgtgtaattgagttatatatgtggagtttttaatagaaattttttgtgtgtatttatatattgttgaatgtatttttttttttaga

SEQ ID NO: 1238 - DNA, 6834 bp, Artificial Sequence
  chemically treated genomic DNA (Homo sapiens)
tttggaaaaaaaaatatatttagtaatgtgtaagtatatatagaaaatttttgttgggagttttatatatatgatttaattgtatattgatgtttttggattaggaattttgtatattttatttataggttagattattgttttttggataattaattataattaggaaaaaaaattttaattttttgtgttattaaagatatgttagttaggagtagtagtttaggtttgtaattttagtattttgggaggttgaggtaggaggattttttgagtttaggagtttaagattagtttggataatatggcgaaattttttttgtataaaaaatataaaaattattttagagcgttggtgtatgtttgtagttttagttatttaggaggttgaggtgagaggattatttgagtttgggaggtagaagttgtagtgagtcgtgattgtattattgtattttagtttggatgatagatatagattttgttttaaaaaaaagaaaaataaaaataaataaaaaaataaagatatgttataaattattagttagatttattttcggaattttagtggaagtattttttttaaaacgttatttatttatttttaagatagaggagttttttttggttatttaggttggttatagtggtgtatatcggtaattttagtattttgagaggttagggtggaaggattgtttgagttttagagtttgagattagtttgggtaatagggtgaaattttgtttttattaaaaatataaaaattagttaggagtggtggtatatgtttgtagttttagttatttgggaagatgagttagtaggattatttgaatttaggagacggaggttgtagtgagttaagatggtgttattgtattgtagtttgggtgttagagtaaaattttgttttaaaaaaaaaaaaaaaaagaaaaagaaaagaaaataaaaggatatatgaattattaatgttattaatataagttgggatataaattttttgtttaaaaatttaaagttaaataaaatggataattatgataaatttaatgttaaaattattttagaaaatagggagattaaatttttttaattaaggaaaagaatttaagaattgaaaaaaatttataaagaatgttataaagatggggtttggtatggtggttttcgtttgtaattttattattttgggaggttgaggcgggggattgtttgagtttagaagttatagacgagtttgggtaatatagtggaattttatttttataaaaaagaaaaagaaaagttgtaaagatataattgagatgattgagggtaaagggaatatgtttaaattattatggtagtttgaagtggttatattaattttgttattgtttagattttagattattaattggtatttaatgattagtgtaaaatattataatagaagtgaattttaattatattgaatggaaattttttggttaaaggtttttagaagaagaaataagtttatttgttaattttataatagttttttaaaattaatattttttttttatatttttttttgataaagtaaaatttaatattgaaagtagatagttttttagattaatttttagttgatacgtaaaagtaaataaataaataaataaataaattggttaatgtaattaaattttaaagataaatattaagttcgataaatattgtagtgtttatatttattttattaaatagtatattatttttttttaggtttgtagagttgtttaggggaagagttttagaagtagtggtttgtaggagtagtattagaagaaattttattgtaaatttttaaacggattaatttagtttattgtgtttttttttagtttaagtttttgaattgtttttttttatatagtttttagttcgggttttgtgaatatgaattttatgagtgatttatagttgatattattttttgatttattttaaaaatatgtaaataaaagtatgattttatttagacgataatggattaattagtatttagtttattatttaagtaatttagagtatgtatttttaaaatgataaataagtttttacgtttatttattttataaaataagtttttgtaaaagaaatattaagtaattaaaagagaaggagaatttaaaatatatttttttaaagtttgatatttttgatttttattataatattttttttatatttattatagataaaaaaaagtttttaaagtaaatgttgaaagattaaataaaattttttttttggagtaaatgagtgttttttaaacggaatttagttttttagagaaatgtgatatagagattttatatgtagtaaaaaaaaatttgtaatatcgattttattgtttattttacgtgttgtatcggtttagattttgattttataatttaatatttttagatatttaagttgaagtttagttttaattgggtatttggatagattttagagataaattttttttatattttagattgtttagcgttggtaggatgtgggttaattttttttaattttagtagatgggaaaagtttgtttttggaatttatttgtttattattttagttttttttttttttgatttaattgttttattgtatagaatttgttttttatttaatagagaatatttaagtattaaaaatttttataagttagggaataaaattttaaaggtagaattgtaagtagtggtgttgcggtgtgaggatagattttatttaatatttttttaaattatattataagttcgttgttttttgattgtatggggacggtttggatggtgcggtagggtgtacgtaagagtgtgttaagatttagttattgtttttatttattttagtggtttgggaaatagtttgttggttgtttgagtgaggtttaaagaaaaggagaaaaatatagaaaaaaaataattttttaatttaaaaattattttgttttatttttgtagagaattatgtagatttttgttgatttgtttttttttttttagttattgatttgttttttttgtgtttatttaatttataaatatagttggttattttgttgtgagaatgttattttttaatgatataaagtttaatagatttgttttttgtgatttaaatagtatttttaaatttagattatttggttttataaatgttttttagaaaattgttattaattttttggtgagatgttatattagattaggtgatattggtgttatgggttatttattgattttgtggtgtagattataggttattttattaagatgtttttttttaatgggggcgatattatttttaattgggtgaaaaattggttattaaaggtaaaaatatatatttttgtgtataaaagatagatatgtatatagtatatgagtagatatataatttatgtttgttattaaatttgtatggggggaaatttttaaagtgtttataaagtttttttattaggaatagtaataaatgttgagaaattttgatttatgtattataaaggaaatagaattaaaatttatggagaggttttaatagttgttagtagttttatgtattattttatttaatttttatagtagttatttatggatgaggaaattgaatttaatttatttaaagttatataattagtaggtggtatagttgaggtttgaggttaagtttttttttaaagtttttttgtttttattaaattaggttgtaaagttaaagttagtttaaagatgtttgagttatttttttttgtttttagatatttattttgttgttggagagtaagaataggaaaataattaaattattaatagtatatatgtatatgttattatattgtttttattttatgatgtatacgtaggattagataatttttttatgtgaatataattgtttaagatggttttaaatattatgttttttagaggtgttttgggttaatttttggggagttttagtagttgaagttattttagtagcggggtattgtttaggttatggtaggggaggagatggtagaagtttattttttagagaatagattttgaattgttattatttttgggaatttagatttatttataatattgttaggattgtttgtttatttttggtatttgtaagagtaaaggggatagtatggttttaattaaaaagtaggaaagtatgtattatagtattatttttgtagtgtttgtagtaataagatatttatagaatttggaagggtggtttataattgtagttttagttatttaggaggttgaggtgggaggattttttgggtttggagttcgaggttagtttgggtaatatagtaagattttgtttttaaaaaaaaagatatttataagaagattaaatttgaaaaaatattaaaatgataaaatgaaatgtgttatagtaataagttaggatagggttaggagattttttagatgtttttttaagtaatttattttttttttttgaatttttatttttttatttataaaaggaaaggtgaattagttgaagttttttttttttatggatagatttttggcgtgtgaaagagatttttttgtatattttggaagaatttttttttttttgtttttgttgatgacgtatttagatttgtttttggatttttggggatgatattataaatgattttaggtgattgtattagggatatattttggaatgttttggtgtttggttaaagaaggaaaaatataatagatgtttttggaaggttggtgttataaaatttgttttatgataaggaaattgtttttagtatttttttacgagtaattttgaagttagttattttttatattttcgtaaacgtgtttttttttatatagagtattgataatgattttttgatttttgttttttttagtgtggtttttggaagttatgtttttgttgggatttttagtttttagtttgggtttatgttagaattattttatagtttttttttattataggagagagatttgggtagatagttgatttttttttttattttttttattaattttttttagaggtttatttaagagtgtagtaaaggaagatagtaattattgattttttagtgtgttaggtcgtagattaaatatttttttttattatttaatggaattattgtaataatttttttttagtagttattattattattttagttttacgaatgaagaaattaagtgagaaagagtttgaagtgattgtttaaggttataaaatgttagagttaagattttaaggtaagttattttgagtatagttttattaagtaagttatttgagtatagttttattaaatcgaagtggaatttttttttgtttaaagtggttattttgattttacgattttagtttgtaacgacgttagtgttttatggttgtttaaggggttttgatcgttttatatttgatttatttgggatatttggtgagttaaggtttagagagaattaaaatttgagtgtaatattttatttttatttttagtgaggatatgtttttatttttttgtatttttagtagtttttttttttgtattttatattttataatttttttaagagatttttcgttaattttttaagaataggtttttttttgttgtggttaaggttagtttttgtttttagtgagttttgggaatatattttttttgtaatgattattttataagggaagtttatttttgatgttttttgggttttattgttttgttagatttatttatgtatgtttatcgagtatttattaattttaaggtagttttaggtattaggaatatagtggtggagaattagaattttatttggttgtagatttagatgtacgatgtttttttttcgggttaaggggaagagaataaatattagtgagtagcgatagtatgttttagtatttataatatattgttttatttaattattattaaagtataaagaggtaaacgttatttatttatttttttagagatgaggttttattttattgttgaggttggagtatagtggtacgattatagtttattataatttttaggtttaagtgatttttttaattcggtttttaagtagttggaattataggtgtgtattagtataggtaaaagttattatttttattttttaaaaagatggagtttttttttgttgtttaggttggagtgtagtgacgtgatttcggtttattgtaatttttgttttttaggtttaagcgatatttttgttttagttttttgagtagtcgggattataggtgtatattattacgtttagttaatttttgtatttttagtagagacggggttttattatgttggttaggttggttttgaatttttgagtttaggtaatttattcgttttggttttttaatgttgggattataggtgtgagttatcgtatttagttattatttttatttttaaaggaaatattagagggttttagaggttagattatagaatttaaaaaaggtagggtttgtaggtggatgttagggattatgtagagggttttttttttttttatttgagaagagaattatttttttggagttttagttttagagaaatgttggggagaagttatattgtttgtttcggtatttatgattttgagtatattatttatatttttatttttttttaagagtttaaatttattaaagtgaatatagtttaagaagagagtaattttttttgaagtgagttaatattgagagtggtgggagagttcgtgggttttgggtgttagaaagaattgagttttatt

SEQ ID NO: 1239 - DNA, 5218 bp, Artificial Sequence
  chemically treated genomic DNA (Homo sapiens)
tattttagtttttcgagtagttgggattataggtatttgttattatgattaattaatttttgtatttttagtagagacggggttttattatattggttaggttggtttagaatttttgattttaggtgatttgttcgtttcggttttttaaagtgttaagaaataggaatgagttatcgtgtttttgttttttttatttagttttttagtaatgtaattataatttttattttttttttattaggtatagtaaggttatttaataatgtgtttatttagaagttttatagaagaaattttgaagtaaattaggtttttggaatttttttttattaggagattgttttaatttatagtttatttttgtttgcgatggttttagttagattatttagtagatacgatattcgaagtaagttataaagtaagttatgtagatttttatattttattgtttttttttttatatgttatttatgttaaattttttttttaaaagtttttgttttttgtttgaagattgagatgttgtttttaaggtaggagtttatattatttttttttagttagttttgaaatatggttattttttttttattaggtttcgttttttttaattggattttgtaagtagtgagcgattggatttgtattttattataatatgatgttttagtttatgattttttgattttataatggtgtataagatatatgtattgagtagaaattgtattttaaattttgaattttgatttaaaattttttataataattttattataaaatgggttttgtgttagatgattttgtttaattttaggttaatgtaagtgtttcgtgtatatttaaggtagtttgagttaagtaatgatatttggtaggttagttgaattaaatgtatttttgatttatgatatttttaatttatgatgggtttatttggatgtaattttattgtaagataaggaatatgtatatatatatatatattatatatatgtgtatgtagtgtgtgtgtgtgtgtgtatggaggtagattattttaaaaattttgagatgttatataattttttttttttgagaaaagttttattttttaaatattatgtaataatattatattttgtttttgtgtattgttttttattagataatttgttttttaaaaaatatgtaatggtttttattttagtgaattaaggtaataaggtgagattaagttgtttaaaaatagatttttgttttattgtttaaatattaggaatttttaaatgtaataaaattgtttgttgttaaaattattaaagtatttttttatttttttaatttgtttttatttttattatttattattaagtaatttagatttttttttttttaaagatatttgggaagggttgggttagaatgtgtgttttatttttagttgtttttttttagagtatttggttaaatttggttaaggtggatatttagtaattatttttttttaattaaatatataaaaaaataaaattttttaggaggggagtttaggaaattaggatttgatttttagatgttatattttagtaagaattaaaaataatttattttattttttgtaaatttttttagtaatttttgtggattaatttagtatgagtatggtatttttgaagagtatattatttaaatgttaaaagtaaatgattttttaagttatttaatttttgttttgtagttatagtatgtaaaatgagtttttttttgttttgttttatatttgtggatgatgttatgattgtataaaagtagtgtttaaatttaaatttagaagaaatttagtttttttttttttttttttttaatggcgtttttttgtttgttttaggttgtttttaaattttatttttgggtttaagtaattttttaattttagttttttgagtagttgggattatagatatgttttatgtttagttagtttttttttttaagattatgtaagtttagtttatgaggttatgaaaaaaaaagagaaatcggaaggtagaattaagtaattattagagagtgtttataaaaaattattatttcgtgtatttgtagagttaaattatttatattttagaaaaataaatatatcgttaagtgttatcgataatgagtttttattatattttaaattgaagttaaaattttgattttaatcgtttttttatttaaagattttttataattttaatttaatttaaatggttaattgtttatgttatttttagtttgggatttttttgtgatttagtatttggttgtttatagatatttttcgtttttgtttgggtgacgttttgaatttgaaaattgatgatgatttatgttttaaaaagttttatattgttaatgtttgaattagtagtaaatatataattttaatttagtttagttttgtttgtttattttataggtttttaaattttttagtgatttggtagatttgttagaattatttttaaatattagtttagttttattgtgttaaagatgatatttgaaattataaattattttatagtggtaattagaaggtttgattttaatagttaataatttgatataaggatttgcgttgataagtagtttgttaatatattatgatgtgatgatatatttttattattatttaaaaatatttttttttgaataatattttataaacgagtagtttgattatttttttaatgaattaatgtattttaatttttggaggaatttttatttatttttatttaagaaaattatagaatatataataatatgtttttattaatttttttgtgtttttttttttgcgttgattatgtttttaaatggaatgagaaattagtaaaatattaaagttgtttgataataaattttatttttaaagttgaaaaatagtggtatgtatttatttttatttgttattaaaaatgttttttttaatgggggaggtaatattgtaatgatttttagaaaaaggtttttattttagtttttattttatttttatagatattagtatggtattttatatggttgatgtttaattaatatatttattaaattgatagataaaaaagtttttttttttttagtttgaagtagtaatatttttataaatatgtgaaaatttataagaatagttagtttatttgattttttttttttatttttaaatgtttaataaaatgttatttgttttttagttttttaagtattttttatttaatgagattttaatatattatgaaaatttatttgtaaaaataaatgttttttaataaattaatttttataagtttagtcgatgaattaaatttttttggataattttttatttaattttaaaattaaatattatgatatatggaagtaatttaaataaattattgttttgtatttttgattgagtattaatttaattttgaatttattggaaataatttatttgaaagggtatatttggttgtattttgtttggataaaggtatatagtaaattttttttaaatgattatatatatgttgtaggtttttttgatttttttttaaggtattggttattttagattataggattttatttatatgttaggatatttatttcgtatttattttaaagttgtatttatgttttttttttttgttttattatgtttttgatttgagtagtattttttttttgatttttagttatttaaattaatttgtatttttaattatttatttaaagaagtttaataaatttaaagattatggtttatattgttttatttatttatttttgtaggggattaaagatggtattttgattttacggtattgaatgtgtgatgttttgaaaggaataatagggtagaggtttttaggattatttttttgatggttggattaagattatttttattatttaaatttaaaaattgagaaatttgaaattggtttattgtagttttagtttttttgggtattttttgaggtgtaggaattaaatagtttagtttttaagaaaatatttgagaatggaaagggtggaggttataattagatagggacggtggttaagaatattgagttttgagttattggtttaggtttaaattttggtattatttataaattatatgatcgtatataagtatttaattttttagtgtattagattatttatatgtaaaatggaaaataagttttttgatagtatttatgtggttgttgtaaggattaaatgagataatgttttttaaatttagaatgtagtaatttttgtttgtgttagttattatagttgtttcgttttaatgtaatttttttatttttgtttgaatttgtagggaatttatgtaggattttatatttgtcgagaggttatgttagtgtgtttaaattttaattatggggtttaattttgcggttgtgtcgtagtatttttaagttattaagtttggttttggtttaatatcgtgaattttaggtagatataagatatttttttgtagttattttagagaaaatgtagtttataatttattaggtagtagtaaatattttagaattagtattaagtttttttttatggaagtaaatatgttattttgatatatttattattcgaagaagtaaaagtagatacgtttttatagaaggtaaaaaaaaaaaaatttggttaagtgaattaaaaaatgtattattttttgtttttttttatagtatttataaatatgttgaggtcgtttatttggttagatgggttttgagattttgttgaaataagagatgtttttatttatattttttttaaattttattataaattatattcgggagggaaaagaaaaagtcgttacgtaagtttgtttatttttaagtgattgggaagtggaaatttatttataagtgatgatttattattgtaggtttataaaagtaaaggtaatttttgcggaaagataatagtttttaggtattattatttaagatgtttttaggggttttggttgtttttttttttttgagttggatttattgtcgggttttgtttttttttagtggtggtgatgaagatgatttgtttgaggaagatttttaggtttgtagaggtagagtattttgttaattttgatgatgcggttggtatattttagaaatgttttttttttttaaacgtagtttattttggtgttttttttagt

SEQ ID NO: 1240 - DNA, 5218 bp, Artificial Sequence
  chemically treated genomic DNA (Homo sapiens)
gttagaaaagatattaaaatgaattgcgtttaaaagagaaggatatttttgagatgtattaatcgtattattaggattggtaagatattttatttttgtaaatttggaggttttttttagataaattatttttattattattattgggaaggggtagggttcgataatgagtttagtttaagaagaggaaggtagttaggatttttggaagtattttgaatggtgatgtttgggggttgttgttttttcgtagagattatttttatttttataggtttgtaatggtgagttattatttatggataggtttttattttttagttatttgaaggtaaataagtttacgtggcgatttttttttttttttttcgagtgtggtttgtggtagaatttgaggggaatataaatgagagtattttttgttttagtagggttttaaaatttatttggttaaataaacggttttagtatatttatggatattgtgggaagaagtagagagtagtatattttttaatttatttagttaaatttttttttttttgttttttgtaagaacgtatttatttttgttttttcgaataataagtgtattaagatggtatgtttatttttataaagagaaatttagtattgattttagaatgtttattattgtttggtaaattataaattgtattttttttagaataattatagagagatgttttgtgtttatttgaagtttacgatattggattaaaattaagtttgatgatttggaggtgttacggtataatcgtaggattgagttttatggttggaatttaaatatattggtatgatttttcgataaatatggagttttgtataaattttttatagatttagatagaggtagaagaattatattggaacggaataattgtaatggttagtataaatagggattattgtattttaggtttaaaaggtattattttatttaatttttataatagttatataggtgttgttagaaagtttgttttttattttatatatgaataatttgatatattgagaagttaaatatttgtatacggttatatagtttataaatgatattaggatttgaatttaggttaataatttaaaatttaatgtttttgattatcgtttttgtttaattatgatttttattttttttatttttagatatttttttaaaagttgagttgtttggtttttatattttagggagtgtttaagaaaattagggttgtagtaggttaattttaagttttttaatttttaagtttgaataatagaagtaattttggtttaattattaggaaaatagttttaggggtttttattttattattttttttagaatattatatatttagtatcgtgaaattaaagtgttatttttggttttttgtagaagtaaatgggtagagtaatataggttatgatttttggatttattggatttttttaaataaatgattggaaatgtaggttaatttgagtgattaagagttagaaagaaaatgttgtttaggttaggaatatagtaagataaagagaaggagtatgaatatagttttagggtgagtacgaaatgggtattttaatatatgagtaaaattttataatttagagtagttagtgttttagagaaaaattagaaaagtttataatatgtatgtgattatttgagggaaatttattatatgtttttatttaaataaaatatagttaaatatatttttttaaatagattgtttttagtgagtttaagattagattggtgtttaattaggaatgtaaagtaataatttatttaagttgtttttatgtattataatatttaattttgagattaagtgaaaaattatttaaaaaagtttgatttatcgattaagtttataaaagttagtttattagaaagtatttgtttttataaataaatttttataatatattaaaattttattagataagaagtgtttaagaagttggaaaataaataatattttattaaatatttgaaagtggagaaaaagaattaaataggttaattgtttttatagatttttatatatttgtagaaatgttattattttaaattagaagaaaagaagtttttttatttattaatttaatgaatatattaattgagtattaattatataggatattatgttagtgtttatggaaatgaaatgaaggttaaaatgagggtttttttttgaggattattataatattattttttttattaaaaaaaatatttttaataataaatgaaaataaatatatgttattattttttaattttaaaaataaagtttattattaaataattttagtattttattagttttttattttatttaagaatataattagcgtaaaagaaaaaatatagaaaggttaatgagaatatattattatatgttttgtagtttttttaagtagaaataaataaaaatttttttaaagattaaaatatattaatttattaagaaaataattagattgttcgtttatagaatattgtttagggaaaagtgtttttagatggtgatagggatgtgttattatattataatgtgttggtaaattgtttgttaacgtaagtttttatattaggttgttaattgttaaagttaagttttttggttattattgtgaaatgatttgtggttttagatgttatttttaatataatagggttgagttggtatttaaaaatggttttaataagtttattaaattattgggaaatttgaaaatttgtagaatgaataaataaaattggattaaattagaattatgtatttattgttgatttagatattagtaatatgggattttttaaaatataggttattattagtttttaagtttaaaacgttatttaaataggaacgaaaaatgtttatgaatagttagatattaaattatagaggggttttagattaggaataatatgaataattggttatttgagttagattaaaattatgaaaaatttttaagtaaaagaacgattaagattaagattttggttttagtttagagtatagtaaaaatttattgtcgatgatatttagcggtgtgtttatttttttaaaatgtaagtgatttgattttgtaagtgtacgaagtaataattttttgtaaatattttttgatggttgtttagttttatttttcgattttttttttttttttataattttatgagttgggtttatatggttttaaaaaggagaattagttgggtatagggtatgtttatagttttagttatttaggaggttgaggttggaggattgtttgagtttaggggtgaagtttgaggatagtttagggtagatagggaggcgttattaaaaaaaaaaaaaaaggaaagttagattttttttaaatttgaatttaaatattatttttgtgtagttatggtattatttataggtgtggaataaaataaagaagagtttattttatatgttgtggttataaagtaaaggttgagtaatttaggaggttatttatttttaatatttgaatgatatgttttttagagatgttatatttatattgggttgatttataaaagttattaaaagaatttataagaagtaaaataaattatttttggtttttattggagtataatatttgaaagttaagttttaattttttgggttttttttttaaagaattttatttttttgtgtgtttggttgaaaaagagtggttattgaatgtttattttggttagatttaattaaatattttaagagaaaataattgggaatagaatatatattttagtttaattttttttaaatgtttttgaaaaaggaaaaatttagattgtttggtagtgaataatagaaataaaaataagttaggaaaatggagaaatgttttagtggttttaataataagtaattttattatatttaaagatttttaatgtttaaataatgaggtaaaggtttatttttaaataatttagttttattttgttattttaatttattaaagtggaagttattatatattttttaaaaagtagattatttgataaaaagtaatatataaaaatagaatgtaatgttattatataatgtttgggaaataaaattttttttagaagaaaaaaattatgtaatattttaagatttttgagataatttgtttttatatatatatatatatatattatatatatatatatatagtatgtgtgtgtgtatatatattttttattttataatggagttatatttaaataaatttattataaattgaaaatattataagttaaaaatgtatttgatttaattaatttattaaatattattgtttaatttagattattttaaatgtgtacggaatatttatattagtttaaaattgggtaagattatttaatataaagtttattttataataaagttattataaagaattttgaattaaaatttaaaatttgaagtatagtttttatttaatgtatatattttgtgtattattgtaaagttaaaaaattataagttgaagtattatgttgtaatggaatgtaagtttagtcgtttattgtttgtagagtttaattaaaaggagcgaggtttggtagaaagaaagtgattatattttagagttagttgaggggaggtagtataggtttttgttttgagggtagtattttagtttttaggtagaagataggggtttttaaaaggagggtttgatatgaatggtatgtaggggaggaaataatgaggtgtgggggtttatatgatttgttttgtgatttgtttcgggtgtcgtatttattgggtggtttggttggagttatcgtaggtagaggtaagttgtaagttgaagtaattttttggtggaagagagttttagagatttgatttgttttaaggttttttttgtggaatttttaagtaaatatattgttagataattttgttgtgtttggtggagagaaggtaaaggttataattgtattgttaaaaagttaagtaaaaggggtaggggtacggtgatttatttttgttttttagtattttgggaggtcgaagcgggtagattatttgaggttaggagttttagattagtttggttaatgtggtgaaatttcgtttttattaaaaatgtaaaaattagttggttatggtggtagatgtttgtaattttagttattcgggaggttgaggta

SEQ ID NO: 1241 - DNA, 16170 bp, Artificial Sequence
  chemically treated genomic DNA (Homo sapiens)
gtggttgaaagttaggtttttaatgtattgtgatttttggtttttttagtagtttttttagagaggtagaggggttttttatagttcgggtttttttgttgttttttgtttgttgtagttgtaggtattttgaggggtaacgtggaggaagggttagggatgtatgggattttaattgttttattatatttttttcgtggtaaagaaatagttagttttttttaggtgttttttggatttttggtgatggatagagaaatttttttatagttttaaattatgtttaataaataaaaattgtattttttattttggattttttttggattatttgtatttaatttagtgaaaagatgattgttatttttttttattttgtttagttgtgttttatagtttgggaggatttttggaagtttttgttgtgatttttaagatggtttcgagaggtattaatgatgttttagtaaaataagggtagggaggggttatttagtttgttaggtgtatatatagagtttttatataggatatttagtttggagttaggtggtaggggttattatttttattttttatttatataggtagatattgaagttttatattgttgtgatattgagtattttttagaattttttcgtgttttttttttagtattttttgaaaggtaaatagggtgggaatgtttagttttttgttataagaataggttaagtgatttgtttgtatgagaaatagggtcgtatttagttttaattttaggttttgtgttggggtggttttgatttagttttgtatattatttcgtggttaggtttggtatttgggtggggatatagggttttagggaaaggtgtggggagaggggtttgttgtttaggtttttatggtggtttttgtaattttattttttttgaaaggggtagttttttagttattgtattgaaagatataggtatattttgtgttttgtttttgttttttatcgtattgatttgttgatttcgatttattattagtttggtttttttggagaggaggaggatgtcgggtatattttttggtttgtaagtaatatggtaatttcggttgtgtagtttgtatttaattgatatttgttttgtgttaggttttgaattgggtatttggtgaattagattaggtttattttttgggtgtttatagtagggttgagtaggtagggagtatagagaagaatttttatttttaatatggtatttttttagatttgggtattggtttttattgggaggggggtaggtgtgaggtagggtttttattaataagtttaggaagagggattgggttatttttttgggggaggatgtggttggggagtttgtttgtgttgaggatggaatttgagtgtagtaattttgagaaatgggttaagattaataattggttttttaatggagaatggaaggtggtaatggaggaaggaagtaggagtttcgttgagggggaggggtgggtaggttgggtttgaggaggaggttggcggtaggagtttggcgggtatttagatattgagtgtgtttttggagtagagtaagttcgttgagcgagcgttttcgttgatagtgtagaagtagtcggggtttttttataataggagattttttataagaggagaaatatgggagataattttggagatagagggaagattagagaaggttgcggttttttttagggaggttggtttaaagaaatgtttttgatgaggattttatcgtattagggagagtataaaattaatatatttggtttcggtgtttttagatgtttttcgtagggtagggaaattattttacgtttgtttggttgatttttatttggtattttttagcgtttttttagattattttagttttgtttttaagggagagggaaattattttggtttgtttgtttattttttgttttggtacgaagagttttaaggtttgttttatttttgatggtgggtcgggtgggtgtatcgttcgaggggtttttggaggggagagttgggggagggggtgttttgggtttagttttattttatagttatttttttttattgaataggagattttttttacgattttagaattttttttttgtaaatgaggaaataaatttaaagaggggaataatttgttcggattgtttagtaaattatagttgaggtaaaaatttagggatttggtttttgatttagagttttttataattttttatattatatcgggatttttaaatgaaattgttttgaaatattatgtttgggtttttatttaaaagattaagaaaaaaaaggtgtgtggtggtgggcgggggtgttagggtatagatgaaacggtattggtaaaatatggataaggtttaaagttatttgatggaagggttgtagtttatatattttagttttattgattagttttttcgggttttgggtgttgtttagatttagtagaaatttagttattttgggttggatgtagatgtaaatttattttggatttttaaagtatttataggagttagaattaataattgggagttttaagatttggttataggggatgttatttttttaaggtaggattggattttaagagaggaatttttaatagagagaaaattattagatttgatcgatttaggttttaaagaacgttgttttatttatttttgggttttttttattaatagttagttttttaaattttaattttttttttttttttttttgagatagtgtttcgttttgatagtcgggttgaagggtagcggtatgattatagtttattgtatttttaattttttgggtttaagtgatttttttaatttagttttttaagtagttgggtttatagacgtatattattatatttggttaatttttgtattttttgtatagatggggttttgttatgttgtttaggttggttttgaatttttgggttaaagtaatttttttatttcggttttttaaagtgttgggattataggtttgagttattttatttagttttaaattttttaaaattggttaatcgggattaaatattatgaaagagtgcgacgtggtcggttaaataaggataatttcgttgttcgtgtttgaagattattgtatattttttaaaagtaaatttcgaagtggagaatttagaaattaattttttagatgaaggattttatagagaagtgagttcgtggaaatgatagaatcgttcggtttttttttttaaatttcgattttttttttttaaggatattttacgagggtttaaacgcgttttttttaaggtattttgttaggttttttgatttttagttttcgggaggtgaggtcggttagggtgtttcgagggtttgttttagagaaaatcgtttttaggtgaggacggtttttattttcgggtttgaagataaggaatagtttattttcggttttcgtttttttgtttgtaatttttatttattgattacgtcggttagttcgtcgcgttagggttgtttttggtttggttttcgggtttcggtggattttcgattcgggttttttagttttggttttttgtatttatttcgtttcgattttaagttgttttcggaatagaatgaaatttagttcgttaagtttcgcggggaggtgtgtttattcgtttcgcgtcgatttcggtcgtattgtcgtattttattcgtattagttagtggttaaagtgtttgggtatttattgcgttaggttaggagtcggaagttttatttcgtttttattttaattttttgttttacgttttcgataagaatatggaggttcggagagattaatttgtttacgtgtaagcggtagttaaggggcggacgcggaatttgaatcgtgttttttttaaatttgttttttgttcgtcgtaacgcgttttcgacgcgtataaaatttttattttgttattgaggaaagttatttaatggttagagatattttgcggtttttgaaaagaggttttaggttgataaatatttatatatatatatatatttatatttaagtttaaaacgattttttgattttttttttaagatttttttttcgttcgtttaggtttcggtattttttattaggtatgagaaggaggagtttttattttttttaggcggggagattacgttttttttgtttttttttttcgcggggggtcgcgttggaggttattttcgttttttaggcgttgggttgggagtgacgcggggtgggttggagaggttttttgtcgtttgggaagcgtaaacggatcgtttatttgtcgggtttcggtcgttcgtatttgtttgtgagaagtttgcggttggggtatcgttttcggttttcgttcgggttcgcgtattgggagtatattggttttttaagagcgcggcggtcgcggcgcgcggggaggagggttgggagcgttcggagtcgcgttgaattcgtcggggacgtcgggcgttcgttttttggttggttcgtttgttttttcgttcgttttttcgggtcggttttttgcgttttttttcgggattgtttggggattcgggttcggtcgggcgcggcggcgagtagaattttcgtgtaggaggcgcgcgtttcgggtagcgttcggtttcgggtatggatagagggagttgggcgcgtagggagcgtcgcgggatcgggcggtcggagcgttgagttagataaaggtttcggagttgcgtttgttttcgggagtcgggttttaggcgttgggcgtcgaggttgcggaatttcgtcgggggtagtttcggtcggttttttttttcgtcggttggtttcgagttttcggatttgttttgttcgttttttttcgggtttgggaatttgtcgaggcgatttaggcggtttcggcggggatcgggagttcgaggttcgcggcgcgtttgtcgggttaggagttagggagcgtcgtaagtttttaaggcgcgtgcgaggattcggcgtgtagtgtttcgagttgggttgggcgtcgagagtatgggtagcgattcgagcgcgttcggacggtcgggttggacgggtagttttttcggcgatcgggaggaggcggcgcggtcgcgattgttgtcgttgtttttggtgtttttgggttgtttgggttttggcgtagcggtcgaagacgcggaggtttatgtcgaggtaagattttcgttttgttttttggttgcgggttgggggtttggagggagaggcgttacgttcgtaggttgggatttggaggtggagggagcggagacgcgttttttgttttgggtcgtggcggggaagtaagcggatttggtagtttgtttttttttagttcgttttttgtagcgtattttttcgtaaatttttgagggcgtagggtttcgttttttttttcgttatttttatagttttgttttgggtattgagtttttatttcgatttttttatatttagtttgtgtttcgggagtcgttttcgtcgtttttagtttttgttttttttttttttttttttttagggtagtcgatttttcgagagttcggttggcgcgtagtggcgttttttgcgagtggggagggggttgttttcggggatagttataggcggagtaagagttgggcggttgggtaattgcgtttttgtttaggtggtttttcgtttgggtgatatcgagtcgcgtacggcgggttaggatggaggcggggggatgggtgtaaacggttgaggtagcggattcgggttgcgggggcgttttggcgattttttgcgtttttgcgaggaagtttaggtacgttcgggcggggttttaaggacggattttgttttttatagcgtttttttttaatagcgtttttacgtcgaagttttggattcgagagggtggatttcgcgttttttttcgttaggagttcgtttggcgtttttttcggggtttcgttttggatgggtttcgcgggtgattaggcgcgatatttcggcgtagagtcgagtttagttagcgttttagttttatggtgtttttcgagcgaggatatcgaaggcgttagtttttttgttttagagtaagagtagggtttattttttttcgatttttaagatttgcgttttgttttagataggcggggagaggatttgggcggggagtagggagaaagaattatttcggagtcgtttttgaacggtgtttaggttttggtgtttttgggttgttcgggttgcgggtttgagcgtcgtttttatttgtagtttagttggtgttttttttttggtttacggcggtttttttattttttcgggttgtttgggagattttttcgatggaagtttgttttttttcgttttattttaataaaagtatagaggaagggtagggaattttttttgggttcgagttatattttttagttatttttttatttgttttgttttttttttttggtttggttagggagagttgaaggaggagttaggttttggtgggaggtaggataggagtttcgtttcgatttagtttggttatttttttttattttatttatataggtaggaggagttttagggggtttttgttggtgaggattattttttagtttgtgatttaagtattgggcggagagtgttatttgggtttatttgttattttgggttggagtgttaaagaattttaagttatagttttattattgagtttttaatttatttagggatggcgttaatatataggaagtagtgatggaatttaatggtcgtgtattgttaatggtattttagttggttaggagtttaggggtgtagggatttgtagttggaggggttttatttttttttttttttgtttttttagttttattttatttttattttaattttttagtttagggagtgtttatagttcgatgtcgttagggaagaagttatggttgcgttattataaatcgtgtttttgatttggaggttgtgattgttttggagttttatttttggggaaatatttgggttggatttgggtagtgattggaagagatttcggaaggtttaaggagttttgaatgttggtagttatgtagatagagggttagagataggtggagtgttttagtttttatagttggttttgggtataggttgtttttagggttttattaggtttggttatatgtgggtttaaagagttaaatggttttagtagttagtttatttgtcgggggttgtggttttagatttttgggtttggtttatattttgtgttgagttttttttttttggagaaggttggtttttttatttttattttagtatttatatagttttaggtttttagtagggttatagttgggattttttcggagtagtttggtagttgagttaaggttagtttttttttattttttttttttttttttagggtggaagttataggatttttacgaggttgagatattaaggagtttggtatgtgttaggaattgataaatatttgtaatttgttaggttttagtttattattgagttgttacgttttattttatatttttttttggatgtttaattttagtttgtagttatttcgggttagatttttatttggttgaggtgtttattgttgtttttgttttgtagggttgagagtttttaggtttatcgggggagtttttattttatttgtttttttttattttttttttttaggtataatttaggtttttagtttgttttgtggaggtgatttaggttgttagagtttataggggtggtgttattattattaaaatcgatttattcgtttttttttaataggtttacgagtatttttttagtttttatttagttattgagtagatgaggtagcgggggtgggggcgttgggagggggttagcgtgaattattattttgatttttaggtgagttatagttttgggttttattagttttagtttatattagtatttttatgttggtttcgggggggttttattggtttttttttttttttaaatagagtaaaattatagatgttatttgtgtttattagttaagaaaagggagttaatagcggggttttgttattgggaatttgtagaagttgaattttttttttttttttttttgtttttgttttttattttgtttttttgttagtagtaaattatttttttttatgttttgttaagatttagagagaattggtttgattggtatagttagggatttagattttattgggttatgttttttatatttagtttttgttatgttttcgagttggggttgtttttgggtttagttagttatttgtttttttgtagagaatagtttagtgtaagttttttgtttgagtagtgtattggtttgatttttttattgtgatttttgaatataaatattttttttgttttattttaagggatgttgatatttaaaagatatttatgaatgtggagaggagtaatatggaaatatacgttatttttatttttaaaagaagattttttttaaaagtttagtgtttattgttattttttatgtttatttaggatggttatattgtaggcgtggaaaagtttttttttgtcgagcggtttgttttgttgtttttttgtggtttttttgttgtttggtttagatgattttttttattattatttttgttttgttgggagtttgatttttgttttaggttagttgtggtggttattatgagaattattattttttagattaaattagaatgggtattttttatattattttaaggtttaggtggttttttgttttggatattttagtaggagtaatgttttggttttggagatgtgttttttgagttagtaaagatagagaggggttgtggattttgtttttattttttttttttataaagcgggttttgggagaagtttattattgagtgtgaggatcgggattttgaaggcggttgaatgttttagatttgagatatagtaggtattatttggttggatagttttgagtgacggtttagatagggttgttttatagttagatataggttttagggatttttgagattagaggttatggagttgggtttggattttagaggtaaagagggatgttttttttttaattttatggttttcgtgggaatggaagaaaaagtgggaagagatttaatttagtttttagtattaggataggtggataagtttttggtattagttattagttagtttttggagatgttttttattttgttgttatcggtcgatggtgatgtaggttaaggtttagattatttttttagggtattggtattggtattgttttgttttttttttaggagtgattgttattttgtaggggtgagagtttagttttacgtttagcgtttttgagtatggtatttgatatatagtgtataatacggtggtttatattttgtgtttagagtttttttggtaaaatagtgtaaaatagtgatagaagcgaatggtatttattgttgggtaagttattgaatttgtatgaattttaagatttttataaaaagggaatagtaatggtttatttgtttgatggagttacggggagatttattgtatttatgtgtaaaatattaaacgttatgtataatgtttggtatagggggtttaaggaggcgtaggtgttatttttgagtatttttaatatatttgtgtttgttgtggatatagattagggatgttttgtaagcgtttttatatttaatttttgtattaattttttaagtgtagatgttgttattatttaatttataaaagaggaaattaatattgtgagttgagagaaatgattttcgtattttatagttagggagtggtagagtttggatttgaatttagtttagtttggtttggagtttaagtttttaatttttatgcggggttgaaggttataggttagagtttagggtgttattttgtggaaattttattaggtagaattttgttgggttcgatttaggtgggaaagaggtttttgaggtggagttagggttgtttgagttgtgtgagttaaaagttttttttcggtttatttagttttgtttttatttgtttagttatttaagttttgttttgtggatagtttcgtttaggagttagtatttgtagggaggtttttaggtgaggatttaaggtcgggtttttagttaggttcgaaatttttggttaatagaggtttttttatttcgcgcgttggttagggaattcggttgtttttttttttaagttaaggagtgtggggtaggttggaaggttgttgggtaaagaagtggttagattttaagacgttttttttttttttgttttttttgttggatttttttattatttagagttttagtttttatttgtaattcgtttaaagatttatgggagggagtagatttaattttagattaagtatgtgtgttttagaattgttgaaatgtggaatatgttgtttttaaaggtagtgagtaattttttaaggaggatttggttcgatgtcgtttttttttttttttttttttttttttttttttgagatagagtttcgtttttgtggtttaggttggagtgtagtggcgtgatttcggtttattgtaattttcgttttttaggtttaggtaatttttttgttttagttttttaagtagttgggattataggcgttgttattatatttggttaattttttgtatttttagtagagatagggttttattgtgttagttagattgttttagttttttgatttcgtgatttgttcgtttcggttttttaaagtgttggaattataggcgtgagttgttatgttttgtttatgttatttttttttattggttttgggggtagttgcgttatcggcgtttttaacgttgtttggtgggtcggagtgatgattttggttttattttgtagaggagggaattaaggtttagaaaagttattttagtcgtttttcgttgttgggaggtttgttgtgtggattagtagttaggattaaggggtagtttttcgggggttgattttcgtttagtttgaggaagagttaatagtttttgttgtttagagagagaatggggggttttgagtggtagtgagcgttttttgtttgtaggatataggttgatgagtttttggttagttgtagttcgtagaggtttggcgggtggttgggtttggtggtattggggttatttagttggtgaatggatttttggtttaggttcgttgatttaggtgggttttgtgggtttggagtgtgtattttgttttttgtaagttttttggtttttttaggatttattttatttagtataggttttgtgtttagtggttgggagtatagagttgggtatagttttggtttgttttttagagttttttatattaagattatagggtaggggagatgggtatggtaaggattttataaggttataaaaggttcgggggttggatttatcgttggtagttttgataaggttttttttgtgtttggttgggtaattttgtttgggtttgtttagattgtagatagaatttgggtgatagagataaagtagagtttagtggaaagtgtttttatcgtttggggtttgataagggtttcggggagggggttgtcggttagttttatagatttgagtgttggaggagttggaagggtcggttggggcggttgtagtagacgtttgtttttttttttattttatttttatttttttatcgtggcggttgtttattgtatagtattgatttagtggttttttatattaatttttttagtagttagtgggggagggtggattgagatggtttagcgtttagattcggtcggagatgtcgggtgtggggaggattaggtattttttttcgtgttgtgttgggtattgtttttgagaaaggtttagtgtttttagtttgaggttaagaggagttggtgatattttagaagtagtttggttcgatagttttagttttagtttagattagttttgggattttgggtgaggtatttattatttttgaattttgtcgtttgtattatgggaatggttataaatttattttttaggagtggttgtgagtatttagtgggggttggaatgggtggttggtttatgttagatttaggtgttgcggttatgattttttttgtgtgttaggggttaggaattatttttttgatttttggtggtttatatttttttgttatttatttgaagtgttaataaatacgaatgggatggggtttggaagttaagaaagaaattggttaggcgtggtggtttcgtttgtaattttagtaatttgggaggttaaggtaggcggattatttgaggttagtagttcgagattagtttggttattatagtgaaattgtgtttttattaaaaatagaaaaattagttgggtatggtggtatatgtttgtagttttagttatttaggaggttgaggtagaagaatcgtttgaatttaggaggtagaagttgtagtgaatcgagattatgttattgtattttattttgggtgatagagcgagatttcgttttaaaaaaagaaaagaaatggttgagagaattatagtggtaggtgttttttatagtagtttatattcgaagttgtagaagggaggggtttttatggttttagagtttttttttttttttattggatagtggttttggtggtagaagaaattaagttttgttttaaattttgtcgtattttgttatttataagattttttgagttttagtttttttatttgagaagtaaagttttattcgtttggtttattttatttgtgattttaggtgataggaagagattttttgtattagggatagtttttatagttattaggaggagtagtaagggtttgaatattgggattgcgagttatgatttagggatttatttgcgttttttgtttagtggtagtagagtagtttagtaagttttttacgttgtttatttgtaggtagtagtatttttggttttattttcgcgttttcgttttttgttgtttttttttttttgtgtttttttgagtttgttttatttagtgtggtaggaaggtgttaggaaatttttttttggattttggggaaaggaggaagtttatagttttatgggtggtattgttgttattcgggtagatttttgggtatttggcgtttagttattttgagtatatttttatcggttaggtacgttttgttagtttcgttttgttatttagaggtttgagtggtttgcgttaaggtcgtgtttttgtttattattttttagtttttttaattattgtttaaggggtgtttttatttttagtttttggttttttattttaggtggttgagggtttaagtttggttgatagcgagatggaagtttttgatttttttggaatttaatattgtttttttgtgtggagggtttatagtgtttttgggatttttttggtagtttttgagttggtttcggggttgaaggggtttttttgtcggtttttggagttttttattgtagataggttagtttttttgtttttttttttagggttttagtttgatttttttttattttttttttttgtcgtttcgtagatatcgttaattagtttttttatggtttatgattgcgtttttagagatatttttattttatgtaaataggtgatgtagaggtgtttttatttgtcggtagttagtttttcgttattttttcggtttttagttgtattttttttgtcgttagagttggttgagtattatggtttcgttttttagatttttttaagtatttttagggaaattgttttttaaggatggtggatttgttgttttatattttttagtataggagttttgggagaggtttttcgtgtttgggaagaatagggagggtatttacgatattgttagtattttattgagttgtgggaatgcgttttgggttagaggtgaggagtgttagtggaggggttttaggggttttttgtttttttttattttggggttttggtggagtttggtttattattagttttgggaagtttagatttattagtttttttggttaatgatgggttaaggaggtcgaaggttgtttgttttagggataattatataggtttttggtttttgttatttgtacgtttgtcgagtattatttgttgtatagggtggtgttaggtattagtatgtattttacgatttttttttataggaatttaggagatgaggtaggttttggtgtaattttttttttattgatgatcgatagagataaggaggtggagtgatatttcggaaatagttaagttagggtttgtttagttttatttgtttttagagttggtggtggttttttagttttgtatttttattttattgttttggggttgtttttcgggttttgagaggttttaaagttgtggttgcgtatttagtttgcgattttggtagtttttttatgttgtttttttttgggttagtagttgtttcgtttattggtagtttgggtattattgagttggtttgtttagttatattagggatttggtcgggtgttagggttgggttggtggatggtattagaaagtaggtgtttgaggtattagatgtaatattggtggtaggtagatatgtgagtgtgatttggtcggttaatatggttgttagtttaaagtaattatcgtgtttagttattgttttgttgtttgggttttcggggtgtagtttttattttttagagtatttagagtgttagttttaagggttttttattttggagatttttagagatttagataagttagatatagatatttgtagtgtttaaggtttagggtagtttttggtttttgtttattgttttttatggcggttatcgtgtttttgagggtttgaggatatgaagtaggtagggtagaattttttttttattatagttcggtttgtttttgttttttggtttggtcgtgtaatttgtggggtgtgggttttttgttttgtaggtgtgttgggttttttagggagattgtaagtttttgaaggttaggatgttttagtttagtttttttatggtttttagttggtatagagggtgttgagaaatatttggtagggtgggtggtggatggatgagaagatttgttaagtaagttttagaaagggaagggtatatttattgtgtattagttttttttaaggttgttttttttaaattttattttttagtagtttatggttttttattttataggtgaggaagttggggtttagggagaataaagagtttgtagtagagtagggattgggttttaggtttttgttttgtttttgagtttggatgggtatttgtatttgtttattttttttaggagatttaaggtttttggggagtagtgttaaagagtaaggttttaagaggttttgaatttttttgggtttttggtttggtaggggtttattttagaggggttagtgtagttgttagttattgtggatatagtttttgttttaatgggggaagataaatagtaaatatttaattgaaatgtatagtgtattagatgggtgataagtatgggaggaaggagggggtgtagggtatagttgatggggtttttttaacgtgttagagaagattttttagataaggtggtattgaaatagcgatttgaagaaaatgaggatgaaagttttttagttgtttggcgggagagtgtattaggtagtagaggtaggaagtgtaaaggttttgcggtaggagtatgttcggttggggtggatggtggtgaggtttagttaaggtggggtgatagtgagggttttgtggtttttgtataaatggttttttttttgtaatgggaaatttttagagggttttaagtagaggattgattagatttgatttggtttttgttttggtttttatgtgaggagagatgatagggaggagggtgttgaggtttatacggttatttgggtaggaggtgatgacggtttagatagagtagcggtggtggaggtggtgggaagtggtcggtataggttgtgtatgtttggaggtagtagtgttaggatttgttgatagagttgcggtttttttgtaga

SEQ ID NO: 1242 - DNA, 16170 bp, Artificial Sequence
  chemically treated genomic DNA (Homo sapiens)
tttgtaaagaagtcgtaattttgttagtaggttttggtattgttatttttaaatatgtatagtttgtgtcgattattttttattatttttattatcgttgttttatttgagtcgttattattttttgtttaggtgatcgtgtgagttttagtatttttttttttgttatttttttttatataagagttagaataaaggttaggttaggtttggttaattttttgtttagaattttttgaagattttttattgtaaaggaaaagttatttgtataagagttataaggtttttattgttattttattttagttggattttattattatttattttagtcgggtatgtttttgtcgtagggtttttgtattttttgtttttgttgtttgatgtattttttcgttagataattgagaggtttttatttttattttttttaggtcgttgttttaatattattttatttaagaggttttttttgatacgttaaaaaggttttattagttatattttgtattttttttttttttttatgtttattatttatttgatgtattgtatattttaattaggtgtttgttatttgtttttttttattaggatagaagttgtgtttatagtagttgataattgtattagtttttttggggtgggtttttattaggttaaggatttaaaaggatttaggattttttgaggttttattttttggtattgttttttaaagattttaaattttttggaaggagtagatagatgtaggtatttatttaggtttaagggtaggatagaagtttgaagtttagtttttgttttgttataaattttttattttttttgggttttagtttttttatttatagaatggggaattatgggttgttgaggggtgaggtttgaggaaaatagttttggaaaaagttggtatataatgggtgtgtttttttttttttagggtttgtttggtaagtttttttatttatttattatttattttgttagatgttttttaatattttttgtgttagttgggggttatgggaggattaggttgaggtattttggtttttaggaatttatagtttttttgggagatttaatatatttataaaataaggaatttatattttataggttgtacggttaagttagagggtagagataggtcgagttgtggtagagaggggattttgttttgtttgttttatgtttttaagtttttaagagtacggtgatcgttatgggaggtagtgagtagaggttaggggttgttttggattttggatattgtaagtgtttgtgtttgatttgtttgggtttttgggggtttttagagtgagaagtttttaaggttggtattttgagtgttttgggaggtgagggttgtatttcgagggtttaggtagtagggtagtagttggatacggtggttgttttaggttgatagttatattggtcggttagattatatttatatatttgtttgttattagtgttatatttaatattttaggtatttgttttttggtattatttattagtttagttttggtattcggttaggtttttggtgtggttgggtaggttagtttagtggtatttaggttgttaatagacggagtagttgttgatttaaggaggggtagtatggagaagttgttagggtcgtagattggatgcgtagttatagttttgaggttttttaggattcgggaaatagttttagagtaatgaggtggaaatgtagagttgagaaattattattagttttggggataggtggagttaggtagattttggtttggttattttcgaggtgttattttatttttttatttttgtcggttattagtaaaagggggattgtattaggatttgttttattttttgggtttttgtgaggaggaatcgtaaagtgtatgttagtgtttgatattattttgtgtagtagatggtgttcgataaacgtgtaaatgatagagattagaggtttgtgtggttgtttttggggtaggtagttttcggtttttttgatttattattgattaagaaggttgatgggtttggattttttaagattggtgatgggttaggttttattaggattttagagtggagggaggtaggaggtttttagggtttttttattagtattttttatttttggtttagggcgtatttttatagtttaataagatattggtaatgtcgtgggtattttttttgttttttttaagtacgggaaattttttttaaggtttttgtgttggaaggtgtggagtagtagatttattatttttaaaggatagtttttttgaaggtgtttagggagatttagaaggcgaggttatgatgtttagttagttttaacggtaaagggaatgtagttggaggtcgggggagtggcgggggattggttgtcggtagatgagggtatttttatattatttatttgtataaggtaaaaatatttttgggagcgtaattatgggttatggaggggttgattagcggtatttgcggagcgataggaggggagggtgggggaggattaggttggggttttggggaggaaagtaagggagttggtttgtttgtagtgaagagttttagagatcggtagaggggtttttttaatttcggggttagtttaggggttgttaggagggttttaagggtattatggattttttatatagagaaatagtattgagttttagggaagttaagagtttttatttcgttattagttaagtttgaatttttagttatttggggtgaagagttagaggttgaggatgggggtattttttgggtagtgattggggaagttggggggtggtaggtagaaatacggttttggcgtagattatttaaatttttggataataaggcgaagttggtagagcgtgtttgatcggtgaaagtgtgtttagggtgattgaacgttaagtgtttaaaaatttgttcgggtggtagtaatattatttataggattgtgagtttttttttttttttagggtttaggaagaagttttttggtatttttttgttatattaagtgggataagtttaggggaatataggagggaagagatagtagggggcggggacgcgggggtggggttagaggtgttgttgtttgtaggtgggtagcgtggggagtttgttgaattgttttgttgttattgggtaaaaggcgtagatgagtttttaggttatgattcgtaattttagtgtttaagtttttgttgttttttttggtgattgtaaaaattgtttttaatataaggaatttttttttgttatttagagttataggtggggtgagttaagcgggtgaagttttgttttttaagtgaggaaattgaggtttagaaagttttgtaagtggtagagtacggtagaatttgaagtaggatttggttttttttgttattaaggttattgtttaatgggagggaaggagagttttggggttatgagggttttttttttttgtagtttcgggtgtgggttgttgtggggggtatttgttattgtggtttttttagttattttttttttttttttgagacggagtttcgttttgttatttaggatggagtgtagtggtatgatttcggtttattgtaatttttgttttttgagtttaagcgatttttttgttttagttttttgagtagttgggattgtaggtatgtgttattatgtttagttaatttttttatttttggtagagatatagttttattatggtggttaggttggtttcgaattattgattttaggtgattcgtttgttttggttttttaaattgttgggattataggcggagttattacgtttggttaattttttttttgatttttagattttattttattcgtatttattgatattttaggtaagtggtaaggagatatgggttattaggagttagaagggtggtttttggtttttggtatataggagaggttataatcgtagtatttgagtttggtatgggttagttatttattttagtttttattgaatgtttatagttatttttgaagggtagatttgtgattatttttataatatagacggtaaggtttagagatagtgagtgttttatttagggttttagagttgatttgggttggagttggggttatcggattaggttgtttttgaagtattattagttttttttggttttaggttggggatattggattttttttaggagtagtgtttagtatagtacggggaagggtgtttaattttttttatattcgatattttcggtcgggtttgggcgttgggttattttagtttatttttttttattggttgttgagagggttggtgtaagaagttattagattaatattgtgtagtgagtagtcgttacggtgggggagtgggagtggggtgggggagggggtaagcgtttgttgtagtcgttttagtcggtttttttagtttttttagtatttagatttgtggagttggtcggtagtttttttttcggggtttttattagattttaggcgataaggatattttttattgggttttgttttgtttttgttatttaggttttgtttgtaatttgagtagatttaggtagagttgtttagttaggtataaaagaagttttgttaaggttgttagcgatggatttagttttcggattttttgtggttttgtgaggtttttattatgtttattttttttattttatagttttggtatggagggttttagggagtaggttaaggttgtgtttagttttgtatttttagttattaggtatagagtttgtgttgaatgggatgagttttggaggagttagggagtttgtagaaggtagagtgtatattttaggtttatagggtttatttggattagcggatttgagttaagagtttatttattagttgggtggttttaatattattaagtttagttattcgttaggtttttacggattatagttggttaaaaatttattagtttgtattttgtagatagggggcgtttattgttatttaaggttttttattttttttttggatagtaaggattgttagtttttttttaggttgagcggaagttagttttcggaaggttgttttttggttttgattgttagtttatataataggttttttagtaacggaagacggttaggataatttttttgagttttagtttttttttttgtaaaatagggttaagattattatttcgatttattaagtagcgttgagagcgtcgatggcgtaattatttttaaggttagtaaagaaaggtggtatgggtagggtatggtagtttacgtttataattttagtattttgggaggtcgaggcgggtagattacgaggttaggagattgagataatttggttaatatagtgaaattttgtttttattaaaaatataaaaaattagttaggtgtggtggtagcgtttgtagttttagttatttgggaggttgaagtaggagaattgtttgaatttgggaggcggaggttgtagtgagtcgagattacgttattgtattttagtttgggttataagagcgagattttgttttaaaaaaaaaaaaaaaaaaaaaaaaaaaaaaaggcggtatcgagttaggttttttttggaggattgtttattatttttagaggtagtatgttttatattttagtagttttaggatatatatgtttagtttgggattaaatttgtttttttttatgggtttttaagcgagttgtaggtgggggttgggattttgggtggtggggaagtttagtaggagaagtaggaaggaggaagacgttttgaggtttgattatttttttatttagtagttttttagtttgttttatattttttaatttggaggaaaaaataatcgggttttttggttagcgcgcggggtgaagaggtttttgttagttaggagtttcgggtttggttgggggttcggttttgggtttttatttggaaatttttttgtaggtgttgatttttagacggggttgtttatagggtagagtttgggtggttggatagatgggggtaaggttgggtgggtcgggggagggtttttggtttatatagtttaggtagttttggttttattttagaaattttttttttatttggatcgggtttagtagaattttgtttggtggaatttttataggatggtattttaggttttgatttgtagtttttaatttcgtatgggggttgggaatttgggttttaggttagattgagttgggtttaaatttaagttttgttattttttggttatggaatgcgggggttattttttttaatttatagtattagtttttttttttgtagattgagtaatgatagtatttatatttgaagagttaatataaggattaaatgtgaaaacgtttataaaatatttttagtttgtgtttataatagatataagtatgttgaaggtgtttaaaaataatatttgcgtttttttaggttttttgtgttaggtattgtgtatagcgtttagtgttttgtatataaatgtaatgaattttttcgtaattttattaagtagatagattattgttattttttttttatagagattttgaagtttatatagatttagtgatttgtttaatagtaaatgttattcgtttttgttattgttttgtattattttgttagggaggttttggatatagggtgtaggttatcgtgttgtgtattatgtattaagtgttatgtttagaaacgttgaacgtggagttggatttttatttttatagggtgatagttatttttaggggaaggataaggtagtgttagtgttagtgttttggagaggtgatttagattttggtttgtattattatcggtcgatggtagtaggatggggggtatttttaggggttggttaatggttggtattaggggtttatttatttgttttgatattggaggttgagttgggtttttttttatttttttttttatttttacgagggttatgggattagggaagaggtatttttttttgtttttgggatttaggtttagttttatggtttttggttttaggaatttttggaatttgtgtttgattgtggagtagttttatttgagtcgttatttagagttgtttagttagatggtgtttattgtgttttaggtttggagtatttagtcgtttttagggtttcggtttttatatttaatggtgggttttttttaggattcgttttgtaaaggagaaagataagggtagagtttataatttttttttgtttttgttgatttagaaaatatatttttaggattaaagtattgtttttgttggagtgtttaagatagggagttatttaagttttgggatgatatggaggatatttattttgatttgatttggaaagtagtggtttttatagtgattattatagttagtttgaggtagaggttaaatttttagtagggtagaggtgatgatggaagggattatttggattaaataataaaagggttatagagggatagtagaataaatcgttcggtagggaggggtttttttacgtttgtagtgtagttattttgaatgggtataagagatagtagtgggtattgggtttttggggaaagtttttttttgggggtggggatagcgtgtatttttatgttgtttttttttatatttatggatattttttaagtattaatattttttggggtggggtaaaggaggtatttatgtttagaggttataatgggaaggttaggttaatatattgtttagataaggagtttatattgggttgttttttgtaaggagatagatgattggttggatttaagggtagttttaattcggaaatatggtaagggttgggtgtgaagggtatggtttaatgagatttaagtttttggttgtgttaattagattagttttttttgggttttgatagagtatggagaggagtgatttattattagtaagaaaatagagtaaaaagtagagataagaggggagggggagaagatttagtttttgtagatttttaatgataaggtttcgttattaattttttttttttagttggtgggtatagatggtatttgtagttttgttttgtttaaaagaaagaggggattagtggggttttttcggagttagtatggaagtgttagtatagattgaagttaatgaagtttaagattgtggtttatttgaaggttaaaatggtaatttacgttgatttttttttaacgtttttattttcgttgttttatttatttagtggttgggtaggggttaggaagatattcgtgggtttgttgaggaaaggcgggtggatcggttttggtggtggtggtattatttttgtgaattttggtagtttgagttatttttatagagtaggttgaggatttgaattgtgtttgggaggagggggtagggggaggtaggtgagataagagttttttcggtgagtttggagatttttagttttgtagggtaggaataatagtgagtattttagttaggtggggatttggttcggaatggttatagattgggattggatatttaagggagaatgtgggataggacgtggtagtttagtggtgggttagggtttggtaggttgtaggtgtttgttagtttttagtatatgttaggttttttgatgttttagtttcgtgaaagttttgtggtttttattttgggaggggagagaggaagtggagagaggttggttttggtttagttgttaagttgtttcgagaaggttttagttgtgattttattggaggtttgaggttgtgtggatgttggggtgaggatgagagagttagttttttttaaggaagggaggtttaatatagggtgtaggttaggtttaggagtttgaggttatagttttcggtagatgggttggttgttgaggttatttgattttttgggtttatatgtggttagatttgatgggattttagaagtagtttgtatttaaagttaattgtaggagttgggatattttatttgtttttagttttttatttgtatggttgttaatatttaaggttttttaaatttttcggggttttttttagttattgtttaggtttaatttaagtgtttttttaggagtagggttttaggatagttataatttttagattaggagtacggtttgtgataacgtaattatggttttttttttggcggtatcgagttgtgggtattttttgagttggggagttggggtaggggtgagatggaattggaaaagtagaagagagagagagtgaagtttttttaattataggtttttgtatttttgagtttttggttagttaggatgttattagtaatgtacggttattgaattttattattgttttttatgtattgacgttatttttaagtagattagaaatttaatggtgggattgtgatttgaaattttttggtattttagtttagagtggtaggtgggtttaaatggtatttttcgtttagtatttgggttataggttgaggggtaatttttattaataggagttttttaaagttttttttgtttgtgtgaatggggtgggggagggtggttagattgggtcggggcggggtttttattttgttttttattagggtttggttttttttttagttttttttggttaggttagggagggagggtagagtaggtggggaaatggttgggaggtgtaattcgagtttaggaggaattttttgttttttttttatgtttttattaaagtagggcggggaagggtaagtttttatcggaaaaattttttaggtagttcggagaggtgggaaagtcgtcgtgggttagggagggagtattagttgagttgtaaatagaaacggcgtttaggttcgtagttcgggtagtttaagggtattaaggtttgagtatcgtttagaagcggtttcggggtggttttttttttttatttttcgtttaagtttttttttcgtttatttggggtagggcgtaggttttagaagtcggggaagagtggattttgtttttgttttggggtaagaaagttggcgttttcggtgttttcgttcgggagatattatggagttggggcgttggttggattcggttttacgtcgggatgtcgcgtttggttattcgcgggatttatttagagcggggtttcgggagggacgttaagcgggtttttagcgaagagaggcgcggggtttattttttcgaatttagggtttcgacgtaggggcgttgttgggaggaagcgttgtgggaggtagggttcgtttttaggatttcgttcgggcgtgtttaggttttttcgtaaaagcgtagaaagtcgttaaagcgttttcgtaattcgagttcgttgttttagtcgtttgtatttattttttcgtttttattttggttcgtcgtgcgcggttcggtattatttagacgggaggttatttgggtaggagcgtagttgtttagtcgtttagtttttgtttcgtttgtggttgttttcgagagtagttttttttttattcgtaaagagcgttattgcgcgttagtcgggttttcgaggaatcggttgttttggagggaaggaaggaggggaggtaagggttgggggcggcggaagcggttttcgggatataggttgaatgtaagggggtcggggtgggggtttagtgtttagaatagggttgtaggagtagcggggaggagagcgaggttttgcgtttttaagggtttgcgaagaggtgcgttgtagagggcgagttggggaggggtagattgttaagttcgtttgttttttcgttacggtttagaatagggggcgcgttttcgttttttttatttttaagttttagtttgcggacgtggcgtttttttttttaagtttttagttcgtagttaaagggtagggcgggggttttatttcggtatggattttcgcgttttcggtcgttacgttaaggtttaggtagtttagaagtattaggagtagcggtagtagtcgcggtcgcgtcgttttttttcggtcgtcgaggaggttgttcgtttagttcggtcgttcgggcgcgttcgggtcgttgtttatgttttcggcgtttagtttagttcggaatattgtacgtcggattttcgtacgcgttttggaaatttgcgacgttttttggtttttggttcggtaggcgcgtcgcggatttcgggttttcggttttcgtcggagtcgtttaggtcgtttcggtaaatttttaagttcgaggagaagcgggtagggtaggttcgggagttcggaattagtcggcgggaaagggggtcgatcggagttgttttcggcgaggtttcgtagtttcggcgtttagcgtttggggttcggttttcgagagtaagcgtaatttcggagtttttgtttggtttagcgtttcggtcgttcggtttcgcggcgttttttgcgcgtttagttttttttgtttatgttcggggtcgggcgttgttcggagcgcgcgttttttgtacggggattttgttcgtcgtcgcgttcgatcgggttcgggtttttaagtagtttcgggaggaggcgtagggagtcgattcgagagagcgagcgagagagtaagcgagttagttaaggagcgggcgttcgacgttttcggcgagtttagcgcggtttcgggcgtttttagttttttttttcgcgcgtcgcggtcgtcgcgtttttaaagggttagtgtgtttttaatgcgcggattcgggcggggatcgggggcggtgttttagtcgtaggttttttataagtaggtgcgggcggtcgaggttcgataggtgggcggttcgtttacgttttttagacggtaggaaatttttttagtttatttcgcgttatttttaatttagcgtttagggggcgggggtgatttttaacgcgatttttcgcggagggaggaggtagggaaggcgtggttttttcgtttgggaagaatgaagattttttttttttatatttggtgggggatatcgaggtttaggcggacgggaaggaggttttaggggagggattaaagagtcgttttaggtttaaatataaatatatatgtatatatggatatttgttagtttgaaatttttttttaaaagtcgtagggtgtttttggttattgaataattttttttagtagtaaagtgagggttttgtgcgcgtcgagggcgcgttgcggcggataaggggtaggtttaggagggatacggtttaagtttcgcgttcgttttttagttgtcgtttgtacgtgggtaaattaattttttcgagtttttatgtttttatcgggaacgtggggtaaagagttggggtgagggcgaggtaagattttcggtttttggtttggcgtaataggtgtttaagtattttggttattggttggtgcgagtgaagtgcgatagtgcggtcggagtcggcgcggggcgggtggatatattttttcgcgaagtttaacgagttggattttattttatttcggaagtagtttgaggtcggggcggggtggatgtaggaggttagagttgggaggttcgggtcgaaggtttatcgagattcggggattaggttaagggtagttttggcgcggcggattggtcggcgtggttagtgggtgagggttgtaggtaggagggcggagatcgaagataagttgttttttatttttagattcggaaatggaagtcgtttttatttgagggcggttttttttagagtaggttttcggggtattttagtcggttttatttttcggaaattggaaattaggagatttggtagagtgttttagagagggcgcgtttgaattttcgtgggatgtttttggggaaaggaagtcggagtttagagaaaggaatcgggcgattttattatttttacggatttatttttttgtgggattttttatttgggaagttggtttttaaattttttatttcgaaatttgtttttgggaaatgtgtagtggtttttagatacggataacggggttgtttttgtttaatcgattacgtcgtatttttttatgatatttagtttcgattagttaattttaaaaagtttggggttaggtaaagtggtttaagtttgtaattttagtattttgggagatcgaagtgggaggattgttttagtttaggagtttaagattagtttgggtaatatgataagattttatttgtataaagaatataaaaattagttaggtgtggtggtgtacgtttgtaggtttagttatttgggaggttgagttgggaggattatttgaatttaggaggttgaggatgtagtgagttatgattatgtcgttgttttttaattcggttgttagagcgagatattgttttagaaaaaaagaaaaaaaaagttggggtttaaggggttagttgttagtgagaggagtttaggaatgagtggagtaacgttttttgaggtttgggtcggttaagtttggtgattttttttttgttggaggttttttttttggggtttaattttgttttaaggaaatgatattttttgtgattagattttgaagtttttaattattggttttggtttttataggtattttgggagtttaaggtggatttgtatttatatttaatttaagatagttgggtttttattgggtttggatagtatttaaagttcgaaaggattagttagtgggattgagatgtgtgaattgtagtttttttattaagtagttttaaattttatttatattttgttaatatcgttttatttatgttttgatattttcgtttattattatatatttttttttttttggttttttgaatgaaagtttagatatggtgttttagagtagttttatttagaggtttcgatgtggtgtgagggattgtaaaaagttttggattagaagttaggtttttgggtttttgttttagttgtaatttattgggtaattcgagtaagttatttttttttttgggtttgtttttttatttgtaaaaggagagttttgaggtcgtaggggaggttttttgtttagtgaaggaaagtagttgtgggatggaattaggtttaggatatttttttttttagtttttttttttaggggtttttcgggcgatgtatttattcgatttattattaaaggtgaagtaggttttgggatttttcgtgttaagataaggaataaataaataagttaaggtaattttttttttttttggaaataaagttggggtggtttggagaggcgttggagagtgttaggtggaaattagttaaataggcgtgagatgatttttttgttttgcggggaatatttgaggatatcgaggttagatgtgttgattttgtattttttttggtgcgataaaatttttattaagagtatttttttgggttagtttttttgggggggatcgtagttttttttggttttttttttgtttttagaattgttttttatgtttttttttttatggagaattttttgttatggaagagtttcggttgtttttgtattgttagcgggagcgttcgtttaacgggtttattttgttttagaggtatatttagtgtttgggtgttcgttaagtttttgtcgttagttttttttttaggtttagtttgtttattttttttttttagcgagatttttgttttttttttttattgttattttttattttttattgaggagttagttattgattttggtttattttttaaagttgttgtatttaaattttatttttagtatagatagattttttagttatatttttttttaggggaatggtttagtttttttttttgggtttgttgatggaggttttattttatatttgttttttttttaataggagttagtatttaagtttggggaagtattatgttgaggatggggatttttttttgtgttttttgtttgtttagttttgttgtgagtatttagagggtagatttagtttggtttattaagtgtttagtttagggtttggtatagggtaggtgttagttaagtgtaggttgtatagtcggagttgttatgttgtttgtaagttagaaagtatgttcggtattttttttttttttagaagaattagattaatgatgagtcggagttagtagattaatgcggtggggagtaggaataaggtatagaatgtgtttgtgttttttagtgtagtggttgggaggttgttttttttaggaaaggtggggttgtaggggttattatgggaatttgggtaataggtttttttttttatatttttttttgaagttttatgtttttatttagatgttaggtttgattacgaggtggtgtgtagggttggattagggttattttagtataggatttgaggttagggttgagtacggttttattttttatgtaagtaagttatttaatttgtttttgtaatagaggattagatatttttattttgtttattttttaggggatattgggaggaagatacgagaaggttttgggaagtgtttagtgttatagtagtataaggttttaatgtttgtttatgtgggtgagggatgagggtggtgatttttgttatttagttttaggttagatgttttatgtgagaattttgtgtgtatatttggtaggttgggtgatttttttttatttttattttattgaagtattattaatgtttttcgaggttattttggaagttatagtagagatttttaagaatttttttaaattgtgagatatagttggatagggtaggggaaggtgatagttatttttttattgggttaaatataagtagtttaaaaaagatttaaaataaaaaatgtaatttttatttgttgaatataatttgaaattgtaaaaagatttttttgtttattattagaaatttagaagatatttgaagaggattgattgtttttttgttacggggaaggtgtgatgaaataattaaaattttatgtatttttggttttttttttacgttgttttttagaatgtttgtagttgtagtaggtaggaggtagtaggagaattcgggttgtggaaggtttttttgtttttttgggaaagttgttggggaagttagaggttatagtgtattggaggtttggtttttagttat

SEQ ID NO: 1243 - DNA, 5474 bp, Artificial Sequence
  chemically treated genomic DNA (Homo sapiens)
ttaaaaatttaattttattttgttaaagaaagttttttatgttttgattttttgagggggaaataggttagaggttaatattattaatttttatatttatttaggttaagggtaaagtcggggttagttttaatttggttatagtttatgttttttttatttttagtttttagttttaggttttagatttgtttttttatttgttttttaggattttttttttttttttttttagtttttttgtttattgtttttatagggtaagggtggttgttagagggggtgggcgatagttttgagattagtttttgttgggtttagaaatttttataaatttttgttttttatttataattttatggtttttgattattagaaaatatttttagaggtttattttatttttatttgttatagtttaaaatattgttattaaaaatatttttgtaaaatttttttgttataatttgtggatagagagggaaattaatttgtaggaagggagtaagtaagataaagaatttattttttttttttagattaagttttttttttggggtaggtaagttatatgttttaatttttcgtatatacgtttatattttttttagtgagagatgataaatttagagatgataaaaaagagttgggttagttcggtttagggggtaggagttggtggagggggtggttatgatgttgtgttggtaataattagttatttaatttttgtatatgtgtttagtttgtagttttagattttaggggtttttgtttgggtgttgtgggaattttgggagattgaagagtgttgagtaaagatggtagttttagagtttgttttaggttttgttgtattttagttatgtgatttgaagtaatttattagagatttagtttttttttttgtaaaaagatgataatattggttaggtgcggtggtttacgtttgtaattttagtattttgggaggttaagggaggtggattatttgagtttaggagtttgagattagtttggttaatatagtaaaattttatttttattaaaagtataaaaattagttgggtgtggtggtacgcgtttgtaattttagttattcgggtggttgaggtaggagaattgtttgaattcgggaggtagaggttgtagtgagtcgagattgcgttattgtattttagtttgggttatagagtgagatttagttttagaaaaggagtaaaaaagatgataatattggttgaagggttgttgttaaaatttaaatgaagttatttatttggtagtttttatttttgatttatttttttttttttggtttttaagttgttagaatatagttttatttttaggttttttgaggtcggagttagtatttatttttattttatgataattgttatttttttttttaatatattaaatatatatatatatatatatatatatatatatatatatatatatattttttttttttggttaggtatagtggtttatacgtataattatagtattttgggaggtcgaggtgggtcgattatttgagtttaagattagtttgagtattataggaaattcgttttttttattttttatattttttataaaaaatataaaaattagttgggttgggtggtgtgtgtttgtagttttagttatgtaggaggttgaggtgggaggattgtttgagtttagaaggcgaaggttgtagcgagttaggattattgtgttattgttttttagtttgggagatttaaaaaaaaatttttttttttttttttttttatatgaggtttttaaggggagggagtaatttgttataatatttattttattttatttttgttttttgtattttttttgtttgttttttttttatttttttttttattttttttttattattttttttggtttttaaagttttttttttttttttagatagtttttaggggttgaggttaggtaggcggagttgggtgagtttagttttatagatagttttaaagaaatgtattaaaatgttattagtggtttttttttgggtagaatttattagtggtttttatttttttttttgtttgttttggtattttttaatattaaatattataatgaatgatgaataatttatttaggaaaaaaatataaaatattaattttaaaaatcgtaattaatttttaattggcgtatgttttgtttttaaaaggagaaagattggaaagggggtagaaagagaggaggaagagtttcgtaggggattaagtaggaatttgtttttaaattttattattttttgggtgtattagttttggtgatgggttttgttatttatcgtttagaggttttttgtttttttttgtttgttattggttatttgagatttagttatttaatggttattagttgggtggtggatgggttagacggattagtattattgagggtagtaatatggattaggagtattttttattttgattttgggttgtgaggtgtttttttgtggttttttagtttttttgagaatataaaagtttagttatttttttttttatttttatgtttattttattgtgtttttgaataatatgaaaatgttgtatgatgtgtaattgatggtggagtttttaggggttttagttatttaaagaataaagttttaagtgttagtgtggtgtacggaaagagtatgagttatagagttagtagagggatttaaataaggttaggttagttgggagttttatgtttttggttaaatttttttttttgagtatttatttttttttataaaaagtggtcggaataattttttttttattagatggttgtgagaattataggaggtaatatataaagtatgtaatatatagtagttttttatttatttatttatttattttttttttgtggggggatagagtttcgttttgtcgtttaggatggagtgtagtggtgcgattttagtttattgtaatttttgtttttcggatttaagcgatttttttgttttagttttttgagtagttgggattataggcgcgtgttattacgtttggttaatttttgtatttttagtagagacggggttttattatgttggttaggttggttttaaatttttgattttaggtgatttatttatttcggttttcgaaagtgttgggattataagtgtgagttattatgttcggattttaatttttttaattttttatttttataggtttttggggaataggtggtatttggttatataaattttttagtgtttagtggtgatttgtgagattttggtttatttattatttaataataggtatttttattttaattaattaattaattaattaattttgagatagagttttattttgttattaggttggagtatagtggcgcgattttagtttattgtaattttcgtttttttagtttaagtaatttttttgttttagtttttcgagtagttgggattataggcgtatgttattacgtttggttaatttttgtatttttagtagagataagattttgttatgttggttaggttagttttaaatttttgattttatggttcgtttattttagttttcgaaagtgttgggattatagacgtgagttattgttttcgttcggtatttttaaatgtaagtttttttttttttttttgtatagtatttaaggttttttttaaattttgttttttaattatttttttattttggttattttttgatagtgatttattaagtatagtttcgaaagtatggaggtggtttggggtaggtattcgggttttagtggtgaatgaagtagtcgtgatttttttgatttattgagtatagtagttttttagttttgtatttttatttaagatttgtattgtttgttttttagtatttttttattttattaattttttttttttttgagatggagtttttgttttgttgtttaggttggagtgtaatggtgtgattttagtttattgtaatttttgttttttgggtttacgtgatttttttgttttagtttgtcgagtagttgggattataggcgttcgttattatatttggttaatttttgtatttttagtagaaataaggttttattatgttggttaggttggtttcgaatttttgattttaagtgatttatttattttagttttttaaagtgttaggattataggagcgagttattatgtttggttttattttattaatttttagttggtttttaaagtttattttaaagtttgattttttagtaaatttttttttagttttaagttttttagggtgaattatttttggtttggtacgttggtttttttttttttaggtgtttggatttgttttattggattcgtaagttttttgagggtaggttttgggttttttatttatttgtgtttttgttaagttttatttatatttatatattttaggtttattagatttttgaaataatgattttttattaaagtagatataagtaggttgtaggagtatttatatttttaatttggttttgggtataaagaaattgagattttacgtttgatttttttatttgaaatttaagttattttagttgttttttattttttagtttattttagggagatttaaaggtaggggcggagtgatttgttggtttagggtttttgaggtatattgatgtttaattttaggggatgtttatgatttttatttttagtttttttagagattttggttttcgttttgtttggatgtttattttagggtagtatgaagtttttttatttttagtagaggattttgagggaagcgattgggaattttttttggttttcgttttttggtagggtaagggttaatggtgaattgtaatatattttttggttgagttatttttttttgttttttttttaaattttttttagttgttataaagaggattagaggttggagagtaaaaagaattgggggtaagagtttttttgtttagtattgtttttttaaggtttttagaaattttaggttagaggtacggatagtttttggagttttcgtttggtgggattatgaattgttagtagttgtggttgggttttttattttttatgatagttttaggtcgggttttggggtttgtagaggtggcgtttgtggtaagttttttaagaaagagatttgggttagcggagggataggggttattgttttatagttttatcgaagttttttttttgatttttagtttgtttgttttttttttgttttttttgttttatggtttattttgtttatttttcgttgtttttttttgttttatttgagttttttttttaaggtgtttttttattagtgtttttatattaggtttttttttttttgatggatttgttaggttatttagaagttttattttgagattaatttttttttaatttgtttatttttatttttattatagg

SEQ ID NO: 1244 - DNA, 5474 bp, Artificial Sequence
  chemically treated genomic DNA (Homo sapiens)
tttatgatgggagtggaggtaagtaggttaaaagggggttagttttagagtaaagtttttaagtgatttaatagatttattaggagaggagggatttgatatggaagtattaatggagaagtattttagagaaggggtttaggtggaataaggggaagtagcgggagatgggtagggtagattatggggtagagagagtaagggaaaggtaggtaggttgaaggttaggagggaggtttcgatggggttgtggagtagtaatttttgttttttcgttggtttaggttttttttttgggggatttattataggcgttatttttgtaagttttaggattcggtttgagattgttatggggagtaggaagtttagttatagttgttggtagtttatggttttattagacgagagttttagaggttgttcgtgtttttgatttgagatttttgggagttttgggggagtagtgttaggtagaggggtttttatttttagttttttttattttttagtttttagttttttttataatagttgaggggaatttgggggagaggtagagggaggtgatttagttaagagatatgttgtaatttattattaatttttgttttattagagagcggaagttaaagagagtttttaatcgttttttttagagttttttgttggagatggaaaaattttatattgttttagggtgagtatttaggtaggacgagaattagaatttttggagagattagagatagggattatggatattttttggaattagatattaatgtgttttagggattttgggttagtaaattatttcgtttttatttttgagtttttttagaataagttgagaggtaggaaatagttgaggtagtttgggttttaggtgaaggagttaagcgtgaagttttagtttttttgtatttaagattaagttgggaatatagatgtttttgtaatttatttatgtttgttttaataaaaagttattattttaagaatttaatgagtttggaatatgtgggtgtaggtgggatttaataagggtataaataagtaaagggtttagagtttatttttagggagtttacggatttagtgaggtagatttagatatttgggaagaggggagttagcgtgttaggttagaggtgatttattttaaggggtttggggttggggggaggtttgttgagaagttaggttttgagatgggttttgaaggttagttaagaattgatggggtaaggttaggtatggtggttcgtttttgtaattttagtattttgaaaggttgaggtgggtgaattatttgagattaagagttcgaaattagtttgattaatatggtgaaattttgtttttattaaaaatataaaaattagttaggtatggtggcgggcgtttgtaattttagttattcggtaggttgaggtaggagaattacgtgaatttaggaggtagaggttgtagtgagttgagattatattattgtattttagtttgggtaatagagtaaaaattttattttaaaaaaaaaaagaattgatagggtaaaaggatattgagagatagatagtgtaggttttgagtaaaagtgtagagttgagagattgttgtatttagtaagttagaagggttacgattgttttatttattattgaagttcgagtgtttattttaggttatttttatgttttcgaggttgtgtttaataaattattgttaaagaatgattagggtgggaaagtggttgggagatagaatttggagagggttttaaatgttatgtaaggaaaagaagaaaaatttatatttaaaaatatcggacgggagtagtggtttacgtttgtaattttagtattttcggaggttgaggtgggcggattatgaggttaggagtttgagattagtttggttaatatagtaaaattttgtttttattaaaaatataaaaattagttaggcgtgatggtatgcgtttgtaattttagttattcgggagattgaggtaggagaattgtttgaattggggaggcggagattgtagtgagttgagatcgcgttattgtattttagtttggtgatagaatgagattttgttttaaaattagttaattagttaattaattaaaataaaaatatttattattgggtgatgggtgaattaaaattttataaattattattaaatattaaagaatttatgtaattaaatattatttgttttttaaaaatttatggaaataaaaaattaaaggaattaaagttcgggtatggtgatttatatttgtaattttagtattttcggaggtcgaggtgggtggattatttgaggttaagagtttgagattagtttgattaatatggtgaaatttcgtttttattaaaaatataaaaattagttaggcgtggtggtacgcgtttgtaattttagttatttaggaggttgaggtaggagaatcgtttgaattcgggagatagaggttgtagtgagttgagatcgtattattgtattttattttgggcgatagagcgagattttgtttttttataaaaaaaaaataaataaataaataaataaaaagttattatgtattatatgttttatatattattttttatagtttttatagttatttggtgaggggaaaattatttcggttattttttgtaggaggaaatagatatttagaaagggaaatttgattaagaatatggaatttttaattggtttgattttatttaaatttttttgttgattttataatttatgtttttttcgtatattatattgatatttagagttttgttttttaagtaattaggatttttgaaggttttattattagttatatattatataatatttttatattgtttaaaagtatagtgaagtagatataggaatgggggaaaaggtaattgaatttttatgtttttagaagggttgggaggttataagggaatattttatagtttaggattaaggtgggggatgtttttgatttatattgttgtttttaatgatgttggttcgtttggtttatttattatttaattggtaattattgggtgattaagttttaagtgattagtgataggtaaggaaggatagaaagtttttgagcgatgagtgatagggtttattattaaggttgatgtatttaggaaatgatggagtttggggataagtttttgtttagttttttgcggggtttttttttttttttttttattttttttttagtttttttttttttgagaatagaatatgcgttaattgaaaattaattacgatttttaaaattaatgttttgtgttttttttttgaataagttatttattatttattataatatttggtattagaaaatattaaaataaataaggaagaaaatgaaaattattagtaaattttatttaaaagagaattattagtaatattttgatgtatttttttgaaattgtttgtggaattgagtttatttagtttcgtttgtttggttttagtttttagagattgtttgggagggaggagaaagttttgggagttagagaggataatggaggagaggtgaggggaggggtggggaagagatagataaggaggatgtaagggataggagtaaagtaaaatgaatgttatagtaaattattttttttttttagaaattttatgtaaggaaaaaaagaaaaaaaaatttttttttgggttttttaggttggaaaatagtggtataataattttggttcgttgtaattttcgttttttgggtttaagtaatttttttattttagttttttgtataattggggttataggtatatattatttagtttagttaatttttgtattttttgtagagagtgtggggggtgggggaggcgggttttttatggtgtttaggttggttttgggtttaagtgatcggtttatttcggttttttaaaatgttgtgattatacgtgtgagttattgtgtttaattagaaaaaaaaagtgtgtgtgtgtatatatatgtgtgtgtatatatatatatatatatttagtgtgttagggagagagatggtagttattataaggtgagggtgggtattaatttcggttttagaaggtttgggggtggaattatattttagtaatttaggagttaggagagagagaataaattaaaagtaaaagttgttaaatagataattttatttaaattttaataataattttttagttagtattattattttttttattttttttttgagattgaattttattttgtagtttaggttggagtgtagtggcgtaatttcggtttattgtaatttttgtttttcgggtttaagtaatttttttgttttagttattcgaatagttgggattataggcgcgtgttattatatttagttaatttttgtatttttagtagagatgggattttgttgtgttggttaggttggttttaaatttttgagtttaagtgatttattttttttggttttttaaagtgttgggattataggcgtgagttatcgtatttggttagtattattatttttttatagaaagagaaattgagtttttaataagttgttttaggttatatagttaggatgtagtagagtttggagtaggttttaaagttgttatttttgtttagtattttttagttttttagagtttttatagtatttaaataaaagtttttagagtttggagttgtaggttgggtatatgtgtaaggattggatgattaattgttgttagtatagtattatgattattttttttattagtttttattttttgagtcgggttgatttagtttttttttgttatttttaaatttgttattttttattgggggagatgtggacgtgtgtgcgaagggttaggatatgtggtttgtttgttttaaaaagagaatttgatttgagagaaaaaaatgggttttttgttttgtttgttttttttttgtaagttggtttttttttttgtttataaattgtggtaaaagagttttatagaaatatttttaatgataatattttaaattatagtaagtgggagtagagtagatttttgagagtattttttaatgattaggggttatggggttatgggtggaaggtaaaagtttgtagagatttttaagtttagtagaagttaattttaaagttatcgtttattttttttgatagttatttttattttgtggaggtagtgggtagggaagttggggaaagaagaaaggggaattttggagggtaggtagaagggtaagtttggagtttgaaattggaaattggaggtgagaaaaatatgagttgtaattaagttagggttggtttcgattttgtttttgatttggataaatgtgggagttggtggtgttagtttttgatttgttttttttttagggagttaggatatagggagttttttttggtagagtggggttgaatttttaa

SEQ ID NO: 1245 - DNA, 8718 bp, Artificial Sequence
  chemically treated genomic DNA (Homo sapiens)
gaaatgtgtaattattttttttatttgaatatttagaggttattgtagagttattaattggttttattttgatattgttgattgtagggtttagggaggtttatagaaagggagagaaatgaggaatggttagttagttggtaaagtagttagaatatatatatttataagggtgatttagtttatttttgtatatgggtatagtttgtttttatttacgtttatttgaagagattattaaataggttttttgtgagtaataaggttgtttattttatttgggtgtaggcgggttgagtttaaaaggagagttagcgaagggagataggggtggggtcgttttataggatttgggtaggtaaaggaaaattatagttaaaggggagttgttttttggcgggtaggggtggggggttataaggtgtttagtaggggagtttttgagttaggatgagttaggagaaggaattttataaggtaatgttattagttaaggtagggattggttatttttattttttttgtggtggaatgttattagttaaggtaggaataggttatttggatgtatacgtgtaggttataggggatatgatggtttagtttgggtttggaggtttgatatttgtggtattttaaaataattaattagtaagattagagattattgattatagattattataatagatataataataatgaaaaatttggaaatatggtaagaattattaaaatgtgatacggagataggaagtgagtatatgttaatggaaaaatgatattagtaagtttgtttgacgtagggtagttataaatttttaatttgtaaaattgttatttttgtatagtatagtagggtaaagtgtgaataaaatgaggtaatttgtatttttagttaaagttttagaattaattttttttggttttagtggatttataagtcggtatttgaattattattttattaagatgtttggatttgttttttagtttagtttgggttatattgttattgtggagttaggaggtgggttatatttgttgaatttagatttagagttggggagaagtagttttttaatgggaaattaaggggtagttattaaaagtaggaggatagggttttgggaaggtttatatggtatacggttattattttttttaatgttttgttttttgtttagtgtttcgtattgtaatttttgtttttttattaataaaatattattttaatgttattgtattttagtattaaaaatagtgtttattaaaaatttttcgaataaatgatagaatttatgttatatcgcgacgttttttaattatagtttgcgtagttttttggggttgttgtaaaaaagtattatagattgggtggtttataatagaaatttatttttttagagttttgagattagaagtttaaaattaatatgttagtagggttacgttttttttgaagtttttgggggaagaatttttttttgttttttttagtttttgggttgtaggtaattttttgggttgtaggtattgttttaatttttgtttttatggttatatggagttttttttgttgtgtgtttttgtgtttaaagttttgtttttttattatgataataggttttggattagagtttatttattttaatttgattgtatttgtaaagattttatttttatgtgagggtatagttataggtattgggatttgaatatatttttttggtaatataattatatttattaaatagtatttttgtatttatattaagaatgattaaaagatgttgtagtaataaatatattttaaaagttttatggttcgttgtttaagagtttgttttttatttacgaagtttgtagtgggtttggttgtttttattttacgattttgttagattaatatagggtttttagggttatcgtggtaggggaagagagatatataggagtgtataggggttttggagtatattgtatgtgtttattaataagtttattattattagatattgtttgtttttttttcgttttttgggttattttaggttttaagtgagggtttttggattttatataagaaggaatttgaggtaagtttataaagtgaaagtaagtttattaagaaagtaagggaataaaagaatggttattttatcggtagattagttttaaaagttgttggttgtttatttttatggttattttttgattatatgttaaataaggggtaaattatttatgtttttgttttttaggtcgtataggataattttttgacgttgttatggtatatgtaaatagtcgtggcgttggtgggagtgtggtagtaaggttgattagaggttttttttattattattttggttttggtgggttttggttagtttttttattgtaatttgttttattagtaaggtttttatgatttgtattttgtgttagttttttattttatttcgtgattaggattgttttaatttattggtaatgtaggttagtaggttttagtttaatttttatttaagatggagttgttttggttttaatgtttttgatatagttattgttgggtatagaagttttttttttattgagtgttgtttttgtagttattgttatttttgaatgggtattaagttttatattggaaatcgatatttttggaatgttaaaattatagaggttgtgaagaggtatagttaaagttgttttttgttagaggagttttaaagtatgttatgtagattttagagattttttgaaaaggttaaaatttaaattgggtaagtgtaaatgaataatatttagtgaagggagttatatataaggtaatataatagagagtggtgaggattgtggtaaattaaagtatgtgttttatttaaagggagtagttattatttaattttagtaaattattgttatatggaaattggtatttagtattgttagatttttgggaaatttttttaaaaaaagaaaattagaaagttagatttttatatgaagttttttaaattttaaaatgttgtttaggttggatttagtttataggttacgagtttgtagtttttgttttagtgagataattttttttatttttatttttagtttttagttttttaatttggttttttggttatttataggacgtggatatgagtttagtggggttgggttaggaggtaatttttttttttaattgattttagtttcgttttttttaaaatagttaaggtttgttattgggttaggttgaagggtttggtttttttttgcggggtaaggttttttttaagagggttttttaaaattgattttggaaagttagagtatatatttattagataagtttgaatttgtttgaagtttattgagatttaagtcgtagagatttttttagttgtgatgattaagatataatcgtgatttttaatgttttttataagtatattgtttttgatttttttagtttttgattttattttttaaattgttttttgttgatttttagttttatttgttttttttttaggttggtttttattgatttttttagttttatttttttattttgtgttttattttttttagatagaaaaaatttttttttttagtgttttttgttgttttttatttttgggttattgttaatgttttttaaaatattttttatattttttatttagtattttatttttttagttttttaggttttagtttagaagttattttttttaggaagttttttttgattgtttttattagtttaggggttgaagttaggcgtttttaatagtttgttggagttttttattatagtttattttttaattgttttttttgagagagggagaagatattttttagagacggttgttatagggagaattttaaaattgggattcgatttgagaggttatatggatttttggtttggcgtaggaaaggatttaagagtgagtggggaattcgtggaattgagggttttttttttttttagattatatagggtaaatttttttatattgttatggtatttataaattgttatggtattggtgggtgttttttttaatatgttaatgtattataattagcgtaaaatgagtagtgaggatgattagaggtcgttttttttgttattttggttttggttggtttttttattgtatattgttttattagtggggtttttgtgatttttattttattaaattagttttgtttaatttttattttattttgtgatcgagaatgcggatttttttgggagtgtagtttagtaggttttagttttattttatttagttttttgtttaagatggagtcgttttggttttaacgtttttaacgcggggtttttgattgttttattttttaaggtgtatttagtatttcgtattatacgaggttaagttaaggtttatatatttgtagaaggaaagaggtaaggaagtaatttgggattttttattgtttttgtttttatttttttttttttatttttgtttattttagaatttttttgtttttatttttaaatatcgaaaatttttgtttttgattatttattattgtggttgattatttgtttttgattattttttttcgtttttgattttagggagtgtagggtgttttagttaagtcggcgttttttttagtagtatcgttgttttttaattttaggacgttaagggtttagagcgatagatgttttttagtagggggttttgaggttgtgcgtttagatcgcgagagaggtaagtggggtgacgaggtcgtgtattgagggtggacgtagaggttaggagtagtaggcggtcggggaaaagaggtggagaaaggaaaaaagaggagaaaagtggaggagggcgagtaggggggtggggtagagaggggcgggttcgagtgcgtttttcgtttttagtttcgttttgttagtttttttttagtttagtcggttatatttggcggttgtttttttttgttttcgttgtatttagatttttttaggcggtggttggaggttgcgtatttggggttttaaatatataaagggattgttaggatttgcggcggcggcggcggcggcgggggttggggcgcgggggtcggattatgagtcgttgagtcgggtaaattttaggttatcgagttagcggattttcggagcgtattttgcgtcgcggagtaggttttaattaggcggcgaggcggttatacgtatcgagttagcgattttcgggcgacgcgcggggttagggagcgttacgatggaggcgttaatggttcggggcgcgtttacgggttttttgagggcgttttgttttttgggttgtttgttgagttacgtcgtcgtcgtgtcgtcgtttattattaagtttttcggcgatgtcgtttttaaaacggataaagagttggtagtggtgagttgttgcgttggttttaaggaattacgtttagataaatttcggaggtaaaggatgggggtgtttttttttttgttttcggcggtgggtatatagcgtgggggaggggtttcggtaaatagtttggggggtttttggtaagttattggagtgattttttgtaaacggtgggggattttttgtaagtaaagaaaatttttgataaataatttggtaatttttagtatatagtagtggggcgaaaaataagttagagagtgggagaggggtgatttggtaaattattggaaagggatttttatgtaaatagcggggatattttttagtatttgggatatttggcggggggggggggcggtttttgtaaataatttttggatatatttgggtagttgttaagggtttttgttaagcgtttaggtaagtttttggtaaatagttataggggtcgtttttgttaatgtaggattttgggaacggtgttttggtatataatttgggtaaatttatgcgcgtataaggatgggagggagtttggttaaagcggggtttggtaaatttttaggaattttcggtatagattcggagagggatttttaaataaatagttcgagggggttatttgggaagtgattggggtaggagggaagtagagagcgtatttttttttttttggtttaatggataaattggttaagggttgggtttcggaaagttttttcgaatttttttaaagggtcggagaaaagaaggagagagttggttcggtaggagggaggaggagtggggtaggcgttggagggttcggcgcgtggggcgggggcggattgcgtttcgttcgggtcggagagcggttagagagtttttttttttggttgggtttttaaatcgcggtttagatgttgttttgtgagcgtgcgcgcgtttggttggaggggtattgagtttggtcgtagtgttgcgtaagtagggtttgaggagagaggtaggttagggatttattaagatgttttttttagtttaggggatatttgtttttttgttgttttagttattttgttttttagttttttttttaatttgttcgggagaagacgtttatgttttttggttattttaggaatttttttaggaggtgataattatttttttttaatttttatttttttaaatagttaggttttagttttttttggatagatgggttgggaaatttttatatatttttagagggttattttttttaaggatttggagttggttggtataatgatgtggttgttgggtgggggtgagagtggagttttgggataatgataaagttatttggttttttatattttttttagttaatgggttataggatgaatttttaaattggggtttagtttgggggttatatgggtttttggtttgtataggaaggaatttaagagcgagttaatagagtaaagtgaaaataaatttattaagaaggtaaaggaataaaagggtgattattttatagatagagtagggaatgggttgttggattgagtatatatatggttattttttgattatatgttaaataaggggtggattatttaagagttttttagaaaaagggtggggagtttttggaatcgagggttttttttttttttagattatatagggtaattttttaatgttgttatggtatttataaattgttatagcgttggtgggagtgtttaatgtatttaatatgttaatatattataattagtatataatgagtagtgaggacgattagaggttatttttattgtagttttggtttgggtgggttttttttagtttttttattgtattttgttttattataggggtttttgtgattcgaattgtatatggtgaaattagttttattaattttttgttttattttgtgattaagaatgtatgtttgtttttttgggaatgaagtatagtaggttttagttttattttatttagttttttatttaagatggaggtgtttggtttgaatatttttgataaatggaagtttgtgttgtttagaggtaatgtagtgggggtttaagaagataattttggatttagatcgtttggttttaaattaaagagtgtatgaattaattagttggtttagtgatgatgttaggtaagtgattttttagtttttttatttgtaaattgggaaattttttattttagggttaaaagagaggtaattttaggtgtttatttagtatatggtaagtatttaataagtattagttattattttattatattattattattgttatgttttttatttttttttttttaattatttttaataaggttaggatcgttgttagaagattttttggttttttttaatattttaatatagtatttattatatattttattttgttttatttgggatttattagtttttttgttaggatttgaattttagagatagaattgtttattttttttatttgtttttttttagtagtagtattgggtttggtatatggtaggtattaaaaagtatttgttgaataaataaatgagtcggttgttttttgaatttttgtagggatttgtttagtttgggttttagtttgggtagggttagttgtatgatttatgaaggataggattattttttttttgtaaatggttgatttaggatttaaatttaggtttgtttattgttagagtttatgtatatagtttttgaatttttttagaagaaaataggaggaaaaaagtttttaagttattagtcgtaaggtagataaatgagttgatagaggtaaaggaaggatgttggagtataatgattttatattatagtttttggagttagattgttttgttttaaatttagatttattatttgtgaattgtgtgatcgtaagtaagttttttaatttttttgtgttttagtttttttttttgtataatagggttagtatatttatattatagagttttgagtattaaatgagttaatatattttgattttagtgtttggatatatagttagtatttagtattaataagtggtagttatgttttttatagttgtatgttttgtcgtttaattaatgggtgatcgtgttggtttgggaatttagtattttatttagtgttttgggatttttggtttattttttgtttggattatggtattgggttggggggttgattgttatagtttgttttggttagtattgtgttattttaatgtggttaattgttttgggggtgtgtattttttttagt

SEQ ID NO: 1246 - DNA, 8718 bp, Artificial Sequence
  chemically treated genomic DNA (Homo sapiens)
gttgaaagaaatgtatatttttaaggtaattagttatattaggatggtatagtattgattaaagtaggttgtagtaattagttttttaatttagtgttatagtttagataggaaataagttaggggttttagagtattgggtggagtattgggtttttaaattagtacggttatttattagttgagcgataggatatatagttatagagagtatggttattatttgttggtgttgggtgttgattatatgtttaggtattaaagttagaatatgttaatttatttaatgtttaaaattttgtaatgtagatatattaattttattatatagaggaggaaattgaagtatagagaggttaagaaatttgtttacgattatatagtttataaatggtagatttggatttgggataaagtaatttggttttagaggttgtgatatggaattattatattttagtattttttttttatttttattaatttatttatttattttgcggttggtgatttggggatttttttttttttgtttttttttaaagagatttaaggattatgtgtatgggttttggtagtagatagatttgggtttaaattttgaattagttatttgtaaaaagaaagtagttttgttttttatgagttatataattggttttgtttaaattgaggtttaaattgagtaggtttttgtagaggtttagggagtaatcgatttatttatttatttaataaatattttttaatatttattatgtattaagtttagtgttattgttgaggaaaaataggtgaaaaagatagataattttgtttttaaggtttaaattttagtagggaggttgatagattttaaataaaataaaatgaagtatgtgataagtattgtgttagaatgttgaaaggagttaggagattttttgataacggttttagttttgttggaagtagttaggaaaggggaaatggaggatataataataataataatataatagaataatggttagtgtttattgagtatttattatgtgttaggtaagtatttaagattattttttttttaattttgagataggaaattttttagtttgtagatgaagaaattgagaagttatttgtttaatattattattaggttagttggttggtttatgtattttttgatttgaagttaagcggtttaagtttagagttatttttttaagtttttattgtattgtttttggataatatagatttttatttgttagaggtgtttaaattaggtatttttattttgagtggggggttgggtaagatgaggttgagatttgttgtgttttatttttaggagggtaggtatgtatttttagttatagaatgagataggaggttggtaggattgattttattatatatagttcgggttataaagatttttatgataaaataggatgtagtaaagaagttggagaaagtttatttaaattaagattgtaatgaaagtgatttttagtcgtttttattgtttattatatgttaattataatgtattagtatgttaaatatattagatatttttattagcgttgtgatagtttataaatgttatagtaatattgagaagttattttatatggtttaaaagggagagaaattttcggttttaggaattttttattttttttttggaaaatttttaaataatttattttttgtttagtatataattaagaaataattatatgtatatttagtttagtagtttattttttgttttgtttatggaataattatttttttatttttttatttttttaataaatttgtttttattttattttgttggttcgtttttgaatttttttttgtgtaagttaagaatttatgtggtttttaggttgaattttaatttaggggtttattttgtgatttattggttggaaaaggtgtaggaaattaagtagttttgttattgttttaaagttttatttttatttttatttaatagttatattattatgttagttagttttagatttttgaaaaaagtagttttttaaaaatgtatggaggttttttaatttatttatttagagggggttgagatttagttgtttggaagggtgagagttgggagagggtagttgttattttttgaaggagtttttagggtgattagagggtatgggcgttttttttcggataggttgagggggaggttggagggtagggtggttgaagtaataagggagtagatattttttggattggaaaggatattttgatgggtttttggtttgtttttttttttaggttttatttacgtaatattgcggttaggtttagtgtttttttagttaggcgcgcgtacgtttataagataatatttgaatcgcggtttgggagtttagttaggaaggagggttttttggtcgtttttcgattcgagcggagcgtagttcgttttcgttttacgcgtcgggttttttagcgtttgttttatttttttttttttttgtcgggttagttttttttttttttttttcgattttttggagaagttcgaggaaatttttcgaggtttagtttttgattaatttgtttattaagttaggagaaaaaagatgcgttttttgttttttttttgttttaattattttttaaatggttttttcgagttgtttgtttaaaggttttttttcggatttgtgtcgaaggtttttagaaatttgttaagtttcgttttgattaagtttttttttatttttatgcgcgtataagtttatttaaattgtgtgttagagtatcgtttttaaagttttatattagtaaaaacgatttttgtagttgtttgttaaaggtttatttagacgtttggtaagagtttttagtaattgtttagatgtgtttaaaagttgtttataaagatcgtttttttttttcgttaaatgttttagatattagaggatgttttcgttatttatataagagtttttttttagtagtttgttaggttattttttttttattttttggtttgtttttcgttttattgttgtatgttgaaggttgttaaattgtttattaaaggttttttttgtttataaaagattttttatcgtttgtaagagattattttaatagtttgttaaagattttttaagttgtttatcgaagttttttttttacgttgtgtgtttatcgtcgagggtagggggagagatatttttattttttgttttcgaagtttgtttaaacgtggttttttgaggttagcgtagtaatttattattgttaattttttgttcgttttgggggcgatatcgtcggggaatttgatgatgggcgacggtacggcggcggcgtggtttagtaggtagtttaggagatagagcgtttttaggggattcgtgagcgcgtttcgggttattagcgtttttatcgtagcgttttttggtttcgcgcgtcgttcgggggtcgttggttcggtgcgtgtggtcgtttcgtcgtttggttggagtttgtttcgcggcgtagggtgcgtttcgagggttcgttggttcggtggtttggggtttgttcggtttagcggtttatggttcggttttcgcgttttagttttcgtcgtcgtcgtcgtcgtcgtaggttttggtaatttttttgtatgtttaaagttttagatgcgtagtttttagttatcgtttgaggaagtttggatgtagcggaaataagggagggtagtcgttagatgtagtcggttgggttgggagggagttggtagagcggggttgggggcggggggcgtattcgggttcgtttttttttgttttatttttttattcgtttttttttattttttttttttttttttttttttttatttttttttttcggtcgtttgttatttttggtttttacgtttatttttagtgtacgatttcgttattttatttgtttttttcgcgatttgggcgtatagttttagaattttttgttgggaaatatttgtcgttttaggtttttgacgttttgaggttagagagtagcggtattattaggagggacgtcggtttggttaggatattttgtattttttggggttaggaacgggaaggaatggttagaaatagatgattagttataatgatagatggttagagatagaaattttcgatatttagggatagggatagagagattttgggatgaatagagatggaaagagagagatggaaatagagatagtggaaggttttaggttgtttttttatttttttttttttgtaaatgtgtaagttttaatttggtttcgtatagtgcgagatgttagatatattttgggaaatagagtagttaggggtttcgcgttagagacgttggaattagagcgattttattttgaatagggggttgggtaaaatgaggttgagatttgttgggttgtatttttaggagggttcgtattttcggttataggatgagatagaaattgggtaagattggtttaataagatagaggttataaagattttattgataaaatagtatgtagtgaagaagttagttaaaattaagatggtaaagaaagcgatttttggttatttttattgtttattttacgttaattataatgtattagtatgttaaaggaagtatttattagtgttatggtagtttataaatgttatggtaatgtggggaggtttattttatatggtttaaaaaggggaggagtttttagttttacgaattttttatttatttttgaatttttttttgcgttaagttaagaatttatgtggttttttaggtcgaattttaattttgaagttttttttgtgataatcgtttttgaggaatgtttttttttttttttaggaaagatagttgagagataagttgtgatggggaattttagtaggttgttgggaacgtttgattttagtttttaaattagtaaagataattaaggaaggttttttggaagaagtgatttttgagttgagatttgaagagttaaagaggtggagtgttgggtggggaatatggggaatgttttagggaatattgataatggtttagagatgaaaaatagtaagaggtattggagaagaaagttttttttatttgaaaaaggtggggtatagggtgaggggatggagttggaggggttagtaaggattagtttaggaagggggtagataggattgggggttagtagggaatagtttgagaagtaaggttaggggttgaaagaattaggagtaatatatttgtggggggtattggaggttacgattatgttttgattattatagttagaaaagtttttgcggtttgggttttagtgggttttagataagtttaggtttgtttggtgggtgtgtgttttgattttttagagttagttttaaaggatttttttgggagggattttgtttcgtaggagggagttaggttttttagtttgatttagtgataaattttggttgttttggagagggcgagattgaggttagttgggaagggggattgttttttggtttagttttattgggtttatgtttacgttttgtggatagttagagagttaagttggagagttgagagttgagagtgaaaatggaaaaagttattttattaaagtaggggttgtaaattcgtggtttgtgggttaaatttagtttgaatagtattttgaaatttgggaaattttatgtaaaaatttgattttttggttttttttttttaaaaaaattttttaaaaatttggtaatattggatgttagtttttatatggtaataatttgttgaagttgagtagtgattgttttttttagatgaggtatatattttggtttgttatagtttttattattttttattgtattgttttgtatgtgattttttttattaggtgttgtttatttatatttgtttaatttgagttttaatttttttagaaagtttttggagtttgtataatatgttttggagtttttttggtagagggtagttttgattgtatttttttatagtttttgtggttttggtattttaagggtatcggtttttagtgtggggtttggtgtttatttagagatggtaatggttgtagaagtagtatttagtgagagagaggtttttgtgtttagtaatgattatgttagaggtattggaattagagtaattttattttgaataggggttagattaagatttgttggtttgtattattagtaaattaaggtaattttaattacgaaatgagataggaggttggtataagatataggttataaagattttgttgataaaataggttgtagtaaagaagttggttaagatttattaaaattaagatgatgatgagaaaaatttttggttagttttattgttatatttttattagcgttacgattgtttatatatgttatggtaacgttaggaagttattttatacggtttaaaaggtagaagtatgaataatttattttttgtttagtatataattaagaaataattataaaaatgggtaattagtagtttttggggttgatttgtcgatgaaatagttatttttttatttttttatttttttaataaatttgtttttattttatggatttgttttaaatttttttttgtgtgagatttaagaatttttatttggggtttagaatggtttaggggacgaggagagaataggtagtatttgatgataatgggtttgttggtgagtatatgtaatatgttttagggtttttgtgtatttttgtatatttttttttttttgttacggtaattttgggagttttgtgttgatttagtaaagtcgtaaaatgaaagtaattagatttattatagatttcgtaagtgaaaaataaatttttaggtaacgaattatggagtttttgggatatgtttgttattgtagtattttttagttatttttaatatagatgtaaaaatgttgtttagtggatataattgtgttgttaaaaagatatgtttaagttttaatgtttgtgattgtgtttttatatggaaatagggtttttgtagatataattaagttaagatgagtgggttttaatttaaagtttgttgttatgataagaagataaaattttggatatagagatatatagtaagaagaattttatgtgattatggaggtagaaattggagtaatgtttgtaatttaaggagttgtttgtaatttagaagttagaagagataagaaggaattttttttttagaggttttagagggagcgtggttttgttgatatgttggttttggatttttagttttagagttttgagagaataaatttttgttgtaagttatttagtttgtagtgtttttttatagtagttttagaaaattacgtaggttgtgattagaagacgtcgcgatatgatatgaattttgttatttattcgggaagtttttgatgaatattgtttttggtgttggggtatagtggtattaaggtggtgttttattgatgaagaggtagaaattatagtgcgggatattaagtaggggatagagtattgagggaggtagtggtcgtgtgttatgtaagtttttttaagattttgtttttttatttttagtagttgttttttagttttttattgggaagttatttttttttaattttaggtttgaatttagtagatgtgatttattttttggttttatagtggtaatgtgatttaagttgggttaaaaggtagatttaggtattttggtgaggtgatgatttagatatcggtttgtgaatttattggagttaaggaaagttaattttgggattttagttggaggtataggttattttattttatttatattttgttttattgtgttgtgtagagatagtaattttgtaaattgaaggtttgtgattattttgcgttaagtaagtttattgatgttatttttttattagtatgtgtttattttttgttttcgtgttatattttggtaatttttgttatatttttaaattttttattgttattatatttgttatagtgatttgtgattagtgatttttgattttattagttaattgttttgaagtgttataaatgttaggtttttaagtttaagttaagttattatattttttgtgatttgtacgtatatatttagatggtttgtttttgttttaattgatgatattttattataaaagaagtgaaaatggttagtttttgttttaattgatgatattattttgtggaatttttttttttggtttattttggtttaaaagtttttttgttgagtattttgtgattttttatttttgttcgttagagaataatttttttttgattgtaatttttttttatttatttaaattttataaaacggttttatttttattttttttcgttgattttttttttggatttaattcgtttgtatttaggtgaaataaatagttttgttgtttatagaaagtttgtttggtggtttttttagatggacgtgagtgaaaataaattgtgtttatatataagggtgaattaaattatttttgtaaatgtgtgtgttttgattgttttattaattgattggttattttttatttttttttttttttgtgggtttttttagattttataattaataatattaaaatgaggttagttaataattttataatggtttttaagtgtttaggtgaaagggatggttgtatatttt

SEQ ID NO: 1247 - DNA, 13038 bp, Artificial Sequence
  chemically treated genomic DNA (Homo sapiens)
atttgagtttttttcggagatttaagattttggttaggataggtttatttgtttttgtatttttaggattaagtttagtgttagtatgtagaataaatataagagttttagattgagtaaatagaaagaagaattataattgaataaaagaataagttaaatatgttattgagtttattttgtatgttttttgtttatttaagtataaatataaagggtacgttgatatagttttttatatttttatttattgttttgaaatgtaatgtatggtagtattaaaggaaattttataagaattggtaggtgtaaggttttattttttatattattgttttttttattttaggtttttttttatttttttttttttttttttttgtttatatatttttttttggtagatatagaattaaatgttgtgtaatttttatttgtttttttggttaaaattgtttttttaatattttatatattgttaaattatttatatttttttagaaggattttattaatttgtaatgtaaagatatatttttattattaagattaagtcgatttttatttgattttattttaagtttaattttattgtagtagtaaattttgagtttttagagtgttaaaatagtgttttttatttttgtatttttggtgtttaataaataattgatatttaataaatttttgttgaaaatatgaaggtattttatttattgtatatgtaaaaattatattaataagtatttataaattatatatgtgtgtgtatatatatatatatatatgaataaaatttggtagagtaatttaatttaagttttttttatatattttaagtttgagtagataggtaaaattttattgaattaaattttttttaaaagtttgatattttattttatatttaaagattgttgaaggtaattttataattttttttaatggtttattttaatgttaataattgttaaattagaaggttgtttgtttttttttttttaattaaagttatttatagtataaagtaagtgtatttttttttttttttttttttttttttttttttttttttttttgtttttggtgaaaataaattagttggtttttggatataagtttgttaggttttttttgagttttttatttttataaatgaggtaagattatttatttattttttatatgagattttgggggtagtttttggttttaaatatattttttttttttttttatttttattttatttgattttagaatatgtgtgttttagaaattgagaatatggtttatgttattttgtattttaattataaatttttaaatttaaaaaaattattataaaatagaatatgatatgatttataagttatataaataaattttttttagagttggttatttaaagtggtatatatttattggagttatttgaaagaagggttatggtaagtttgggtatagaataaaacgtagttggtgattgattatttagaattttgttttaatgggaagtattttttattttgaaaaatttattaggttgtaattgaattttttggaaatttagaaatttaattatttatgaaagttaaatttattgaagattgaaaaatagaaattagagtaataaaggagttatttgtaataagaaatatcgttattagttagggagtttgcgtagtttggttagtttaatttttgtttaggttagatatacgggagtgttagggagttgtagggtagttggaataagtttagggatttttttgttagttattttgaaatattatgtttttaagttattgttttacgaaggtattaacgtatgttttttgtaattgttaagaatataggttttaatgtttaatagagttgtgtgaaaattttggagtcgtcgttttaatatttatatgaagttattatattatttattttttatgagtttatttttttatttgaaaaatagcgtgttataaagttgtgtgaaagatgtatataaggtatttggttagtatgtttggtatataatgtgggtttaagtaaaggttttggttttttagggtgatgttatatatttttatttgatttattatatgggttgatttaaaatttatttttttaaggataattttgttttattttttgttatttttaattattaattaattatttatttatatatttatttatttaataattgtttatttcgtgttaggaattgttttatgtattagagatattgttgtgaaaagaatatataaagtttttatttttatgggatttatattttattggtgaaagataataagtatataataatatatagtatgtcgacgtatatatttaatggtgtaatgatttattttttttataatttatttaattagtggtatttttttttttatatttttttgataggattttttattttatttttttttagttatgatttgtttttatgtgattttttagattttagtgattgggtttaatttagagttgatataagaatgatagaaagaaagtagatttttgtttttttgtgaagaaagaaaaattaggaaaaggaaattatagtgaggaattattaggtatttattttattattttttttttagaaaggttaaagatgttgtttagtgttgattttgaggtgaaatttagttatattaatatataaatgatttataagaatataaattgttatttttttttaaaatttttgtatttgataattaaaatgttgtatttaggaatattgggattgattgtatttgtgtgttagaaaagtggatattggaattttttataagtatgtagattatattttataggtaattattaatttttatgtgtttttaaaaatagaatttagaatattttttagagttttagaggtgagaatattttttttttattggttttagaattttttatcgttattttttttattttaatgtttatttttatgtttgtttttgttttggggttattataatgaattggaatagtgtttaaaggagagaaaaagggaagaggatgattagttgaagggaagttttaaagattttttttgttttttaattttagtagttgttgaagataaggttttagaagataggagattatataaatgtaaattttgaaaaattattgtaatattttattttttttttgaaattaaaaagtaatgattagtatatgtttgtatatttatttattttttttttttaataaatttgattaagtaatattttttagaatatagtttttaaatagtttataatttagttgaatgaatttaatttgtggtttttttttttttttttttgagatatatgttttgtttattttatagtatatgttagaaattttgtttgtttgtgtgtattagtttatttttatattgttataaaggaatattcgagattgggtaatttataaaggaaagaggtttagttgatttatagttttatatggttggggaggttttaggaaatttagaattatggtgtaaggtaaaggggaagtaggtatttttttgataaggtagtaggagagagaagattaatggaggaatttttaaatatttataaaattattatattttgtgagaatttatttattgttatgagaatagtatgacggaattatttttatgatttaatttttttttttttttaatatatggggattataattcgagatgagatttggttagggatatagagttaaattatattaatgtgtgataaattcgaatttattgtatttattataggaataattttgaatttagtttaaaattaaaattaggatttgaatttatatttagtggatgttaagtggtgtttgtagatgttatgttatatgtgttattttataatattgaaaagtttatatatagtagtagtattgttagttttttgtagattaaaaaaaatttgatatttagagattaaatgatatatttaatattatatagttaggaaatatttttttaaatatttagttttgttttgtttgattttaagtgttttttttattatatgatattattttattatattatttttggatttaaatttattttaattagatttaggaaaaataatatgattttaattaattagagtatatagagattggggagttttggttattgttttggttaacgaagacgtaatttttgttttaatttatttaaaagttttttaatagttattagtttattttttattttaagttagtatagtataatgtaattttgttttgatgatttaggattttatgtgttttagagtcgttattatgaatagtagttgttattaagaaattttgaagtgaatgtaggagatataggcgattgggttgaatgtatggggagtttgggattatttggaagataaatttaattatattgtaattatttaatttttttgtaattagaatggaaaaaggtttttaaatgaagattaattaaatgttttagttgagttgggtttaaattaattaagtttattttaatttttgtaattagttgattaattttattaaaagtgattgtttttttttttttgttatttggtaaataataaaaaaaatatgaagttttttttgatttttgtgtatagttgtgttattttattattagggagagaaatgagttgtataattattgtttgagatatgaattatttttgttcggagggtttagatttgtttgattttataaaaggagtttaaggtcgaagtgtaaacgtgtattgtttgttattttttaggttgatataattattaagttattgtgaggggatgaaggtgttttttgtatttggttttgttgttttttttattatggttttgacgttttttattgtagttttttttttagttgtagttttttttaggatttggaggaataattatcgtttcgtataggtttgtgaatttttgtttaatttttttttgtttttttgttttagaaaatttaaaagggtatagtgagaaaataagaaaaaaattttattgtttttttaaaattattttatataagtttattgaagtttaattgatgttattttttgtttatttagattggtgtttggtgtatattaggtatattatgttatatgattgaataaatagatgagtatatatttatttagttattttgttttataaagaattttaggtggtttgtgaaaattatgtaatataaaaggagtaaataagtatttttcgggaatgatgtaggaggaaaaatagaagtagaaaaataaaaatcgaggtataatttatacgttagaggtaggttgtgaatttagtgttaagttttagcggttataataaggagattttttgtgtttttattttttaaatggtttttatatttaaggtaattttgattaaaatttaaagtggattaagttttttttgggtgttaatttattttttatttgaaggttttttttttttaaagtatattttttaatgaagtaaaagtttatgtataaagtatataataaagtttatgtagtaagtataaagtataacgtttatgtatttaaattttgtgtattttttttttttgagattttttttttatgattgttggaaagggtttgatagaaatgatttatatttaaatattttataaagattgtttgatttaaaatgatttttatatatatatatatatatgtttttaagcgtgttttgtttttaaaagaagggtggtatttttaatttaaagaaatggatgtttatagatggaatttttaatattagtgaaagatatgtagaggaaatgtttttgtatataggttttttttttaagagtttgttaatattatagtatatttgtgattattagtttcgttttagggttgtttttttgattgttaggttgtatttgtgtatcgtttggttgtttgtatcgtagagttgatttgtatttatgtgtaatggtatgtttttatcgattgtttttgttatttatttttattaattggttagtttttcggttatattagttattaaatatttaaatattagtttcgtagatgaatagtatagttgatgtttagtataattatgttgaattgaattttttttgattttagtttatttttagatgaattaaatttaaaataatttaggatattgggatttttatttaattgtattttgtttatgttatttagttttaggtgttttttttttaaatgtaattttttttattttgttttatgttattgtgattttgaaattaaagaggttttgtgatttttagaaggagagttatgttgaggttagaatggatttgaggtgttgggagattttttttttaatttatagtttaggaaaattatagttggttttgttttttagtttatagattgtttatgattgtttttgtgttataatggtagaggttagtttagaagtaaagaatattaattattggttttttgtagaaaaaattagttatttttgattagtttattaaggaataaggttagattagttaagtattagttttatggaagatagttttttatggacgtgggaagtaggaggttggaggggtgatggttttgggacgaaattgttttattttagattattaggtataagatttttaaaagagtatgtaatttaggttttttatatgtgtagtttataatagggttttgtttttatgcgaatttgatgattttgttgatttgataggaggtagagtttaggaagtaatgttggttcgttatttattttttgttgtggggttaggtttttaataggttatagattggttttcgggtgtagtttaggattaggggatttttgggttagatatttttgggtggagttatttttgttattttagttggttaggagttagttaggtacgtttagaaatagtagtatggtttgggaatattggggattttttgtgattttttatttttttttttttaaaataaattaatttttttttgttttttttatgatatatttttagaaagattttagattaaggagtagggaaatttgtttatatttttttatttgatatatagtatttttgtttgtaatggttttggtttttagttttgggtagggatatttaggagtttggaatgatttggttgaatttttaatgaggattataatgataggaaataattatttaataatattttattttataatttatagaaatattatataataattttattagttttataaaattataaataaaagtagtaaaataggtagtataagtttatgtattgaatgtttatagtatggtatatgttggagaaatatgagagaattaaataaattaagtttttgtttttatgttttttttatgaggatgagggagttggtgggaaggtgttgggagaagataaataagttaattaatgagtgtataagatgttttagaaagtgattagtgagtttggaaagaagttaattaggatgatagagagttgttgattgggatagtggtttggtgagggagtatttttaatggcgtagtttaggaagttttttcggaggaagtgaattttgagatgaatttgagttgtatgaaagagttagttacgtgaagatttggagatagggtagtttagacggaggaaatagtagttgtttggaatgtaattattaggtttatgtgattagagtttagaggttaggaaagagggttttagaggagttttaaggataggtgaggttagtaggttttttggtgtttggtggtttgggttacgttaagtagagagagtgtttagggatgttttttttttgttaagtgatttgttaggttattcgttaagaaagaataaatggtttttggaaatattagagaggttacgtttttaaatattatatattttttttttttttaaaaaatttatatttgaaaagataaatagttttttgatttatttaatgtttatttgtgttttttaaattttgatttgttaatttgtttaaatgttttgaaaatggtaagatggtaaaatgtttatttatttttataatttaggattgtttgtttgttaaataaaattagtgttaatatgatatttaaaatatattttttaaattatgtttaaaaataaaaattttaattattatattattatgaatttataattaaggaaaatgaaaatatatattgttaatttaggtgtttttattattattttattttttatgataaagattttttaaaattgttattgtttttaaaatgtggtttttatttttttaattattatgttataagaaaattttgattttatattatttttataatattattttaaatagttagaaatattttagaatatgagttataatttatttgattattttttttaataaatagattatttttatatgaataaggtttttataagtatttttgtatattaagttaatttaaataattatttttttaggataggtttttagatatggatttaatgagtaaaagggtatttgaaagtattttgttatatttaaaagtatttatattgaggattttattggatttttatatttacgtagttagtagggtagaaattattttatagatgagaaaattgaaattataagaaattaaaagaattgtttaagcgtgttagtgatatagtttggattagaatttaggattttttagatagttttaaaagtttttataaatttatttgtgtgattgtaaggaatatggttgtgttgtagttaagcgggtataggttaaggtaaatattttgcgtgatttagcgagtttagggtgtaggcgtatatttttatttgttattatagttatgtagttataatatgggaaggttattatttagttttaagttattattgtttgtaaaaggtataattgttttgttgatattgtataggagtttttttatttagagaaatagagagagagttaaaggtatttattttgtaggcgggtaggagggagttaggaatcggtttgtgtttagagagagaaagagttaagttgttgattttgaagggtgggttagttacgtagatgtgtgtgggagtagtcggtttaagtagtcgaaatagggcggatagtgtgagaaagttgttgatgagagagttgttgaataaaattatatttatttgtttatgtttttattttttttttgaggatttttttagttatttgttatttatttattttttttagattttagtatgggttggaatttgatattgagtatgatatttagtgtagtcgtggttttaaatttgattttggaatttgatagtgattttgttaaaaaagaaaaatgttgaggaaatgtattttaagttttattttgttttggagcgtatttaaattgagttttaaatttttaagttttaggaaggatattaggaaaatgtacggaataagggtttggaagggagatttaagttgttagtttgtaggaatggaatttttggttttttgtatttttatttgttagatattagaagagaagtggagagaggattatttgataattgatttaaaaattttataattttaataatgaggaagtggggaagattggagggaaatgggataattttggtgaattttgaattttttgttttagtgttaatattaagtgttgagttaatatatgtaagtgttagagtattatatgaaagtaattttaagtatatatttaagtgtttgatagaatattgtgatagtgaaaagtatgttaaaattttgttagtaattttagtaagaaagtgtttagagttttgagtttttagtattttaggatatttgataattttttaaggaaatatatttttatattttgtttaaagaaaaagcgtttaaatattaattgagtatttattttgagtttagaattgagttaaatatagggtttgtatttgtgaaggtaaaacggtgtttgattggaaggaggttgtaaataagtaggtgagagtgataagaaattggtaggaagtgatggtttatggtgtaatgagataagtgttttattagaataagaattatattttatggaagtattaattagggagagattttgtttatattattgtagtgatgaatttttgtttttaagaaggaatagtttttaattttatttttattttattaaaaggtattattttaattttgtttatatgattagttagaaattttttgtgttttaagattaatattttgtgtatattttaaagaaataaatagttggttataaaaattacgtaggtttatagtaaaaaaaaaaaaagtaaaagttttatttttaaaaatatattattttaaatttattattaaggtttaattattgttagttttttagattatattttttataatatttttttgtgatttagggttaggattagtgtgagataattaaagtaggaatgtattttgtatttaaaattttgaaattttgtttattatggatttttttggtatttatttttttttttaattttgtattaaattatgatttattttgattacggagtttttggtaatttattattggttttattttagttttggtgatatgattgggatggtgtgattagatattatttatgtttataaatatggtttatgttgtaatagtagtggtaaatacggtaaatatgttttttatttaatttattatgagtatttttttttatataatttattttgtgaaataaaaattagaatgtagagtgtaatatataatttaataggagaataaaatatttgaaattaatgattttagagatatagaggatttggttttatatatggagtttaattttgaggagtataatttagatattattataagtattgtattattatagtattaatttgtatagataggaataatttattttattaattttatttgtaaaaaaaaaaagatgagaaatattaatatttaaggtggtttaattagagacggaatggaattaaatagtcgtagttttgttttagaatatttaggttaggttttagagtttgggtattttatgttttttttttttttttttttttttggttttttattttatttaaggtttttataagggataataatggggaaagtgatttttttttataggaagggtagggagtaaaggattagttgattttgtagtgaaaaaatagcgtattttttttaaatatgagtgatatttatttttttttattttttttttagtagtaatggtttatgtttattgtaaaaatttttggaatataggaaggaataaagaataaattaagttatttgtaattttattatttagatataattaatattaatatttaggtagatttttttttattattgtatgtgtgtgtatgtgtgtatatgcgtgtatatgtatgatttatttagaaaattattattataattttataaagatttttttttttttttttttagtatattgttattatataaagagtatttttttatattattaaatatttattttttaaaattgattttagtagagttttagtattgttttatataaatataagataatatatataataaattttttgatattagatattaaggttatttttaattatttattatttttatatatatgttaaaaatatgtgtgtataatatgtaagtaaataatttgtatagtttatatgtggtaatatatggttaatatataggttaataatatgtaatttatatttaataaataaatatgtttatattatataaatataaaattgtatataattaaatataattagtgttttgtatttatgggatttgtatatatggaattaaataattgtggattgaaaatatttaggaaaaaatcgacggttgtatttgttttagggaagatatgtttaaaatagatattttttttgtagtttttttttaaataatatagtataataattatttatatagtatttatattatagtatatattataagtaatttagagatgatttaaagtatataggaggttgtatttaagttgtatgtaaatattatgttattttatattagagatttgagtatttgtggatttaggtatttgagagaggttttgggattaatttttttatggatatgaaaggaggattgaatttttagttgttttttggttatttttttaaaattagttgagtaggtgaaatttttgagttaaaggtaggttttaattttgtatttgtatgtttttgtattattcgttttattttaattttagttttgagttatagaaaagtgttttgaataatatatattgaggggttttatgtttttttgtgtaaatgaaagttttataatttatggtttattttatttgttttaagagataaagagttttgtttaggaaagttgttttatggaaataaaatttagtttatatattaaatatatttgaatttattaaaatttttagttgaaaaaaaggtggattttttgtttttgtaaagtgtgagaggttggaatataatgtttttaagagttaaaagtatattgattttgtattatgtataatggaaagatgatattaataattgtttattaaagaaattagatagtttttgttttgtaaattgggtaaagaattttagtgataaataagtgatttatggaaataatgtttatattagtttttttttttgaattttttttttttaaaaaaattagaagtaaaaaggtgtatttgttatatttattgtattgtagaaaaattataaaatgtaggtggataaaaggaaataattaaataatttataatttttattatttaaaattaattatcgttaataatttggagtatagttaagttttatgtaaataaatatgtttattttttttataaatgggaaaatattttatatattgtttttaatatattaggaatgttgttttttgttttatttgagtatgagtattttttagattacgttgtagacgcgttagtttgtttttttattttagg

SEQ ID NO: 1248 - DNA, 13038 bp, Artificial Sequence
  chemically treated genomic DNA (Homo sapiens)
tttgaaatggagaggtaggttgacgcgtttatagcgtagtttgggaaatatttatgtttaggtaaggtaggggatagtatttttgatgtattaaaagtagtgtgtagagtatttttttatttatgaaaaaagtagatatatttgtttatataaagtttagttatattttaaattattaacgatgattggttttgggtagtggggattatagattatttaattatttttttttgtttatttgtattttatagtttttttataatgtaatgaatataataaatatatttttttgtttttaatttttttaaaagaaaaaaatttagggaaggaagttgatgtgaatattatttttatggattatttatttgttattgaagttttttatttaatttgtaaaataaaggttatttggtttttttggtaaatagttattggtattatttttttattgtatataatgtaagattagtatgtttttaatttttaaaggtattgtattttagttttttatattttataaaggtagagggtttattttttttttagttgaggattttaatgagtttagatgtgtttagtatgtgggttggattttgtttttatgagataatttttttaggtaaggttttttgttttttgaagtaaataaaataagttataaattataaggtttttatttgtataaaaagatataaagttttttagtatatattgtttaaaatatttttttatgatttagggttgggattagggtaaaacgagtgatgtaggggtatgtaaatatagggttgaggtttgtttttggtttaggaattttatttatttagttgattttaggaaaataattaaagagtagttaagggtttagttttttttttatgtttatgggggaattggttttaggattttttttagatatttaaatttatagatgtttaagtttttgatataaaatggtataatatttgtatataatttaagtatagttttttgtatgttttaaattatttttaaattatttataatatgtattataatataaatgttatgtaaatagttgttatattgtattgtttagggaaaagttataaaaaaaatgtttgttttgaatatgttttttttgaaatagatgtaatcgtcgatttttttttgaatatttttaatttataattgtttgattttatgtgtatagattttatggatatagagtattgattgtatttaattatatataattttatatttatatagtatagatatgtttatttattagatataaattatatattattagtttatatattaattatatattattatatataaattatgtaaattgtttatttatatattatatatatatatttttaatatatatataaagataataagtaattggaagtaattttaatgtttgatgttaggggatttattatatatattattttatatttatatgagatagtattaggattttattaagattagttttgaaaaataaatatttaatggtatgaaagaatgttttttatgtaatggtaatatattgagaaaagaagaggagaaatttttataaggttataataataattttttgaataaattatatatatatacgtatatatatatatgtatatatatataataataaaaggaagtttgtttgaatattaatgttgattatgtttgggtaatgaaattatagatgatttaatttattttttatttttttttatattttaaaagtttttataatgagtatgaattattattgttggggaaaaaataaaaaggagtaagtattatttatgtttggagagggtacgttatttttttattgtaggattagttgattttttattttttgttttttttgtgagagaagattattttttttattgttgttttttgtaaaaattttaggtgagatgagaagttaagaggaggaaaagggagagggaatatggggtgtttaggttttgaaatttagtttaggtgttttgaaataaagttgcgattatttggttttatttcgtttttagttagattattttaagtattgatgttttttatttttttttttttgtaaatgaggttgatgggatgaattgtttttgtttgtgtaagttgatgttgtgataatgtaatgtttgtggtaatgtttgaattatattttttagggttaagttttatgtataagattaggttttttgtgtttttgagattattgattttaaatattttgtttttttgttaggttatgtattatattttatattttagtttttgttttataaaataggttatataagggaagatgtttatgataaattaagtggaaagtatgtttgtcgtgtttattattgttgttataatatgagttatgtttataaatataagtggtatttagttatattattttagttatattattagggttgagatgaggttagtggtgggttattaaaaatttcgtaattaagataaattataatttaatgtagaattaaaaaaaaaaataaatgttaaaaaaatttatgataaataaaattttaaaattttaaatataggatgtatttttgttttggttgttttatattaattttggttttgaattatagaaaagtattatgaaagatatagtttaagggattaatagtggttaaattttaataatggatttaagatgatgtatttttaaagatagggtttttattttttttttttttattatgaatttgcgtaatttttataattagttgtttgtttttttaaaatatgtataaaatgttagttttagagtataaaaggtttttggttggttatataggtaggattgaaatagtattttttaatgaagtaaaaataaaattagaaattgtttttttttaaaaataaaaatttattattgtagtgatataaataaaatttttttttagttggtgtttttataagatgtgatttttgttttagtaaaatatttgttttattgtattataaattattattttttattaattttttattatttttatttgtttgtttgtaatttttttttagttaggtatcgttttgtttttatagatgtaaattttgtgtttgatttagttttaggtttagagtagatgtttagttaatgtttgagcgttttttttttaggtaaaatatgaaagtatgtttttttgaagaattattagatattttgaagtattgagagtttagaattttgggtatttttttgttaaagttattgataaggttttggtatattttttattgttataatattttattaggtatttaggtgtgtatttagaattgtttttatgtgatgttttaatatttgtatatgttggtttagtatttaatgttggtattgggataaagaatttagaatttattagagttgttttatttttttttaattttttttatttttttattgttaaaattgtagaatttttgggttaattattaggtggttttttttttattttttttttggtatttgatagataaaagtataggaggttaggggttttatttttgtaggttagtagtttaggttttttttttaagtttttatttcgtgtatttttttagtgttttttttgagatttaagagtttaaaatttagtttaagtacgttttagaatagggtgaaatttaaggtatatttttttaatattttttttttttggtaaagttattgttaggttttagggttaggtttggggttacgattatattaaatgttatgtttagtgttaggttttagtttatgttgaggtttgaggggaatgggtgggtggtagatagttgaaagaatttttagggagggggtgagggtataggtagatgaatatggttttatttagtagtttttttattagtagtttttttatattgttcgttttgtttcggttgtttgagtcggttgtttttatatatatttgcgtggttggtttattttttagggttagtagtttaattttttttttttttgggtataagtcggtttttggtttttttttattcgtttgtaagatggatatttttggttttttttttatttttttgggtgagaggatttttgtataatgttagtagggtaattatattttttatagataatagtggtttagagttaagtgatggtttttttatgttatggttatatggttgtgataataagtggagatgtacgtttgtattttaaattcgttgagttacgtaggatgtttattttggtttatgttcgtttggttgtagtatagttatgttttttatagttatataaatagatttgtgagaatttttaaagttgtttgaaaaattttaggttttagtttaggttgtgttattaatacgtttgggtaatttttttaattttttgtggttttagtttttttatttatagagtggtttttgttttattggttacgtgagtgtgaggatttaatgaggtttttaatatgaatgtttttaaatgtgataaaatatttttaaatgtttttttatttattaagtttatgtttggaaatttattttgaaaaaataattgtttaaattagtttgatgtataaagatgtttatagaagttttatttatatggaagtaatttatttgttaaaggaaatggttaaataaattataatttatattttggaatatttttgattgtttaaagtgatgttatgaaaatagtataaaattaaaatttttttatgatataatagttagaaaagtaaaaattatattttgaagatagtaataattttaaaaagtttttattatagaaaataaaatggtagtaaaaatatttgaattaatagtgtgtatttttattttttttagttatgagtttataataatgtggtagttaaaatttttatttttaaatataatttaaaaagtatgttttaaatgttatattgatattaattttgtttaataaataaataattttggattatgagaataggtaagtattttgttattttattatttttaaagtatttaggtaaattagtaaattagaatttaaaggatataagtggatattaaataaattaagaagttgtttatttttttaagtgtagattttttaggggagggagaggtgtatggtgtttggaaacgtggtttttttggtgtttttaggagttatttgtttttttttagcgagtgatttaatagattatttagtaagaagagagtatttttaagtattttttttgtttagcgtgatttaggttattaggtattagaggatttgttggttttatttgtttttgggatttttttgggatttttttttttgatttttgagttttagttatatgggtttgatgattgtattttaagtagttgttgtttttttcgtttggattgttttatttttaggtttttacgtgattggtttttttatgtagtttaggtttattttaaagtttatttttttcgagaggattttttggattacgttattaaaaatatttttttattagattattgttttagttagtaattttttgttattttgattaatttttttttaggtttattgattattttttgaaatattttgtgtatttattggttgatttgtttatttttttttagtatttttttattagtttttttatttttatggaaggagtataagaataggggtttgatttgtttgatttttttatatttttttagtatatgttatgttgtaagtatttaatatatgaatttatgttgtttattttattgtttttgtttgtgattttatgaggttgatgaggttgttatataatgtttttataaattataaggtgggatgttattaaataattgttttttgttattgtgatttttattagaggtttagttagattattttaggtttttgagtgtttttgtttagagttgaggattagggttattgtaagtaaaggtgttgtgtgttaggtgaggagatgtggataagtttttttgttttttggtttaaggtttttttgagagtatgttataagggagatagagaagggttgatttattttggagaggaagaagtaaggaattataaaaggtttttaatatttttaggttatgttattgtttttaaacgtgtttagttgatttttgattagttagaatagtaagagtgattttatttaagagtgtttagtttaggggttttttgattttgggttgtattcggaaattagtttgtggtttgttaggaatttggttttatagtaggaggtgagtggcgggttagtattattttttgagttttgttttttgttagattagtagagttattagattcgtataggagtagaattttattgtgaattgtatatgtgagggatttaggttgtatgtttttttgagaattttatgtttgatgatttgaggtggaatagtttcgttttaaaattattatttttttagttttttattttttacgtttatgaaaaattgttttttatgaaattggtgtttggttggtttagttttattttttaatagattggttaggggtgattaattttttttgtaaaggattaataattaatattttttgtttttaggttaatttttgttattgtggtataaaagtaattatagataatttgtaaattaaggggtagggttaattgtagtttttttgaattgtggattagaaggggggttttttaatattttagatttattttggttttagtatggttttttttttggaggttataaaatttttttagttttagaattatagtggtatgaggtagggtagggaaaattatatttgggaagaaggtatttaaagttaggtggtatggataaaatataattgaataaggattttagtattttgagttattttgaatttagtttatttaaaagtgggttaaagttaaaagaagtttagtttaatatggttatgttgggtattagttgtgttgtttatttgcggggttgatatttaagtgtttaatgattggtatggtcggggaattgattagttaataaggatgagtggtagaaataatcggtagggatatgttattgtatatgggtgtaaattagttttacgatgtagatagttaagcggtatataggtgtagtttggtagttaggaaagtagttttgaggcggagttggtgattatagatgtgttgtaatgttggtagatttttgaaagggaggtttgtgtgtaaaagtattttttttatatattttttattaatgttggaaattttatttgtagatatttatttttttaggttaaggatgttattttttttttaaaaataaaatacgtttggaagtatatatatatatatatgtagaaattattttgagttaagtagtttttgtgaaatatttgaatatggattatttttattagattttttttagtagttatagaggagagattttaaaagaggaaaatatataaagtttaagtatataaacgttgtattttatatttattatataaattttgttatgtattttgtatataaatttttattttattggggaatatgttttagggagaaaaggtttttaaatgagaagtgggttggtatttaggaagaatttagtttattttaaattttgattagggttattttgaatataagagttatttaaaaagtggaaatataggaaatttttttgttgtgatcgttaaagtttagtattaaatttataatttgtttttagcgtgtggattatgtttcggtttttatttttttgtttttatttttttttttatattattttcgggaagtatttgtttgttttttttatattgtatggtttttataagttatttggaattttttatgaagtaagatagttaggtagatatatatttatttatttatttagttatgtaatatggtatatttaatatgtattagatattaatttaggtggatagaagatagtattagttagattttaatggatttatataaaatgattttaaaagaataatagaattttttttttatttttttattatgtttttttaggttttttagggtagaggagtaagaaggaattgggtaaaaatttataaatttgtgcgaggcggtagttgtttttttaggttttgggggaggttgtaattagggagggggttgtagtggaaaacgttaaagttatgatgaggaagatagtaaggttagatgtagggagtatttttatttttttatagtagtttggtaattatattagtttgggggatggtagatagtgtacgtttgtatttcgattttgagttttttttatagagttaaataggtttggatttttcgagtaaggatgatttatgttttaaatagtaattatatagtttatttttttttttgatgatggggtaatataattgtatataggaattagggaaagttttatattttttttgttatttattaagtggtaaaaggagaaaaatagttatttttaatgaagttggttagttagttataaaaattgaagtaaatttgattgatttgaatttaatttaattgaaatatttgattagtttttatttgggggtttttttttattttgattatagaaaagttagatgattatagtataattgaatttgttttttaagtaattttaaattttttatgtatttaatttaatcgtttgtattttttgtatttattttaaaattttttagtagtaattgttgtttataatgacggttttgagatatataagattttgaattattaaggtaagattatattatattgtgttgatttagggtggaaagtgaattggtaattgttagaaagtttttggatgaattaaggtaagagttacgttttcgttaattaaaataatagttagaattttttaatttttgtgtattttggttaattggagttatattgttttttttgggtttgattaagatggatttggatttagagatgatatggtgaaatggtgttatatggtgggaaaagtatttagagttagataaagtaagattaaatatttaaaaagatattttttagttgtgtgatgttgggtatgttatttaatttttgaatattaagttttttttaatttataaaagattgataatattattattatgtataaattttttagtgttatggagtaatatatatagtatgatatttgtaagtattatttggtatttattagatgtggatttaaattttaattttgattttagattagatttaaggttatttttatagtgaatatagtgaattcgagtttgttatatattaatatggtttggttttgtgtttttaattaaattttatttcgaattgtaatttttatgtgttgagggagggaggggattggattatgggggtggtttcgttatgttgtttttatgataatgagtgagtttttataagatatgatggttttataggtgtttgaaagtttttttattgatttttttttttttgttgttttgttaagaaggtgtttgttttttttttgttttgtattatgattttaagttttttgaggtttttttagttatgtaaaattgtgagttaattaagttttttttttttataaattatttagtttcgggtatttttttatagtagtgtgagaatggattaatatatataggtaaatagaatttttggtatgtattgtgagatagataaaatatgtgttttagaagaagaaaaaagaaaattatagattagatttatttaattaaattgtaagttgtttgaagattgtattttaaaaaatgttatttaattaagtttgttaaaaaaaaagaatgaatgaatgtataaatatatattaattattgttttttggttttaggaaaggaataggatattgtaataattttttaaaatttgtatttatatggttttttgttttttagagttttatttttaatagttgttaaaattgaagaataaaaagaatttttgaaatttttttttaattggttattttttttttttttttttttttttaaatattgttttaatttattatgatggttttaaagtaaagatagatatggaagtgaatattggagtggaaggaatgacggtaagaaattttgggattaatagagagaaaatatttttatttttaggattttaaagagtattttaggttttgtttttggaagtatatggaagttaataattgtttatagggtgtgatttatatatttatagaaggttttagtatttatttttttaatatataaatgtaattaattttaatgtttttaagtgtaatattttaattattaagtgtaaaaattttgaagaggaataataatttatgtttttataagttatttatatattagtgtgattaaattttattttagagttagtattaggtaatatttttgatttttttagagagagaataatagagtaaatgtttggtaattttttattatgattttttttttttgatttttttttttttataggggagtaaaggtttgttttttttttattatttttgtattaattttaaattgaatttaattattgaaatttaaaaaattatatgaaagtaagttatgattaaaagaaaatgaaatgagagattttattagagaaatatgaaagggaaaatattattgattaaataagttatgggagaaataaattattatattattaaatgtatacgtcgatatattgtatgttgttatgtgtttattgttttttattagtagaatgtaagttttataagggtaaggattttatatattttttttatagtagtgtttttagtgtatggaatagtttttagtacgaaataaatagttgttgaataagtgaatgtatgaatgagtgattaattaatgattaaagatagtaagaagtaaaataagattgtttttagagggataaattttaagttaatttatataatggattaaatgaagatgtgtagtattattttaagaaattagaatttttatttaaatttatattatatgttagatatgttagttaagtattttatgtatattttttatataattttgtgatacgttgttttttaagtgaagaaatgggtttatggaggataaatgatgtggtaattttatatagatattaaggcgacggttttaggatttttatatagttttgttagatattgaagtttgtgtttttaatagttataggaagtatacgttggtgttttcgtggagtagtgatttgggaatatggtattttaaggtggttggtagggagatttttaggtttattttagttgttttgtagttttttggtattttcgtgtgtttggtttgagtagaagttgggttgattagattgcgtaagttttttggttggtgacgatgttttttattgtaaatgatttttttgttattttggtttttgttttttaatttttagtgaatttaatttttataaatgattaaatttttagatttttaaagagtttagttataatttggtaaattttttagagtaagggatgttttttattgaggtaggattttgagtgattagttattagttacgttttattttatatttagatttattatggttttttttttaaatgattttagtaaatatatattattttgaatggttaattttaaaaaaagtttatttatataatttgtaaattatattatattttattttgtaatggtttttttaagtttagaaatttatgattagaatatagaataatatgaattatatttttaatttttagagtatatatattttagaattagatggaataaaaatagaggaaagaaaaaagtgtatttaaaattaaagattatttttagaattttatatagaaaatgagtgaatgattttattttatttgtgagaatgagaagtttagagaggatttggtaagtttatatttagaagttaattggtttgtttttattaagaatagaaaaagaaagagaaaaaggaagggaagggaagaaaaaaaaatatatttattttgtattgtaggtaattttggttagagaggaagaagtaaatagttttttgatttggtaattattagtattaaaatgaattattaaagaaggttgtgaggttgtttttagtagtttttgagtataggatagaatattaagtttttagaaaagatttggtttagtggggttttgtttatttgtttaggtttggggtatgtgaaaagaatttagattagattgttttgttaaattttatttatatatatatatatatatatatatatatatataatttataaatatttattgatataatttttatatatataataagtaaaatatttttatatttttaataaagatttattaagtattagttgtttgttaggtattaggaatatagagataggaaatattgttttaatattttaggagtttaaaatttattgttgtaataaaattgaatttggagtaaaattagataaagatcgatttaattttagtgataaaaatgtgtttttatattgtaaattggtagaatttttttaaaaaagtataaatgatttagtaatgtgtaaaatattaaaaggataattttaattaaaaaggtaaataaaaattatataatatttgattttgtatttgttaaggagaagtatataggtaaaaaaaaaaaaaaaaaggaataaaaggaaatttggggtaaagaaaatagtagtgtgaggggtagggttttatatttattaatttttataaaattttttttaatgttattatgtattatattttaaaatagtaagtgaaagtgtgaaagattatattaacgtattttttatatttgtatttgagtaaatagaagatatataggatgaatttagtggtatatttaatttatttttttgtttagttgtgatttttttttttatttatttagtttagaatttttgtatttattttatatgttggtattagatttagttttggaggtataaaggtaaataaatttgttttaattagagttttagattttcgggagagatttagat

SEQ ID NO: 1249 - DNA, 5675 bp, Artificial Sequence
  chemically treated genomic DNA (Homo sapiens)
ggtgattatagttaataatttattgtatattttaaaataattaaataataagttggaatgtttgtaatataaggaagtgattaatgtttgaggtgatgaatatttttatttattttaatgtgattgttatatattgtatattagtattaaaatattttattgttaggtatagtggtttatgtttgtaattttagtattttgcggggttaaggtgggtaaattatttaggtttaggaatttgaaattagtttgagtaatatggttttataatttagatggaatatgttgttttgttagtatttttgtttagttagtgatatttaaaattgtggaaaatatagatgaaattttataaatttttatgattagtatgatgtgaaaaagaatatataggtataaagaaattagaggaaatatatagttaatattgttagtagtgtttttttttttgggttatgattataaaagatttatttttttttttgtatttttttatatattttaaattttttataataaatatttaacgttttatttaagtatgtaaaatttatttaaaatgttttgtagaaattagtgtattagtttgtttttatattgttgataaagatatattagagattggaaagaaaaagaggtttaatatggatttatagttttacgtggttgggaaagttttataattatggtagaaggtaaggaggagtaagttatgttttacgtggaaggtagtaggtaaaaaaagtgtttgtgtagggaaattattattttaaaaattattagattttatgagatttatttattattatgagaatagcgtagggaagatttatttttataatttaattattttttattgggttttttttacgatatgtgggaattgttggagttataatttaagatgagatttggttggggatatagttagattatattatatggttttttattaataatggaataagttttaagtattttagttatagattaatggttttttatgattggattttaatttatttttttataattttattttttattttttattattattttttatatattttttattttaataaaaagtaattttttgacgttttttatatagagttttttttgattttgtatatttgtatattttgttattgaatttttttttatttttatttttgtttttagttaaaaggttaagaagtaatttttttttatttttagattattttaggtttattttatttgttattttatttatgagttttttttaaaggaaatatttaaagtaagtaagtattttttgtttaattcgtgtataattttttatttttttttttttttgagatagggttttgtttttttgtttaggttggagtgtagtggtattattatagtttatttttagggtttaagtgatttttttgttttagttttttaaatagttgggattataggtgtgtattgttataagtggttaattatttttattttttcgtggagttgaggtttttttatgttgtttaggtgggtttttaatttttgggtttaagtagtttttttattttagttttttaaagtgttgaggttataggtaggagttattatattaggtttatgttttatagaatgaattatataggggatttttttttggttaggttatatttttttcgggcgggtgtgcgtgcgtgcgtgcgggcgggcgtgcgtgcgtgggggttggggggtcggtcggcgggtcggtcggtcggtttttttttttttttttatttttttttttttttttttttttatatttttttttttttttttttttttttttttttttttgtttttaaatagttagtttgtttatttttttttttttattaaaattttttaaattttatttttaaatttatatttttagtttgggtattttgaagtttttgagatttagatatttgataaatgaatgtatagttgaaataatgattatattagttattagttagaggtagtaaggattttgtataattatgtttgattagttatggagaagtgtgataaataggaagataaatgtgaaaagttacgagatagaatgttatttgggattattgttagtttttaaatttaaggattagattgaatgtaaatttaattttaagtcgttgatttttgggaggttagatttataaaattagttattatttgatttttgtatttatttaattatataataaatgattgttttgtggaatagttattttgattttttgttggaaatgtttatttttttttcgttagtatttagtttttttttttatatttggagtgtttgtttttttttttttttttttttatttttttttttttttttttttttttttttttttttttcgtttttttttatatttagttgttttttaattttatttatttttttttattattgtattgatttttaaaatatattttataaaatgtaatttgattgttttatgtacggttagaaaatttttggttttataagattagtttgagtgttttgtagatatatgaatgaggattttaattatatattagagagattttagatgatagtttgatttttttttgtggaaatataatttttaaaaaatttagtttttagagtatttagtatatatgatatgtagaatttgtaaatttagaaatgtttgtatgatttttggattttttgatttttaatttatttgtttgatatttgttatgagttttttatttataattaatatattatttagttttttaagtaatttttggttatttattatatattagatattatgttaagtattaggaatatagaattaaatgaggtatggtttatatttttaagtagtttatattagaatgagagagatagataaattattttattatagtttagtgtggaaaatagagtagtagaggtaggtataaggtattattgaataatgattaatgattttttttgggatttgggaaatattttttagggaagtcgtcgaagttgttttaaaatatagtaaatttttgtatttagtttaggaatagtatggtttattttgttaattatattttaatagttggaaaagtaaatatattatttattaggtttttttttaaattttaaatatgttttataagttataattttagagaaaatttataaaggataaattttaatatagaaggaattagagttgttatagtttttatatttttaattttttaatattttatttgttgggttttattgtttttttttggaatttatattattgttattattttgttttttttgtttttatattaatgtggttaaatattttttttgtattttaattaggataagatatggttttttttttttattaaaggaatggagaattatagaatattagttttaaaatgtttttaggttaggtgtcgtgatttatgtttgtaattttagtattttgagaggttgaggtaggagaattatttgagtttagagttcgaaattagtttgggtaatatagtgaaatttttgtttttattttttaaataaaatttgaaaaagtttttagatataatttagtttaaaaatgaaggtttaaatgtgatgtatagttttttgttaagtggttattatttgtgtgggtatttttagttatagggattttattgttatagagaaatttttttaaatttattgggtaaaatttttttaatgtttattaagaaatatataaaaaataaagtaaagaagaaaatgtaaaagagttataaatgagaggaagtaaaatgggtatttattaaaggtttaataaatgtatatttgtatttattattttattgagtttttatttttaagatgtttttttttttagtaaataaataagtaagttagtaaagaaagaaagaataaataaaatgtggtgattagggaagtattgaggagatggatggtggtaggtggtaagaggattataaaagttttataaaatgtttttttttgaatatgtttagagttttgtatttaagtatttattatatattaataatgtgagtaatattttatttgataaagaaatagaaaagaaaggaaaggaagaaaatagaagagtatgaagagaaaatttaggatggattttgttttttaattttaaagtatttgttaatttgaatttagggaggaggggaaaaggttgaaagagaataagatatgtgtagaagataaggatagagagaattttagttcggtaagtaatgtaatttattttagttttataattatttatggagtagttacgtgggtttattatttattaataaattggttatagaattaaaattaatttaaagggaatatattttttttttttttatagattttttttgttttattttgtttatgaggtttttttttttaagaattagtaaatttaacgatagttaatagtaggtattataaattagatttagaaaaataaattattttttttaaattttttttagatattattttttatgttttgagtataattgtatatagtatagattatagttatgtatgtatattttttatttatattttttatttgtttttataatgttttttttaaaataaaattgtttttagaagttttgtataattttgatttttattaagttaatttatttttttttttaaaaggataaatataaattgtttagtgaattttagttaatttttttagaagaaaaaaaatgttttagtttttttttttattaagataggaagtattttttggagattaattattgtgttgttttgtaaaattgggaaggttgagagaaattagtaaagtaggttgtattattttattttgaatttggaatgtttggaaatggttttgttgttatttggatgaaagtaaggatgagttaagttgcgggtgatttaaataaatattgttattttttaaaagttgcgttttcgaggttggatttataaggaggtaggtaagatagtaaggtatagagataatatagagttaagtaaagttagtggaaatgaagagttttttaattttattgttgttgtgcgtggtagtttgtttagtttatttattggatggagttgtaaggggtgaggatattagtatgaattttgtttaggtaattaatattaattgatttggttaggtggggagtttttagagtaagttgaaattattttgtgtgttttaaaatttatatagaatgtttgagtttattgtgtaggaatagtttaagaatagagagttatagagtgttggaagtggaaaaggttttattattatattatttgggtttttttttttatgtaggaagaaataaaggttagaaatattaggtgtttttttaagattatataatattatagtagtagtagtattggggtttaaggtatatgagtaataagtggagagtggatgaattatattttgttttggaatagttttagtttttttttttaatgtaacgtaattttagttaaatatttgtgttgttagtattatattataaaatttggtattattttagtaagttagagaaatattttaaatagattaagaagtgagtaattgtaaaaatttattataaatagatagttatagtaaaaattgtaagagtgatttaaaaattatatttattttgttaga

SEQ ID NO: 1250 - DNA, 5675 bp, Artificial Sequence
  chemically treated genomic DNA (Homo sapiens)
tttaatagaataagtatagtttttaggttatttttataatttttattatagttatttatttatagtaagtttttgtagttgtttattttttaatttatttggagtatttttttagtttgttgaaataatgttaaattttataatatgatattagtaatataaatatttagttaaaattacgttgtattaaaaaaaaaaattgaagttgttttaaagtaagatatggtttatttattttttatttgttatttatgtgttttaagttttagtgttgttattgttatggtgttgtgtgattttaagaaaatatttaatatttttggtttttgtttttttttatataagaggagaagtttaaatggtgtgataatgagattttttttatttttaatattttataattttttatttttgaattgtttttatatagtaagtttaagtattttatgtgggttttaagatatatagaatggttttagtttattttggaagttttttatttggttaggttagttagtgttaattatttgaataaggtttatgttggtgtttttattttttgtagttttatttaatggataggttgagtaaattgttacgtatagtaatagtaggattggaagattttttatttttattggttttatttagttttatgttgtttttatgttttgttgttttgtttgtttttttgtaggtttaatttcgggagcgtagtttttaaagagtgatagtgtttgtttggattattcgtagtttgatttatttttgtttttatttaaatggtagtaggattatttttaaatattttaaatttaaagtaggatgatataatttattttattaattttttttaatttttttaattttgtaaggtaatatagtgattaatttttaggaagtgttttttgttttggtagaggagaaaattggagtatttttttttttttggaaaaattgattggaatttattagataatttatgtttgtttttttgagagaagaagtaggttgatttggtaaaaattagaattgtgtagaatttttaaaagtagttttattttaagaaagatattataaaagtaaataaaagatgtaagtggaaagtgtatatatatagttatagtttatattatatataattatatttaaaatataaaagataatatttagaagaaatttagaaggggtgatttatttttttgaatttgatttgtaatgtttgttattgattgtcgttggatttgttggtttttgaggaggaaaattttatgggtagaatagaataaagagggtttgtgaaaaagaaggaagtatattttttttgggttggttttaattttgtaattaatttattaatgggtgatgggtttacgtagttgttttataaatagttgtagaattgaaatgaattatattgtttatcggattgaaattttttttgtttttgttttttatatatgttttatttttttttaattttttttttttttttttaaatttaaattagtagatgttttgaagttgaagaatagaatttattttaaattttttttttatgtttttttgttttttttttttttttttttttttgtttttttgttaagtaaagtgttgtttatattattggtgtataataaatgtttgaatgtaagattttaaatatatttagaggaagatattttgtaaaatttttatagtttttttgttatttgttattatttatttttttaatgtttttttgattattatattttgtttgttttttttttttttgttgatttgtttatttgtttgttaaagggaagaatattttgggagtaagaatttagtagaatgatggatataaatgtgtatttattagatttttaataagtgtttattttgtttttttttatttataatttttttgtatttttttttttgttttattttttgtgtgttttttaataaatattggagagattttatttaataagtttaaagggatttttttgtggtaataagatttttatgattgaagatgtttatataggtgatagttatttggtagggggttatatattatatttaagtttttatttttagattagattatgtttaaagatttttttaaattttatttaaaaaatagagatagaggttttattatgttgtttaggttggtttcgagttttgggtttaagtgatttttttgttttaattttttaaagtgttaggattatagatatgggttacggtatttggtttaaagatattttaaaattagtattttatggttttttatttttttgatggggggaaaaaattatgttttgttttgattgaaatatagggaaaatatttggttatattgatatgaggataaggagaatagagtggtggtagtgatgtgaattttaggaagaaatagtggagtttaatagataaaatattgagaggttaaaagtgtagaagttgtggtagttttaattttttttatattaaggtttattttttgtaaattttttttggagttataatttataaaatatatttaaagtttagaggaaagtttgatagataatatgtttgtttttttaattgttaagatgtgattggtaaaatgggttatgttgtttttgaattaaatataaaagtttgttatattttaaaatagtttcgacgatttttttggaagatgttttttaagttttaggaagagttattaattattgtttaatggtattttgtatttgtttttgttattttattttttatattgaattgtagtgaaatggtttatttgttttttttattttaatgtaagttatttgagggtatggattatgttttatttgattttgtatttttagtatttagtatggtatttgatatatagtaggtaattaaaaattatttagagaattaaataatatattagttatgagtgaaaggtttatagtaaatgttaaataggtaaattaaaagttaaaaaatttaaaaattatgtagatatttttagatttgtagattttatatgttatatatattaaatattttaaaaattaaattttttagaagttgtatttttataagaaaagattaagttattatttaaaatttttttaatatataattgaagtttttatttatatgtttgtagaatatttaaattaattttgtagaattagaagttttttaatcgtgtatgagatagttaaattgtattttgtagagtatgttttaaaaattaatgtagtaatgagaaggaataggtaaaattaaagagtaattgagtgtaagaaggaacggagggagaaggagggagaagagaaagggggaggaagatgaggggaggggaggaggagagtaaatattttaggtgtagagggaggaattgaatattagcggaaaaaaagtgggtatttttagtaagaaattaaaatgattgttttatagaataattatttgttatatggttaaataaatataagggttagataatggttagttttataaatttgattttttagggattagcggtttagaattaaatttatatttaatttaatttttggatttaaaaattggtagtgattttaggtaatattttatttcgtaattttttatatttgtttttttatttgttatatttttttatgattaattagatatgattgtgtaggatttttgttatttttagttgataattgatataattattattttagttatatatttatttattaagtatttgagttttaagggttttagaatatttaaattaagagtatagatttggagataaagtttagaaaattttagtaaaaaaaaaaaagtgaataaattagttgtttaaaagtaggaaagaaagaagaaaggaaggaagggaaggaggtataggaaggaaggaagggaagaaggtagaggaaggaagaaaggtcggtcggtcgattcgtcggtcggttttttaatttttacgtacgtacgttcgttcgtacgtacgtacgtatattcgttcggagagaatataatttagttaaggaagaattttttatataatttattttataagatataagtttggtatggtggtttttatttataattttagtattttgggagattgagataggaggattgtttgagtttagaagttgaagatttatttaggtaatatagggagattttagttttacgaaaaaataaaaataattagttatttatggtagtgtatatttgtagttttagttatttgggaagttgaggtaggaggattatttgagttttggaagtgagttgtgatggtgttattgtattttagtttgggtaagagagtaagattttgttttaaaaaaaaaaaaaagtaaaaagttgtatacgaattaagtagaaggtgtttgtttattttaggtgttttttttagaaaaaatttatagataaagtagtagataaagtgagtttggaatgatttggaaatggaggaaaattgttttttggttttttggttaagaataagggtggaaatggaggaaaatttagtaatagagtatataagtatgtagagttaagaaagattttatatggaaaacgttaaagagttattttttattgaaataaaaggtatgtgaagggtaataatggaaaataaaaaataaagttgtgaaaagataggttggagtttagttatagaagattattagtttgtagttaaggtgtttagagtttattttattgttggtggaaagttatgtgatatggtttggttgtgtttttaattaaattttattttgaattgtaattttaataatttttatatgtcgtgggaagaatttagtgggaggtgattgaattatgggggtgggttttttttgcgttgtttttatgatagtgaatgagttttatgagatttgatggtttttaaaatggtagtttttttgtataagtattttttttgtttgttgttttttacgtaagatatgatttgtttttttttattttttgttatgattgtgaggtttttttagttacgtgaaattgtaagtttatattaaatttttttttttttttagtttttggtatgtttttattagtagtgtgaaaataaattaatatattagtttttataaaatattttaaataaattttatatatttaaataaaacgttaaatgtttattatagaaaatttagaatatataaaaaagtataaagaagaaaataaattttttatagttatgatttaaaaagaaaaatattattaatagtattaattatgtattttttttaatttttttatatttgtgtatttttttttatattatgttgattatgggagtttataaaattttatttatattttttataattttgaatattattagttggatagaagtattaataaggtaatatattttatttgaattatagggttatgttgtttagattggttttaaatttttaggtttgagtgatttgtttattttggtttcgtaaagtgttaagattatagatatgagttattatgtttaataataaaatattttgatattggtatgtaatatgtagtaattatattggggtaaatgggggtatttattattttaagtattgattatttttttgtgttataaatattttaatttattgtttagttattttaaaatgtataataaattgttgattgtagttatt

SEQ ID NO: 1251 - DNA, 7255 bp, Artificial Sequence
  chemically treated genomic DNA (Homo sapiens)
attttatttgttatttttaagagaattttttgatttttaagataaatttgttttttttttttttggtttttttttttttgagatagagtttcgtttttgtcgtttaggttggagtgtaatggtacgatttcggtttattataatttttgtttttcgggttttagtaatttttttgatttagttttttaagtaattgggattatatgtacgtgttattatgtttagtttattttgtatttttagtagagacgaggtttttttatgttggttaggttggtttcgaatttttagttttcggtgatttgtttgttttagttttttaaagtgttgggattgtagacgtgagttatcgtattcggttttaaggtaatttttattttatttgtgtgtatttgtgatgcgaattgttgttttttggagatgtgtggtgtgatgatttaggtttttttttgttttttttaattttatttttttattatttatttttatattaagagtaagatttatgattattcgttagggttaggtttttacgattttttatttaaatttttattttattttttaattgttttttttatttataatttttttttagtttagtttattttagatattatggttcggttagttttattaagttagtatagattgttatatggtttagaaataaataatgtttgtttattgttggttttttgatgtttaatttttgtttttttattatttggttttagtttattattttaagttgtttttttttatatgttttatgttgatttttttagatttttgttattttttatttataatttaagattttttattataatatttttgttttttgtttttaattttatttttatttaatttaattttaatgttaaaatttaatttattttttaaagtttattttagtgtttattttttttataaagattttgtggatttttttaatagaatatgatttttttttttttaaaattttaaaatatgattttttattttttttattgtatattttttatttttttttataatagagatttttaatttatttttattgttatttgggatgttttttaaatttgtgtatatttgggttttattttagagattttgatttagtagttggagtggagtttagtttattttggttgttaaataagatattatagattgagtggtttataaataatagaaatatattattttttatagttttggaggacggaagttagattagtttgttaatatggttaggttttggtgagggtttttttttgggttgtagattgttaattttttattggatttttatttggtggaaagatagaaagagagttttttggggttttttttataagggtattaattttatttatgaggttttatttttttaaggttttattttttaatatcgttatattgggagttaggattttaatatgtaaatttggggttgggggatataatatttagtttataaaagaagtttatttgtatgtttaatatagattttgatgtagtgttaagattgagaataattatttttaaaaattttttttttattgagagaataaaggagattttaggaagagttaatgaaaaggtaaatttgaattatatttttgaatttgtttttttttttaaaatggggataataatttttatttttttgggttgttatgaagtttaaggaaggtaatagatgttgtatatttaagatttagtatagtgattaatttataatgatttgtgagatttgagtgtatatatttatattttgtgtaaaggatgtgagttatatatatatgttttttggttgaatttgaatattggttattaaaggaagttttatggaagttattttatttggtggtttaatttagaagtatttttttttttggaaaagaagaaatttttagtatttttaatttatttatagaacggacgtatgaattaatgtggttataattttattatatttataatataaagagaatagtatagtgaagggtttatatagattttttttatgtatgattttatttaatatttttgatgttttatgagggagatgttaatgtattagttttataggtgtggaaattgaattttagaagaatttagatttgttaaaagttgtataagtgggaagtggtaggattgtaatttgaatttagtaagtttaatttttatttaaatgttttttattttttattataattggttttaataattgttttgttaatttgattagggtatatggatatttattttgattatgagagtttagaaaggtatgaagttgaggatattttgttttggtttatgtgaattaaatgagttacggttttattgggtataattttgtgtttagcggacgttgttttttttattggattatattttttattggtaatttttatttattatttaagatttaggtatatgtgtttattttagttggtttaatttattttttattttataattaaaaaataaatagattatatttatgtaatttgtgttattttttcgggtttagaaagtaaaattgaattataaaaatatatttgttatgttgttgtagaatttatatttatatttttatttttataagaatatttttatttttatgagaataggttgttgtcgaaggggtaggagggaggttagtaatagagaggtagaaagagtttatattgttttgtgagttttttgggtaaattaaattttttttttttttttaatttgttttgaaatttatgttataatgaataatatttttatttttaaaattttgttggtttgtttgttttttttagtaagatatttatttaataggcgaataatttttgttcgtattgaagtgtaaatgattgatttgatttttgggggagagagtttgagagaatttagttttagggattagaagtaggtgaggtatagatattacggaggtagatagtggttaggtgtggagaaaggatttagaaggtataagttggagttttgaaagtaaatgtagtatagttttttttattattgtattagggttgggtttgttgggggaatttagatttaatcgtttaattttttaatatagtatttatttaaatattaaaaattaagtttatcgaagttttagatttttaattaaattatttgttgttatgtttagaagaaagtatatttataaattttgtaagtaagttattgtattaaaataatttaatatagagttagattaatgttaaggtattttcgtggaggaaaaagtatttttttattaaagatttaatgtaaagaaagttatattaagttatgaatttaaggaggatgaatatgatcgtgatttttgaataatttggtaggaagttgttatatttatattaatataaagaatgggttgttatatttttgtatgtttatattttatttttttatgattcggtttaaattttattttttttatgaaattttttttgattttattttttttatattattgttgttttttttaaatatttatagtattttatttaaatttttattaatttatttttaatattttagtatttattatagtatgtggtatgtagtagatgataggaaatgtttattgaatgaatgtaggaatatatattattaatattaatttgttgtttagatatgttttaatttaagatatttttttttggattatttttaaagtttttaagtgattttaggaaagattagaattttttattatagtattttaaatatattttttatatattaatatatgttatgtattatatatgtagatatatgtatttatatataagaatatttgtttttattaaatatgtatgtatatatgtaaatgagtatttataaagattgtgtatgataataaattatatgtatgtggatttagaataagtgggattaggttatatgatttgaaaagtatgtttaggggtttttgataaatagttttttatgtagttatattgtttggaaattttttagtgttttattttttgaagatgtataatattttatttttttttttttttgttttttgtttgtgaatataagttaaagtatttagttgttgaaggtttagagttgttgttttattatggtttagttagagatttaagtgggagattattatgtagagtttatagtagtttttagtttagtttttttaaatatattttttggggttgaattttggtttttttataaatgaaatatgtgatttaaataggttatttaaatgtttttggatttgattttatttgtaaaatggagatagtaatagtattttttttttaaggttatgtgaagatggattggggtaatatgtggaatatagtataaatgtttgggtaattataattttttagtaaatgtttattattattattattagtattgttttttttattttttttatggaaagtttaatttatagattagggattttttaatatgttgatattaaattatattttttagaagtagttttaggttttatataaagtttgttttgtaataatatagttatttattttttttatatataatgagggagggtaagtatagagattttttagttgggttttttggttttaagatatttattataaattttaaaatatttttttgtataagttaatttaattttaatattttatatagttaaaaaatgtatttatataattttaggattagttttttgttttttttttttaattaattttgtaaaaggaaataattaaaatatttaaaagtaaagagtagaaagttggagttttgaaagattgttgaaagatttttttatttgggggtattaaattatattataaaattgtaaaattgttagagtgtaattaatttatgttgttttatatttttgatgtagtaattgtttaagatatggttttaaagaggattgtaagagagttgtgagtgatatatgatgttgtgaacgttagggtgttcgttagggaagggttttatttagagggatagaaagaaagttaggaggggtagagtttgaagagaagattatgttttttttgaagacgtttttatttttgtttttattttatgtgtagatttttaaggttttttttgtattttttaaagagaaaaatataaaaattgtttaggtaaatgaattattagttaggtgatgtttgatttgttgattattaggaaatagtgtgggttgtttttttttgttaattaaaatagtttgaaagaaattatttgggtgattagtttgagattgaatatttttttttagtgatttggagggttttaagttggtaaggattaggttttttaaaagtcggatatgaaaataagttgaattttttaaaggttgggaaaatattgttgtagagttatttttagttgggaaatttttgtagaagaaatggttttatttataaaatggtattatttttttttttatttatttaaggtttttttttttaggatatttgtaattaagttattatatgtttggtgtttttatataggtattttttttgtcgttaaaaattttagatatagaaaataatgtgaggatggtagattataatgaattagaaattagtatatagtaaaattatattttttagtattagattgtggattgtttataaatttttggaagtattataaaagtagaattaatagtttttttttattgttttatagtttgaaagtgaatttaaatttttaagaaatataagggaattttgttataaattttttatgtatagtttttttagtattatagtttggagaaagtattattattattaagaggttattttttaattgtaattttcgggttaatgtaaagtttattgagtgtttattttatgtaaggtaattgttatatattttataaatattttatttaatttttataagaattttattggagtattattatttttattttagagataaaaatattttaaattagataaataatgtggttaagtgtttatagttaatttatggtagagttaagatttgaatttaggtttgtttgattttaaagcgtgtgatttggttagtgttatttattgttgtggttagagtgtgttttttgaatttatgtgttaaagatttagtagtttatgtgatagtgggttttttaagaagtatttaggttattaagaaagattaatgatatttttgtgtgattggattaatttttgttggagtgggttttggtttttgtagaattggattagtaattaatagaatgggtattataaagaggggttgttttttgtgttttgtttttttttatatatgtttgttttttttttgtttttttgttatgttatgatatagtataaggttattttagaagttaattagatgtagttatttgattttggattttttagtttttagaattgtgagagaaaattagttttttttatgtataagttatttagttttagatattttgttatagtaatagaaaatggattaagatattgataaggtgttaggtgtttataggtagtatgaggtttagttaggttatattttattgtgtatgaagaaatttttaagttaaatttaaaataggtaatttttaggttaaattttttggattttgattaaatttaatatttttaaagagttattttggtgaataaaatgttaatattaatgatattgttgtttttttaaaagatatttgaaattattttgaaattattagtttttatttgagaggtaatatggtgagttaaaatttgaattattatttggaaaattttttaattttttgtgtttttgtttgtttagtagaataaataagttttttttatagtagtgaagaggataaaaaagaggaattgtattgatgtaataaatattttaagagaagttaattaatgttagttttaatttttttgtaaaaataagaagatagttttttgattgtagagtagtattttgtttgtgtgatgtgatttttattttttatgagatatttttttttatgtataattattaattggagtattgagtggaggaattgttttttttaaaaagagttgtttttttaaagttaatttataaattaatttgtgttattgtttttgtggttgttaagttattagatttttgtagtaatttagaaagggttgtaaaatgattagagaattggaggtttttttatagtaagatttttatgtgtttgtttttgtttagg

SEQ ID NO: 1252 - DNA, 7255 bp, Artificial Sequence
  chemically treated genomic DNA (Homo sapiens)
tttggataaagataagtatataggggttttgttgtgaaaggatttttagttttttggttattttgtaattttttttaagttattatagaggtttgataatttgatagttataggaataataatataaattaatttgtaggttggttttgagagaataattttttttagaaagaatagtttttttatttagtgttttagttaatggttatgtataaaaaagggtgttttataagggatgaggattatattatataggtaaagtgttattttatagttaggagattgtttttttgtttttataaaaaaattaggattaatattaattgattttttttgaggtatttgttgtattagtgtagttttttttttttattttttttattattgtagaaaaggtttatttattttgttgaataaatagaagtatagagaattaaggaattttttaagtgatgatttagattttaatttattatgttgttttttaaatgagaattgataattttaaaataattttaaatattttttaggggaatagtaatattattgatattagtattttatttattaaagtaattttttggaagtgttaaatttagttaaaatttaaagagtttagtttaaaaattatttattttaagtttggtttaaaagtttttttatatatagtgaaatgtaatttaattagattttatgttgtttgtgaatatttggtattttgttagtgttttagtttattttttgttgttataatagaatatttgaagttgggtaatttatatataaaaggggttgatttttttttataattttggaggttgggaagtttaagattaggtggttgtatttggttggtttttgagatggttttgtgttgtgttataatatggtagagaaataaaaggggagtaagtatgtgtgaaaaggggtaaaatataaagggtagtttttttttataatatttattttattaattattaatttagttttgtaagagttagaatttattttagtaaaaattaatttagttatataagagtgttattaattttttttaatgatttaagtattttttaaaggatttattgttatatgggttattaaatttttaatatataaatttaagggatatattttaattatagtagtaggtgatattgattagattatacgttttggaattagataggtttgggtttaaattttaattttgttatgaattaattgtgagtatttggttatattatttatttgatttaagatatttttgtttttgaaatgaaaataataatgttttaataaggtttttgtgaggattaaatgagatatttgtgaaatgtgtagtagttgttttgtatagaataagtatttaatggattttatattaattcgggggttataattaagagataattttttaataataataatgttttttttaaattataatgttaagaaaattgtgtatgagagatttgtgatagaatttttttgtgttttttaaaaatttgggtttatttttagattgtgaaataatggaaaaaaattattggttttgtttttataatgtttttaagagtttataaatagtttataatttgatgttgggaaatatgattttattgtgtattgatttttagtttattgtaatttattatttttatattattttttatatttggaatttttggcggtaaagaaaatgtttgtatggaagtattagatatatagtaatttgattgtagatattttggaaggaaaaattttaggtaaatgagaaagaaaatgatattattttataaataaaattattttttttataaaagttttttaattaggggtaattttatagtagtatttttttagtttttaaagaatttagtttgtttttatgttcggtttttaaaaggtttagtttttattagtttggaattttttaaattattaaaaggagatgtttaattttaaattaattatttaaataattttttttaggttgttttaattaataagagaaaataatttatattattttttaataattagtaaattaaatattatttaattgatagtttatttatttgaatagtttttgtatttttttttttagaagatataggaaaggttttggaaatttgtatatggagtaagagtagaaatggaagcgtttttagggagaatatgattttttttttaaattttattttttttggttttttttttgtttttttgggtagggtttttttttggcgagtattttgacgtttatagtattatgtgttatttatagtttttttgtagttttttttaaagttatgttttaaataattgttgtattaggaatatgaagtaatataggttaattatattttgatagttttgtaattttataatgtgatttagtatttttaaatgggggagttttttaatagttttttaaaattttaattttttattttttgtttttggatgttttagttatttttttttataaaattggttgaggaaaaggaataagggattaattttgaagttatgtggatatattttttgattatgtaagatgttgaggttgaattaatttatgtaggggaatattttgaggtttgtggtagatattttgggattaaggagtttaattagagaatttttgtatttatttttttttattgtatgtggagagaatgagtgattgtgttattataaagtaggttttgtatggggtttagagttgtttttggaggatgtggtttggtattaatatattagaaaatttttagtttataagttagattttttatggaaaagataaagagaataatattgatgatgataataatgaatatttgttaaaaaattatgattgtttagatatttgtattgtgttttatatattattttaatttatttttatatagttttgggagggagatgttattattatttttattttatagatgaaattaaatttagagatatttagatgatttgtttaagttatatgttttatttgtggaggggttaggatttaattttagagggtatgtttagagagattgagttgggagttattataagttttgtatggtagttttttatttgagtttttggttgggttatagtggagtagtagttttaggtttttaatagttggatattttggtttatatttataggtagaagataagggagagggagaatgagatgttgtatatttttaaggagtaagatattgagagatttttagataatatggttatataggagattgtttgttagaggtttttgggtatgttttttaaattatgtaatttggttttatttattttgagtttatatgtatgtagtttgttattatatatagtttttgtgaatatttatttatatatatgtatatatatttggtaaaggtaggtatttttgtgtataaatgtatgtgtttatatgtatgatatatagtatgtattaatatgtaaagagtgtatttgagatgttatgataaggagttttgattttttttgaggttatttaggaattttgaaaatgatttaaagaaaggtgttttgggttagaatatatttggatagtagattaatgttaatgatgtatatttttatatttatttagtaaatattttttgttatttattatatgttatatgttgtgatgggtgttagagtattggagataaattaatagaggtttggataaaatgttgtgggtgtttggaggaaatagtagtggtgtggagggagtgaaattaaggaaggttttatgagggaggtggaatttgaatcggattatgaagaggtagaatgtagatatgtagagatgtagtaatttattttttgtattaatataaatgtgatagttttttgttaaattgtttaaagattacggttatgtttattttttttgagtttatggtttaatgtggttttttttatattaggtttttggtgaaaaaatgtttttttttttacgaaaatgttttaatattggtttaattttatgttgagttattttgatgtaatggtttgtttataaggtttataaatgtatttttttttgaatataatagtaagtgatttagttgagaatttaaaatttcggtaaatttagtttttggtgtttgggtaaatgttatgttaaaaaattgaacggttgggtttggatttttttaataggtttagttttggtgtagtggtggagaaggttatattgtatttgtttttagggttttagtttgtgttttttgaattttttttttatatttgattattgtttattttcgtggtgtttgtgttttatttgtttttggtttttgggattgagtttttttaggtttttttttttaaaaattaaattagttatttatattttagtgcgaataggagttgttcgtttgttgagtagatattttgttagaaaaaataaataagttaataaagttttaaaaatgaaggtattgtttattataatatgagttttagggtaagttaagaagaagaaagaaatttagtttgtttagaaaatttataaggtaatgtaggttttttttgtttttttattattagttttttttttgttttttcggtagtagtttatttttataaggataaggatatttttataaggataaggatatagatgtgggttttatagtaatatagtaggtgtatttttatagtttagttttgttttttaggttcgaggagatgatatagattgtatagatatagtttatttgttttttagttataaaataaaggatgagttgaattagttggggtgagtatatgtgtttgaattttgaatgatgagtaggagttgttaatggggaatgtgatttagtagaaggaatagcgttcgttaagtatagaattatatttagtgaagtcgtggtttatttgatttatataagttaaggtaaaatgtttttagttttatgtttttttgaatttttatgattagaatggatgtttatatattttgattaagttaatagaataattgttagggttagttgtggtgaaaggtaaagagtatttgggtggaaattaaatttattgggtttaaattatagttttgttattttttatttatgtaatttttggtaaatttaagtttttttgaggtttaatttttatatttgtgaaattagtgtattaatattttttttatagggtattaagggtattagatgagattatatatggaaaaagtttgtgtaaattttttattgtgttgttttttttgtattatgaatgtggtgaaattatagttatattagtttatgcgttcgttttgtgaatgagttagaaatgttgaaaatttttttttttttagaaagagaagtgtttttaagttaagttattaagtgaagtaatttttatggagttttttttagtagttagtgtttaagtttagttagggaatatatgtgtgtgatttatattttttgtatagagtataaatgtatatatttagattttataagttattatggattaattattgtgttaagttttagatatgtagtatttattattttttttaagttttataataatttagagaagtgggagttattatttttattttaaagaagaaaatagatttagagatatgatttaaatttatttttttattgattttttttaaaattttttttgtttttttaatgaggaaaaaatttttaaaagtgattatttttagttttggtattatattagaatttatattaaatatataagtaggttttttttatgaattaaatgttgtgttttttaattttaaatttatatgttgaaattttaatttttagtgtgacggtattaggaggtggggttttaaggaggtgaggttttatgagtgggattagtgtttttataaaagagattttagagaattttttttttgtttttttattaagtgaggatttaatgaaaagttggtagtttgtagtttagaagagggtttttattagaatttaattatgttagtaggttgatttgattttcgttttttagaattgtgagaaataatgtatttttgttgtttataagttatttagtttatgatattttatttggtagttagaatggattgagttttattttagttattgaattagaatttttggggtggggtttaggtatatataagtttagaaagtattttaggtaataatgaggatgagttgagaatttttattgtaagagaggatggagaatatataataagagaagtaaagagttatgttttaagattttaaaaaaggaaaaattatattttattggggagatttataaagtttttgtaggggaagtggatattgagataaattttgaaaggtggattgaattttggtattgaaattaagttaaatgagggtgggattagaagtaaaaagtaaaggtattgtggtaagaaattttggattgtaagtgaagaataataagggtttgggggaattagtatagagtatataaagagaagtagtttggaatggtaggttagaattagatagtggaggggtaggaattaaatattaaaaggttagtaatgagtagatattgtttgtttttgagttatgtaataatttatgttgatttaataaaattaatcgggttatagtatttaggatagattggattgaagagaggttataaataagaagaataattaaaaggtggagtaagagtttaagtgaaaggtcgtgaggatttggttttagcgggtggttatgggttttatttttggtgtggggatggatggtgaagaaatgaggttgaagaagataggagggaatttgggttattatattatatatttttaaggagtagtaattcgtattatagatatatatagataaaataaaagttgttttaaggtcgggtgcggtggtttacgtttgtaattttagtattttgggaggttgaggtaggtagattatcggaggttgggagttcgagattagtttgattaatatggaggaatttcgtttttattgaaaatataaaataagttgggtatggtggtacgtgtatgtaattttagttatttgggaggttgagttaggagaattgttggaattcgggaggtagaggttgtggtgagtcgagatcgtgttattgtattttagtttgggcgataagagcgaaattttgttttaaaaaaaaaaaaattaaaaaaaaaaaaaatagatttgttttgagagttaaagagtttttttgaggatgatagatggaat

SEQ ID NO: 1253 - DNA, 5959 bp, Artificial Sequence
  chemically treated genomic DNA (Homo sapiens)
ggttaggagtttaagattagtttgggtaacgtggcgaaattttgtttttataaaaaaataaaaattagttgagtttgatggagtatatttgtagttttagatatttagaaggttgaggtcgaaggatggtttgaatttagaggcggaggttgtagtgagtttagattatattattgtattttagtttgggtgatagagtgagattttgatttaaaaaaaaaattttaaaaaataaaaaaatttttatttgattgttttttgttttattagttattttatttttattttttttttttatttttaattttttttttttatagattttagttaaataatttatatttgttttttttgttggtttttaaatataatttttttagtttggtttttgggtaattatttttttttgtttttagattgttgtttttatggattttttttttgcgagagttagtgatttgattttagtacgggattgggagttagaaggtttaggtagttggttatttattagttgtgtgatcgtgagtaatttaaagtatttttttgagttatgggtatgaacgttaatttgtaaagttgagatgagagtattagagtaatagaattataatagttaaattgtgtgtgtgtgtgtgtgtgtatttgttaagagttaggtattgtgttgagaatttgttatgtataattatatttaatttttattataatatttttaaatgaggtttgtttttttttttattttataaatgagaaaagggaggtatagagaggtaaagtgatttgtttaaagttttatagtttataaatgataggtagtagaatatgaatttaggaggtttgattttaaaatttatgttttatggtttttttattgacggtgtttagtatagataagtgggaggtgtgatttggtgttaatagggattttaagagttagtgtgggaattgttatttttttgaagttagggatggtaggtgtgtttgtgggttgggggtggggtatttgagtgatgtttttttttgaggtaatgttttgtaggatatatatttttttattttattttagattttagtgttttttttatattttgttagagtttttttggtttggttgttttttttttttttggtaggtttgggagaaagaggtttggagtttttttattttagatagcgggatagattttttatttcgtgaggttgattttgatttgggggtttgttattaataatggtttgtagggttgtgttatttagttagtgatttaggattttagggttagtattttttttattttgatggagttattttagtgaggggtttagagtttaagttatgattttacgtgagggtatatgttgttttttgtttgtatttttagggttttggttaaattttattgtggtattaaaaagagaggttgggggaagtggggaaggggatgtggtaattagaattattttttgttattgtagtgttgaaagttaagttttgtttaagttttttttgatgggggttggggagttaggaggtaaaggaggaagttgatgggagttgggggggatgttaaaaaaaggaggatttttatttggattgattttaggaattaagatttgggttttttggttgttttttttttgtttttatttggtaaaaaatagcggttgttttgaaggtggttttaattagtatagtagtgaatatttattattatgtgttaggtattttatatttgttaatattttgagttttataattattttatgaaggaagtattattattattttaattttatagatggggaaattgaggtattgaaatgttgtgttagttgtttttgttatatagtaagttagtggtagagttgagatttgaatttaggtagtttggttttagagtgtaggtttttgttttgtgattattttgagttttagtttttttattgtatgatgagggtaattggaatatataaatttattttttttttttgatgtttgattttttggtaattaattatttatttaatttttttttatgttgaatttttagatttatgaataatgagataaaggttattttggttattatttgtatttttaatttttagtataatgattggtttagaaaaatttaattagaatgtgttgagtaaatggtttttaaaaggtttgaagattattaataatggtttgagtatttgataaaagttttagattttttatatagaaaaattaatatatattagtagttgggggtgagtttgttttttttatttatttagggtatatttggtaatgtttggtaatatttttggttgttataattggtagggggaggtgttattggtatttagtgggtaggggttagggacgttgttaaatattttataatgtatacgatagttttaagtgttaatagtgttaagtttgagttatgtgatatatatatatagatatgtattgtatgttatgtttggtattattgatggtaagtggggggtagttaacggatttttttaaaagttcgtgtttgttatttagatgaagattttttagattggaagatttgtttttttaaatttatattattttatgattttatattttcgagtttagaatttagttttttttgggttttttgttttagtttttgattttttaaatgtttgggtttttttttttatttttagtgggtagtaggggattagaggagaagtatttaggttttatgtgttgtttttgttatcgtatttatttatttatttttatatttgggttattatagttttttgtaaatggtaataaagatgaaaagttttagagttaggtagttttgggtttgaatattagttttgtggattaattcgttttgtgattataggtaaattttttaattttttgagttttagtttttttttttgaaaataggagggatatttattaaatttattttataggtggtgaggatgaaacgagaggtttatagagaatttattacggtgtttgatatagtaaattttaaaaaatgtattattattattatggtttagaggtaaagtgatttgtttaaggttatatagttggaaaatggtagagtcgggatggaaatttaggatttcgtgattgtaaagtagatgtttattggttagtgaattttagaattttaatttttttgtaaaggaagttaattatttttattttatagttttatttattagataagtatataaaatgtttggtatatagtaggttttttaaatatagtttattgggtcgggcgttatggtttatgttcgtaattttagtattttgggaggttaggtgggtagattatttgagttagaagttcgaaattagtttggttaacgtagtgaaattttatttttattaaaaatataaaaaatttagttaggcgtggtggcgtacgtttataatattagttattcgggaggttgaggtaggagaattgtttgaattcgggaggtagatgttgtagtgagtcgagattacgttattgtattttagtttgggtgatagagtgatattatattttttaaaaataaaataaaataaataaatataattttttgagttgttagtaggttttttttaaatagggttttgaagaaggtgaatatagattttgttcgatgtcggttggttaggaagaaaggagtgagggaggttgttggtgtgggaggtttgggagggaggtttggtataagtgtgataattggggttggagatttggttgtatggagtagggttggagaattgaaagggtttttatagattatttttttttatattttgttttaatttgtagttgaagaattttaagttgataaaggggaaggtatttattttaggttatattgtagtttagagtttaataatttggtttggtgattttaagttagaattatggttttttggtagggtttcgttttgttgtttaggttggagtgtagtgatataattatggtttattgtatttttgattttttttttgggtttaagtaatttttttatttcggttttttaaagtgttaagattataggaatgagttattatatttggttttgaattttgggttttggttttagtaattaaaattaattattattattcgttgcggatttataatttatagtgttttaaatattttatatgtttgattttatttaatttttatattaatttagggataaagagttttttatttttcgtttttttttttatagttgaggaaatattttaaagtggtaagatatttgttcgaggttttgaaggaagagagtaaagttatgtttgttgttttttagaggttgttattgttttttttattgttttgaagatttagtttgcggaagatagggggttgttttagtggaattttttagttttgtttagtagagtttatttttttcgtttttagatgaagtagggagaggaagttgagttaaagaaggttgttagggagggaaaaagaggatagagtttggagtgtggggaggggtttggggaggatatttgatttgggagggggtgttgtaaaaggttaaggatgggttagggggattattagttttagaaagaagttttagggagttttttattatttttttttggttgattattggaggtttttagattaagggatgggggatttttttagttttattttttttttttttttttatatagtttttataagttttgtagtttgtaaaattttattttttttttgagggtttgcggttttttgcgggtttggggttttgtttgatttggtagtggagattgcgggtagtggagagaggaggaggtggtgtaagtttttttttatgttggtgttgttatatatatatatatatatatatatatatatatatatatatatatattttgatttttgagttagtatttgtttgttaaggaggggtggggttataggagcgtttttttaaagtttttataatagtagttgtagttagatatttttgtttttattatgagtttttggtagtttttggttttggtgtttttggtgttgggttgttgttttgttgtttttagatagcgttagtttatttttgtgtttttttttggagatttgagaattaattttatcgataggtagttggtagaggtgggtaaatatttagtttagagttggggagggttgttcgtgagggtgttgagtgttttagagaggatgtagggttttagaggagatgttttaggggtgtgttggtggtgatgggcgtatttgaagaatagaggtgtttagggttaggtagtggggggttttgtggaggttttgagtagtgatggttagaaatgggtaatggggtttttttaggtgggaaatgggaaatggtttggggtgggggaggtattggagggttttggggtaagtataggttgggagtgaataggggtaaattttatgtagttgtggggtagaaatgggttagaggtatttaggggtgagaaggagttgaggatgtttaaggaggggagatttttgggtggttagaaagtattggtgtttggaaagtatttaatgttttattaaatgttagtttttgttgggtatgacggtttatatttgtaattttagtattttgggaggttgaggtggtaggatcgttgaagtttaggagtttgagtttagtttaggtaatatagtaagattttgtttttataaaaaaattaaagaaatagttaggtatagtgatgtgtatttgtagttttagttatgtagaaggttgagatgggaggatcgtttgagtttaggaggtttaggttgtagtgggttgatatcgttttttcgaaaaagaaaaagaaaaaagattttttttatgagtgtttggagggagttttttggttttagttgggtagagaaaggggttagagatttggtatgtgtgtgtttttttatttatagg

SEQ ID NO: 1254 - DNA, 5959 bp, Artificial Sequence
  chemically treated genomic DNA (Homo sapiens)
tttgtggatgaagggatatatatatgttagatttttgatttttttttttgtttagttggggttaaaggattttttttagatatttatggagggagttttttttttttttttttttcggagagacggtattagtttattgtagtttggattttttggatttaagcgatttttttattttagttttttgtatagttggaattataggtgtatattattgtgtttggttatttttttaatttttttgtagagataggattttattatgttgtttaggttgggtttaaatttttgagttttagcgattttattattttagttttttaaagtgttgggattataagtgtgagtcgttatgtttagtagggattaatatttaataaagtattaaatgttttttagatattagtgttttttgattatttagggattttttttttttagatatttttagtttttttttatttttggatgtttttagtttatttttattttatagttgtataaggtttgtttttgtttatttttagtttatgtttattttagaattttttaatgttttttttattttaaattattttttattttttatttaggaaagttttattgtttatttttggttattattgtttaaagtttttataagattttttattgtttaattttggatatttttgttttttagatacgtttattattattaatatatttttaaagtattttttttgaggttttgtattttttttgggatatttaatatttttacggatagttttttttaattttagattaggtgtttgtttatttttgttagttgtttgtcggtgagattggtttttaggtttttagggaagagtataagggtggattggcgttgtttgggggtagtaaagtagtagtttagtattaggagtattaggattaggggttgttagaggtttatggtgagggtagaggtgtttgattgtagttgttgttgtgggggttttaaggaggcgtttttgtgattttatttttttttgataggtaagtgttgatttaggggttagggtgtgtgtgtgtgtgtgtgtgtgtgtgtgtgtgtgtgtgtgtgtgtggtagtattagtatgagaaagggtttatattatttttttttttttttattgttcgtagtttttattgttaagttaggtaagattttagattcgtaggaaatcgtaggtttttaggggaggggtagggttttgtaaattgtagagtttgtgggaattgtatgaaagggagggagggggatgaagttggagggattttttattttttggtttgaaagtttttagtggttagttaagggaaagtgatggaagattttttgagatttttttttgaaattaatgatttttttggtttatttttggttttttgtaatatttttttttaggttagatattttttttaaatttttttttatattttaggttttgttttttttttttttttttgatagttttttttgatttagttttttttttttgttttatttgggggcggaaggaatgggttttgttaggtaaggttggggaattttattggggtaattttttgtttttcgtaggttgaatttttagggtagtaaaggggatagtagtagtttttagaaaatagtagatatggttttattttttttttttaggatttcgggtaaatgttttattattttgaagtgtttttttagttgtaaaaaaaaaaacggggggtggggggttttttgtttttaaattgatgtgaggattaaatgagattaaatatataaaatgtttagaatattgtaggttgtaagttcgtaacggatggtggtgattggttttaattattaaggttaagatttaagatttagggttaggtatggtggtttatttttgtaattttagtattttgggaggtcgaggtgggaggattgtttgagtttagaaagaaggttaaggatatagtgagttatgattatgttattgtattttagtttgggtaatagagcgagattttgttaaaagattatgattttaatttggaattattaaattaggttattgggttttaagttgtagtgtaatttggagtaaatgtttttttttttgttagtttaggattttttaattgtaaattggggtaggatatgggggaaaataatttataggagtttttttagttttttagttttgttttatgtagttaaatttttagttttaattattatatttatgttaagttttttttttaagttttttatattagtagttttttttatttttttttttttagttagtcggtatcgggtagggtttatatttattttttttaaagttttatttgggaaaaatttgttaataatttaaaaagttgtatttatttattttattttatttttggggggtgtagtattattttgttatttaggttggagtgtagtggcgtgatttcggtttattgtaatatttgtttttcgggtttaagtaatttttttgttttagtttttcgagtagttggtattataggcgtgcgttattacgtttggttaaattttttgtatttttagtagagatggggttttattacgttgattaggttggtttcgaatttttgatttaagtgatttgtttatttggttttttaaagtgttaggattacgggtatgagttatggcgttcggtttaataagttgtatttaaagggtttattatgtgttaggtattttatatgtttatttaataaatgagattgtgagatggagataattaattttttttatagaaaagttgaagttttaaagtttattaattaatgaatatttgttttgtagttacgaagttttggatttttatttcggttttgttattttttagttatgtgattttgggtaagttattttatttttgaattataataataataatgtattttttgagatttattgtgttaagtatcgtaataagttttttataagtttttcgttttatttttattatttgtaaggtaagtttaatgagtattttttttgtttttagagggggaaattaaggtttagagagttaaggaatttgtttgtgattatagagcgagttaatttatagaattagtgtttaagtttagaattgtttggttttgaagttttttatttttattattatttatagggaattgtgatgatttaggtatagaagtgggtaggtggatgcggtgataggggtagtatataaaatttggatgttttttttttggttttttgttatttattgaaggtaagagaggaggtttaggtatttagggaattagaggttaggataggggatttaggaggaattagattttagattcgggaatgtgaggttatagagtaatatgagtttagaggaatagattttttaatttggaggatttttatttgggtggtagatacgggtttttaggaaaattcgttaattattttttatttgttattaatggtattaaatatgatatataatatatatttatgtatgtatgttatatagtttaaatttagtattattggtatttggggttgtcgtgtgtattgtaggatgtttagtagcgtttttgatttttatttattggatgttagtagtatttttttttgttagttgtgataattagaaatgttattaaatattgttaaatgtattttgggtgagtgggaggggtagatttatttttagttattggtatatgttgatttttttatgtaaagggtttaaaatttttattagatatttaaattattgttgatgatttttagattttttaaagattatttatttaatatattttagttgagtttttttaggttaattattatgttaagaattgggaatataagtagtgattaagatagtttttgttttattgtttatggatttgagagtttagtatggggagaaattgaatgaataattaattattagagaattaggtattaagaaaggaaagtggatttatgtattttaattatttttattatgtaatgaggaaattgaggtttagagtggttatagagtaagagtttgtattttggagttaggttgtttaagtttaaattttagttttgttattgatttgttgtgtgataagggtaattgatataatattttagtgttttagtttttttatttgtaaaattggagtaataatagtgttttttttatggggtggttgtaaggtttaaagtgttagtaaatataaagtgtttggtatatgataataagtgtttattgttatgttaattaggattatttttaggatagtcgttgttttttattaaatgggagtagggagagagtagttaggaaatttagattttgatttttggagttaatttaaataagaatttttttttttttaatattttttttaatttttattaatttttttttttattttttggttttttaatttttattaaggggaatttggatagagtttggtttttaatattgtagtggtaggaagtggttttggttattatatttttttttttattttttttagtttttttttttaatattataatagagtttagttaagattttgggagtgtaggtagagaatagtatatatttttacgtagagttatagtttagattttaagttttttattgaggtagttttattaggatggggagggtgttgattttggagttttgaattattagttggatgatatagttttgtaggttattattaataataggtttttagattagggttagttttacgagatgaggaatttgtttcgttatttaggatgggggaattttaagttttttttttttaaatttgttagagaggggaggggtagttaggttagagaggttttggtaggatgtggaggagatattgaaatttgagatgaagtagaaaggtgtgtattttgtaagatattgttttaggggagagtattatttaagtattttatttttaatttataaatatatttgttatttttagttttaggggaatggtaatttttatattgatttttagagtttttattaatattaagttatattttttatttatttgtattgagtatcgttagtaaggaagttatagggtataaattttggaattagattttttgggtttatattttattatttattatttatgggttgtgggattttaggtaaattattttatttttttgtgtttttttttttttatttgtaaagtggggaaagaagtagattttatttggaggtgttgtagtggggattaaatgtgattatatatggtaaatttttagtatagtgtttggtttttagtaggtatatatatatatatatatatagtttagttattatgattttattattttaatgtttttattttaattttgtaaattaacgtttatatttatggtttagagaagtgttttaagttgtttacggttatatagttggtgagtgattagttgtttaggttttttgatttttaatttcgtgttaagattaggttattggttttcgtaaaaaggaagtttatgggggtagtagtttaggggtagggaggggtgattgtttagaagttaggttggaggagttatgtttaggaattaatagagggaatagatgtgagttatttggttgaaatttgtaggaaagaaaagttggagataaaaaaggaaaataagagtgaggtagttggtagggtagagaatagttaagtggaggtttttttgttttttggggttttttttttgagttagggttttattttgttatttaggttggagtgtaatgatgtgatttaggtttattgtagttttcgtttttgggtttaagttatttttcgattttagttttttgagtatttgggattataggtgtgttttattaagtttagttaatttttgtttttttgtagagatagggtttcgttacgttgtttaggttagttttaaatttttggtt

SEQ ID NO: 1255 - DNA, 7511 bp, Artificial Sequence
  chemically treated genomic DNA (Homo sapiens)
attagagggagttttagaagaaaattattgtatgtaagggttaatgattgtatttattgagtggttattgtgtattatttatagtttatagggatttatttatgttatttttatgataattttgatgaagtggatgatattatttttttatttattaaggagaaagttagggtatagtgaagtatataattttgtgtagggtaatttattaatatttattgaaattattaaaaaatatgttttttgaataaattattttattagtgtagaaagtagagtaaattttatgggtgagtgattagggtagttatataagggttttatgtttagaagggatattgtgtttgggttttaaagttttgtggtttttgttttgaaatttttaataattttattttttaatttgtgttttataatgaagttcgatgagaaagtagaatatgggttagagatttttggagtttggtttaagcgaggttttgttttttatgttttttagtttttttaggattggtttttagttgtcggttttattattttttgtgtaggttcgtttttagtaggggtttgggaatagtggaaaggaggggagcggttaggtatatatattttttttgttaaatggaaggtatggttttaggtatttgtgaagatttgtatttttttttaggtatttttgtgtttggagtgtgatattaaattaaaaaaaaaaaggtcgggcgcggtggtttacgtttgtaattttattattatgggaggttaaggtaggcggattacgaggttaggcgatcgagattattttggttaatacggtgaaatttcgtttttattaaaaatataaaaaaattatttgggtatggtggcgagcgtttgtagttttagttatttgggaggttgagataggagaatggtttgaattcgggaggcggaggttgtagtgaatcgagattgcgttattgtattttagtttgggcgatagagcgagatttcgttttaaaaaaaaaaaaaaaaaaaagaaaagaaaaaaattttatataataggttgatagtggaattatagaaaaaaggaaaaggttgggttttttttttgttttttattttttattttattattttttaatagatttatttaattagagatggggttttattatgttgtaaaggttggattcgagattttgggttcgagcgattttttaatttggtttttttaaagtgatgggattataggcgtgagttattgtatttggtttttttttgttattaaataaggagttttatagttttattttgttttttaaaatatgtagttggttttagtagattgatatttattgttaaattatatgtaagagtaaaaaggttgaaaatgatggtttgatattgattaatttgtgtttttaggtaatatataattgtaatataattgtaatataattagaatataatttataaaggtaagaattttgtttgttttgttgaaagttttataattagggtttaatataaagtatgatatatagtatttgtttttaaatatgtattgatttaaattaattgagtatatttttgttttattttagtaaaaataggtatttaaaaaattgaaatagtttaaatgttttgggatgttatttaaataattatattatatttatttaataaaatattgtaagttgtttaaaaataataaggatgttttttaggtattgataaggaaagagttttaagataaattgttattatttatgtaaaataggtgggagaagggagagggagggatgtgtgagcgttatttgtagtatttataggtagtgattttcgtggagcgttttttagtggtatatatatataaacggaaggatttagagaaaatatagatcggttttagttggttgagatttatttttaaagtatgttattttataagaattaatttttatttaaaaaatttttttgagatagggttttattttgtcgtataggttggagtgtagtagtacgattagtgtttattgtagttttttttttttgggtttaataggtgtatgttattacgtttagttaataattaatttttaaaagtataaaaaagttatattatgtattaatgtggaattatgaattaagtagataataagaattaaaatagggtgtttattattatttttgataatataaataatgtaaagatatatattttatagattatttgtaaaagtttatatagtattgttgttgggtatttatgtaggaaagttattatttattgaatgtttattattttatatatggatagtatagagtatgttaaaaaattattatatatatttattgtatttaatgtgttattttgaatatattattgtgtatatggtttgttattggatatggtgagagatgtagattaagttgaaattattgaggatagtaatattggaagaaaattgagttgggtgtagtggtttagtttgtaattttaatattttagaaggttgaggtaggaggattatttgagtttaggagtttgagattaagggaaagaaaagaaaagaagtttttatttagttaggtatgttggtatatatttgtagttttagttatttaggaggttgaggtataaggtttatttaaatttgagaggtaaaggttgtagtgagttttgattacgttattgttttttagtttgtgatagagagagattttgttttaaaaacgagaaagaaagaaaaaaagaggtaatttaagaatttaggaatatttgtaggattttataatatatgttatataaaattaattaaaataatatttaaatgttgaaagaaatgagtagtttttagggtgatatagggtggttttattttttggatatatttatattgagttttatttttggtaatatttgatgtttttatattttagatttttttattttattttgagacggagttttgttttttttgtttaggttggagtgtaatggcgggattttggtttatcgtaattttcgttttttgggtttaagggattattttgttttagtttttcgagtagttgggattataggcgtacgttattatgtttagttaatttttgtatttttagtagaggtagggtttttttatgttggttaggttggttttgaatttttaattttaggtaatttgttcgtttcggttttttaaagtgttgggattataggcgtgagcgggtttagtttttatattttagatttttgtaagtggtaatattattggttttattttgttggtggtttttttggtttttttttgtatatattatttttgtttaaagattatgttagttaagggattgtttttatagttttaggaattttttttttttaggaaatttgaggtagttgagggtatgaaagtaaataagttgagtttattagaggttttgtattgtggtggttaaaagagttagttttaggattagaaagtttggtttgaaattttagttttgttattttttagtggtgtgattttagtaagtttttttattttttttgtatttttttttttttatttgtaagatatgggtgataatagtttaatatttgttttgttgttgtgaggattaaaggtgttaatgtaagtaaattatttagaattatagtatatagaatattttagtaaggtggttagttttttttattgttgtttttagagatgttgtgatttttttaaagtggttgtgatggttcggtaggtttttgattttttttgtttttatatgtttttatttttattttgattttttatttagtttttgatagtttgtttggtgttggataattgtatatattttattatttttaaattttgtttagaagtattttgtgtataatttttttatttgaatatgtaatagggagaaagagcgttttaggatattttaggtttttgaagaaaaaaaaatttttttggtaaaaagttagagatttatagcggttattttttttatgggattgatttttgtaattttgatttttaattatatagtattagagtagttaaatattgtttgtgtttaaacgttggttgttttgaagggtgaaagaataagtagtttttaaatttagttgattttaatgtttttttagttttttacgtttatttcggataaaagtagaaatgtatgttttagttgtgtttttattttttgttgtttaatataaatttttgtgttgtttaatataattttttgtgacgatggaaatgttttgtatttgtgttgtttgatgagataattattaattgtagtgttattgagtatttgaaatatggttagtgtaattaatgaattaaatttttaattttatttaattgtaattaattttaagtggttatatgtagggagtgattgttgtattggatagtacggttttaaattgagttttttttttttatttggtgaggtatatttgttttaagattgggaagtttatttttggaatttgttattaatgttggttttatatttgtaatttttagttgagttaagaggtgagagaaaggttattttttattttagattttatttttttttgtgatattgaggaaattggtaagtgatgtgaaggttggagagcgtgttttgtatgttggttttgttttttttgtttgtgttgattgatatagttagttgttgtttttgttggtttttttttttttaattttgtttttttgagtatatttgatatttattttatgatttttttaaaaatattttttgggaataagaaattaataaattttaagtgatttattatatatataaatatatagggtagagtttggattcgcggtagaagaaagggaggttagatattaagaagaatggtttggtgatgatagttgtgagataatagaaataggaaaaagaaatttaagttttttttttttttttaagaattaataataattttttttttttgattagttagtagggttggggtggattggaggaagtttatatattttatgaataagtttttttttaaggttttgtaagtgattttgttttattgattagtttttagaagattttttaaaggttggatttttaggagggagtgggggaggaaagttttgtattaggtagtttttgttttattgttttgggggggtggggaaggtaaattttggttatttttttagtttgtagtttttttgtgtgagtgtttggtaagggtgacgtggggttgtttttgcgggtatagttgtagtaattatcggagtggaggtagggtttaggtagtattgttttttaagatttttttttgggttttttagtagtaaggggatatgtattttaagggtttttatttggtttgattttgttgcgggggttttttgtttttaggaatagtagagatggtaagtttatcgagattttttttgtttagttgtttttgttttttttttttttttttttttttttaagtgttttttagttatgtaggtaagatatgtttttttttttgttttggggagattttgaaaatagaaaggttagttttttggggtttagtttttttaaatatttttaagttgttatattatttttttaaaatatagatttattgatatgttttttttttttagaaatttttcgtgggtggtttttatagtttttaagatggagtttagatttttttttttttttgagatagagtttttttttgttgtttaggttggagtgtagtggtatgatttcggtttattgtaattttagtttttttggtttaagcgatttttttgatttggttttttaagtagcggagattataggcgtttgttattatatttagttaaattttttttttttttttttttttttttttttttgtattttagtatagacggggttttatatgttggttaggatggtttcgattttttgatttgttgattcgttcgtttcggttttttaaagtattgggattatgggcgtgagttattgtattaggtttaatttttttatttttagtagagatggggttttattatgttggttaggttggtttggaatttttgattttaagtggtttgttttttttagttttttaaagtgttgagattataggtatgagttattgcgtttgatttagattttttaatgtgattaatttaaggttttttttgaattattttttatttgtttttttagttttgtttttttattttttaaattgagataaaataataataattttttggagtttttattaggattatatgaaatgagatatgtaatatgtttagtagtgtttgtttatagtaaattttaataaatgtttgtggaattataatattttgttatgtttgagattttgttttgtataattaggtattagtaggtttttataaaggaattcggttgttacgtgtagaggagaaataaatagaaagttttttatttttagggagttatttgattgatagaggtatagtgtatttattttttaggtttaggggagaaagtagttttattttttagtagtttagaatttgatttgagaaatatatttatatagaaaaaaataaggaattttttcgggttagggttcgggagttatagtgaggtggaagatataggggaaggaagagggaaatagagttatttttagggtggaagattttagaagagaatttgggaaataaggtatgaataaggattgaatagtgagaagtgatggagagatagttaaagtagatggagtgataaaagtaaaatttttaagggtagaataggtagtaatttggttaagttttaatagggaggtttataggaggatttaattttaagatgttgtgttatattttaagagggaatttaaaggttgggttgaagagttagagatggttatagttggtaaaaagatgggtagatgttgagaggagatgattgttaaaatgttttgtttaggatatttatagtatttttataattagagttttttttgtcgttgttgtttttaagaaggaaatttgaggtcgggtgtggtggtttatgtttataattttagcgttttggggttaaggtaggcggattatttgaggttaggagttcgagattagtttggttaatagtgtgaaattttatttttattaaaaatataaaaattagttggatgcggcggtaggtgtttgtaatgttagttattcgggaggttgaggtaggagaattatttgaatttgggaggcggaggttgtagggaggcggaggttgtagtgagttaagattgtattattgtattttagtttgggcgatagagagtaagattgttttaaaaaataaatgaataaataaaaaggaagaagaagaagaagaataattgtaattttttttggttttagaatgttatttaaaagtcgagtgtttttttttttttttgttttgaagtagttttttttatgataggtttgtttgttaaggttttttttgattttaaattttttttttttggtgttttggatagg

SEQ ID NO: 1256 - DNA, 7511 bp, Artificial Sequence
  chemically treated genomic DNA (Homo sapiens)
tttgtttaagatattaaaaggaagagatttaaggttagagggaattttggtaagtaagtttgttatgagaagggttgttttaaaatagggaaggaagaagatattcgatttttaaatgatattttagagttagggaggattgtaattgttttttttttttttttttttttttatttatttatttattttttgagatagttttattttttgtcgtttaggttggagtgtagtggtgtaattttggtttattgtaattttcgtttttttgtaattttcgttttttaggtttaagtgatttttttgttttagtttttcgagtagttggtattataggtatttatcgtcgtatttagttaatttttgtatttttagtaaagatgaggttttatattgttggttaggttggtttcgaatttttgattttaggtgattcgtttgttttggttttaaagcgttgggattatgggtataaattattatattcggttttaagttttttttttgagaataataacgataaaaaagattttggttatagagatattgtgaatgttttggatagaatattttagtaattatttttttttagtatttgtttatttttttgttagttgtagttatttttgattttttagtttagtttttaggtttttttttggaatgtggtatagtattttgaggttgaatttttttatgggtttttttgttaggatttggttaaattgttgtttattttatttttagaggttttgtttttgttattttatttattttaattgtttttttattattttttattatttagtttttgtttatattttgttttttaaatttttttttgagattttttattttggggatggttttatttttttttttttttttttgtattttttattttattgtggttttcggattttgattcgaaaaagttttttgtttttttttatgtggatgtgttttttaagttagattttgagttattaagaaataaggttgtttttttttttagatttggagagtggatgtattgtgtttttgttagttaggtggttttttgaggatgggaaattttttgtttattttttttttgtacgtgatagtcgggtttttttataaaaatttattggtgtttgattatgtagagtaaagttttaaatatgataagatattataattttataaatatttattgagatttattatggataggtattgttaagtatgttatatattttattttatgtaattttgatgagaattttaagaggttgttattattttattttaatttgagaggtgaaaagataaagttggaaagataagtaagaagtagtttaaggaaagttttgagttagttatattaaggagtttgggttagacgtaatggtttatgtttgtaattttagtattttgggaggttgaggagggtagattatttgaggttaggggttttagattagtttggttaatatggtgaaattttatttttattaaaaataaaaaaattaggtttagtgtagtggtttacgtttataattttagtattttgggaagtcgaggcgggcggattagtaggttaagagatcgagattattttggttaatatgtgaaatttcgtttgtattaaaatataaaaaaaaaaaaaaaaaaaagaaaagaaaaaatttagttgggtgtggtggtaggcgtttgtagttttcgttatttgggaggttaagttaggagaatcgtttgaattagggaggttgaggttgtagtgagtcgagattatgttattgtattttagtttgagtaatagagggagattttgttttaaaaaaaaaaaagagtttggattttattttgaaggttgtaagaattatttacggaaggtttttgaggaagggaggtatgttagtaggtttatgttttagaaagataatatagtaatttgaggatgtttgaaggagttaagttttaggaaattagtttttttgtttttagggtttttttagggtaggaaaaaaaatatgttttatttgtatagttggaagatatttggaggaggaggaggaggaggaaggagtagaggtagttgggtagagagggtttcgataagtttgttatttttattgtttttggggatagagagttttcgtagtaaggttaggttaagtggaggtttttggggtgtatgtttttttattgttgaaaagtttaagggaagattttggagggtagtgttgtttgggttttgtttttatttcggtaattgttgtagttgtgttcgtagaaatagttttacgttatttttgttaggtatttatataaaagggttatagattgaggggatgattagggtttgttttttttatttttttagagtaatggagtagaggttgtttggtatagggttttttttttttatttttttttggagatttaatttttgaagggttttttaggggttaattagtggggtaggattatttataggattttaggaagaggtttgtttatggaatatgtaagttttttttaatttattttagttttattgattagttaaaagagagaaattattattggtttttaaaaaaagaaagaaaatttagattttttttttttgtttttattattttataattgttattattagattattttttttaatgtttaattttttttttttttatcgcgaatttaaattttgttttgtatgtttgtatatgtgataggttatttgggatttgttagttttttgtttttaaagaatgtttttagggaagttatgagatgaatgttaggtgtgtttagagaggtaaggttggaggaagggagattagtaagggtagtaattaattatgttagttaatataggtagaagggatagagttagtatataggatacgttttttagtttttatattatttgttagtttttttagtgttataggggagagtgagatttggaatggaaaatgattttttttttattttttggtttagttgagaattgtaagtgtgagattagtattggtagtaggttttaaaaatagattttttaattttaaggtaagtatgttttattaaataaggaaaaaaggtttaatttagagtcgtgttgtttaatgtagtagttattttttgtatgtggttatttaaaattaattataattaaataaaattaaaaatttggtttattgattatattagttatgttttaaatgtttaatagtattatagttagtggttattttattagataatataaatatagaatatttttatcgttataaaaaattatattgggtaatataaaaatttatattgggtagtaaggggtagaaatataattgagatatatatttttgtttttgttcgagatgggcgtaaggagttagaaggatattaaggttagttgagtttgggaattgtttatttttttattttttaaggtagttagcgtttggatataagtaatgtttggttattttggtgttgtgtggttgaaagttaagattgtaggggttaattttatggaaaaagtggtcgttgtggatttttggttttttattaaaggggtttttttttttttaaaaatttaaaatgttttgggacgttttttttttttgttgtatatttaggtaggagagttatgtataagatgtttttgggtaggatttgggggtggtaagatgtgtgtaattgtttagtattaagtaagttgttaaaagttggatgggagattaggatgagggtggaggtatgtgggagtagagagggttaggagtttgtcgagttattatagttattttggagaaattatagtatttttgaaaataataataaaaaaaattaattattttattgagatattttatgtgttgtggttttaagtggtttatttgtattaatatttttaatttttataataataaaataaatattaaattattattatttatattttataggtgagaaaagggaggtataaaagaggtaaaggaatttgttaaagttatattattagggagtggtagagttgggattttaagttaggttttttagttttagaattggtttttttaattattataatataaggtttttgatgagtttagtttatttatttttatgtttttaattgttttaaattttttgaaaggggaggatttttggagttgtgagagtagttttttggttgatatggtttttgggtaaaggtgatatatataagggaaggttagaggggttattagtaaaatgaagttagtggtgttgttatttgtagaaatttggggtataggggttgggttcgtttacgtttgtaattttagtattttgggaggtcgaagcgggtagattatttgaggttgggagtttaagattagtttgattaatatggagaaattttgtttttattaaaaatataaaaattagttgggtatggtggcgtgcgtttgtaattttagttattcgggaggttgaggtagggtaattttttgaatttaggaggcggagattgcggtgagttaagatttcgttattgtattttagtttgggtaagaagagtaaaatttcgttttaaaataaaataaagaaatttggggtatgggaatattaggtattgttaggaatagagtttagtgtagatgtgtttaagaagtgaaattattttgtattattttgggagttgtttattttttttagtatttaaatattattttaattgattttgtatagtatatgttatgagattttgtaagtatttttgagtttttgagttgtttttttttttttttttttttcgtttttgagatagggtttttttttgttataggttggagagtagtggcgtgattagggtttattgtagtttttattttttaagtttaagtgaattttatgttttaattttttgagtagttgaaattataggtatgtgttagtatgtttggttaaatgaaagttttttttttttttttttttttggttttaaatttttggatttaagtgatttttttgttttagttttttgaaatgttggaattataggttgagttattatatttagtttaatttttttttagtgttgttgtttttagtaattttagtttaatttgtattttttattatgtttaatgatagattatgtatatagtaatatatttagagtgatatattgaatatagtaaatgtgtgtggtaattttttaatatgttttatgttgtttatatgtgaaatagtaagtatttaataaatggtagtttttttatataaatatttagtaatagtattgtataagtttttatagataatttgtaaaatatgtatttttatattatttatgttattagaagtgataatagatattttgttttgatttttgttgtttatttaatttataattttatattaatatataatatggtttttttgtatttttgaaaattgattgttagttggacgtggtgatatgtatttgttgagtttaagagagagaggttgtagtgagtattgatcgtgttgttgtattttaatttgtgcgatagagtgagattttattttaaaaaaattttttaaataaaaattgatttttataaagtaatatgttttgaaaataaattttagttagttaaagtcgatttgtattttttttaaattttttcgtttgtatatatatattattagagggcgttttacgaaagttattgtttgtgagtattgtaagtagcgtttatatatttttttttttttttttttttatttgttttatataaatggtaataatttattttgaagttttttttttattagtatttaaagaatatttttgttatttttaaatagtttataatattttattggatgaatataatatagttatttaagtagtattttaagatatttagattgttttagttttttaaatatttatttttattaggatgaagtaaaaatgtatttaattaatttaaattaatatatatttaaaagtaagtgttatgtgttatattttatattaggttttgattataaaatttttagtaaggtagataagatttttgtttttatgagttatattttagttgtattgtagttatattatagttatatgttatttaaaggtataaattgattaatgttaggttattatttttaatttttttgtttttatatataatttggtaatgaatattagtttattaaggttagttatatattttgaggggtaaaatgaaattatggagttttttgtttaatagtaggaaaagattaggtgtagtggtttacgtttgtaattttattattttgggaggattaggttggaggatcgttcgggtttagggtttcgagtttagtttttataatatagtgagattttatttttagttaaataaatttattaaaaaataataaaatagaaaataaaaagtagaaaaaaaatttaattttttttttttttttgtggttttattgttaatttattatgtggggtttttttttttttttttttttttttttttttttgagacggagtttcgttttgtcgtttaggttggagtgtagtggcgtaatttcggtttattgtaattttcgtttttcgggtttaagttatttttttgttttagttttttaagtagttgggattataggcgttcgttattatgtttagataatttttttgtatttttagtggagacggggttttatcgtgttagttaggatggtttcgatcgtttgatttcgtgattcgtttgttttggttttttataatggtgggattataggcgtgagttatcgcgttcggtttttttttttttaatttaatgttatattttaggtataggagtatttagggggaagtgtagatttttataagtgtttagggttatgttttttatttggtaagggaggtgtgtatgtttgatcgttttttttttttttattgtttttaggtttttgttgggagcgagtttgtatagaaggtggtggagtcggtagttgaaaattagttttggggaggttgggaggtatggggagtaggatttcgtttgagttaggttttaaaagtttttagtttatgttttgtttttttatcggattttattataagatataaattgaaagataaaattattaagaattttaagataggaattatagagttttagaatttaaatatagtattttttttaagtatggggtttttgtgtgattgttttggttatttatttatgaagtttattttgttttttatattggtagaatagtttgtttagagagtatgttttttggtaattttaataaatattgataaattgttttgtataaagttgtatattttattgtattttggttttttttttagtgagtgagggaataatattatttattttattagggttattatgagaatgatatgaatgagtttttgtgaattgtgaatggtatatagtaattatttagtaaatatagttattagtttttatatgtagtgatttttttttggaattttttttagt

SEQ ID NO: 1257 - DNA, 5296 bp, Artificial Sequence
  chemically treated genomic DNA (Homo sapiens)
tattgtatttttgtttgggcgatagagttaagattttgttaaattaaaaataaaaaataaataaaaaaagttgataaagatgtgggggaaatatagtattttaatacgttgttaagtgtataaacggaattattatatttatttatttatttatttatttatttatttatttatttagagatggagttttatttttgttgtttaggttggagtgtaatggtataaattcggtttatcgtaatttttatttttcggatttaagtaatgtttttgttttagtttttcgagtagttgggattataggtatgtgttattttgttcggttaatgttgtatttttagtagagacggggtttttttatgttggtcggattggtttcgaatttttaattttaggtgattcgttcgtttttgttttttaaagtgttgggattataggtgttagttatcgcgttcggtcggaattattattttagagagataattagtaatgttgagaaagagatgaagcgatagagaattttagtgtttaaagttatttgttttaaattttttaattggaaaaaattgttagttgttgggaaatttgaaaatatggggagataaagggtaagtgtataggtacgggtttacgagagttaaaagttagttatttttttagtttattgtttagtgatattatgttagtagtttgaaataggttatgacggaagtatttatattataaaaagtagtaaatgttattaaatagaatattttattttatttcggttagtttgttagtatattatagtttgagttaatttttatttagtaattttttgagttttttgaataatcgttatttagagattaagtattagttttataagttaggtttttggttttatattttaaaaggaaagtttaggtttgttgagtagtattggatttttaagagtttgtcggatttttttattaaagtaggtagatttatatggtttttttttttttagatattttagtttttgtttgattttttaaagaaattaaggtttgggttaagtgtggtggtttacgtttataattttagtattttgggaggttaaggtaggtggattacgaggttagtagttcgagattagtttggttaatatggtgaaatttcgtttttattaaaaatataaaaattagttagacgtggtggtaggcgtttgtaattttagttatttgggaggttgagataggagaattgtttgaatttgggaggcggagtttgtagtaagttgagattatgttattgtattttagtttgggtgagagagcgagattttatttttaaaaaagaaagaaagaaagaaagaaattaaggtttggagaagatagttttttttagttgtgtggaagtaaaagaaaatgggaaaatgatagggatagagagtggatcgttttttatgtagaagtagaaagtttttgttttaatttttttgatagttatatataagttttttgtagtttttgtatttttaatcgttattatattgtttttttgtagaagatataggatttagacgtaggtgtagagggagaaggaaggtttgaggataatttttaggttttaggtttaggagtttaggtagtttatgagagatgtagaatagagtttgaagagagggtttaaagggtgtatgggagttagttatatttggggtttggtgaatttgaagtgtttatgggataataaatagagatgtttgattgagaatttgaagtttgagagattgatgagattttgtaagttattagtgcgtagatagagttgaagttatgagattattttggtaatagaaaaggttgagtagggatatttggaggtagtaagatttaagagaaagagtaattatagaaggaaattgagtggggatatgataggaggtaggaggaaattaggagaatgtgatattggaaggatgaagattattaagtgttgtagaaaggttgaatacgaagaggattaagatgagtgatatagtgagacgattttggttggttgagagggaagaaagaaagtaggagataagatttaagtaggtaggggttaggttaggtagagttagatatggtattagaaggcgtttgagtggtattttaagtgggaaatttttggaggattttaagaggggagtgaagaaatttgatgtgtattttaaatatattatgttgttgtgcggaggataggttggggggcgagggtgggaatggaggtggggatattagttaggaagttattatagtaatttagatttggattaggacggtaagggtggaggtggttaaatgtgtttagatttagtgtatattttgaaggaaggtttgataggatttgttaattaattggatgtagaatgtagagtaagagaaagatagggattaataagtatggaaggtgttggttcgagtaattgagtaggtggtaatgttatttatagaggtaggtaaggttagaggaaaataaaataaatagggttaggggtgggaatgagaatttagagttttattttgattattttaagtataagatgtttgtcgggtgtggtggtttatattcgtaattttagtattttgggaggttaaggtaggtggattatttgaggttaggagttcgagattagtttggttaacgtggcgaaatttcgtttttattaaaaatatatatataaatatacgttaggtatgatggtaggtgtttgtaattttagttattcgggaggttgaggtaagagaattgtttgaatttgggaggtagaggttgtagtgagttgagattgtattattgtattttagtttgggtaataagagtaaaatttcgtttaaaaagaaaaaaaaaaaaaagtataagatgtttttatatatgtaagtggagaagttaagtaggtagttggttatttaaatttggagtttagggaagaagttatagttagagatattatttgaagttattagtatatatagagtattaaagttatgggattgtatgaatattgaagttgtgtttttttttttatttgattttatagaagtttgggtagtttttgtttggggattggggaaggtatttaaagttattattattagttttcgtaatgtgagagttaggtatagttaaagataaatttgagttagggattgtttgtagagaaatggtgttagagaaattaagattttataggagagttgaaggtgttttattttttttttgatattgaggatatttagtttgtatagttagtaatgggagttttagttgaggtttgaggggttaaaaatgggagttgatgtggttatgtattttttttataatttattttttgtttttatttttatttatataagagttaagttttttagaattggtataaaatttatatatagagtagttttaggaggaggtttggggtttagtgataggagatgagtataggttgaagagttgagattagttatttattgaatttttttttttttttttttgagatagagttttgttttgttatttaggttggcgtatcgtggtgtaattttgggttattgtaatttttgttttttgggtttaagagatttttatgttttagttttttgagtcgttgggattataggtaagtattattacgtttagttaatttttttgtatttttagtagagatagggttttattatattggttaggttggttttaaatttttgattttagatgatttatttagttcggttttttaaagtgttggtattataggtgtgagttattgtatttagttttatttattgatttagagtaaataggataaaagtattgaagattattgtttttttaattttaagttatatttaaattatttagggattttggtaaaatgtaggttttatttttgtaggggttagttttatagggttagtgggtttttttttttgtgtgtaaagacgagagattatagaaataaagatataagataaagagataaaagaaaagatagttgggtttaggggattattattattaagacgcggaaattagtagtggtttcgaatgttaggttgcgtagttatttattggatataagataagggggtagggtaaggagtgtgagttatttttaatttgagtaaataggataaaagtattgaagattattgtttttttaattttaagttatatttaaattatttggggattttggtaaaatgtaggtttaattttaataggtttggggtggggtttaagattttgtatttttaataagtgtttatttaatgttgttgtttttggtttatagattatattttgagtagtaagggattagaggtagtcgtggaggttatttataatggagagggtatttttagttttagggagaatgtgtttatttatgcgtaaagttatagaattattaaagtggaaatatttattatttggtatggttgtggggtagagagttattttttagtagattagttttttaagagtatagtatagtatggttgttatgtaggtgggttttgaaggttgattttttgagttttatgttttagtatgtaattttgggtaaatttttaatttttttgtattttcgtttttttatttttataatggaaataataagattattgtgcggattgtttaagtgaatggatataaagtgtttaatatacggtagtatagtaagtgtttagtaaaagttgttattttgatgttattatattattttataatcgttagtatagatatagaggttgagttgttttttggtatacggttaaatatataatttttattttttttatattaaaaggtttgtgtttttttttttaaattttttttttttttttgtttatttttttttttttggtttttggttttagtgtggtttggatgggttttagaggggtagggatagggataggacgtggggttgtatttgataggaatttgaggggttggtttgggaggggattggggtttagttttttgaagggaggatgggttaaggtaggtatatagtggcggagaagatgtttttttgggttttttttatggttattttttgtttttttttggttttttaaaatttggtttaagttagtagttaaggtgaggtgtatagagggtggagattatttatgtttaggaagagggagttttgggaggtgatgtagggtttcgggaggggaggtagagtaagaggtttttttgttggttttttttttttttatataaatatgtttgggaggatttagggttaatttattagttgttttttaga

SEQ ID NO: 1258 - DNA, 5296 bp, Artificial Sequence
  chemically treated genomic DNA (Homo sapiens)
tttaaggaatagttggtgagttggttttgggtttttttaggtatgtttatgtggaaggggaggggattagtaggagagttttttattttattttttttttcggggttttgtattattttttagggttttttttttttgggtataggtgatttttattttttgtgtattttattttggttgttgatttgggttaggttttgaggggttaggaggaggtaggaggtgattatgaagagggtttaggagggtatttttttcgttattgtgtgtttgttttagtttattttttttttaggaagttgggttttaatttttttttaggttagttttttaggtttttgttagatatagttttacgttttgtttttgtttttgtttttttggggtttatttagattatattggggttaggggttaggggagggggagtgggtaggagggaaggaggaatttgaaagagaggatataggttttttggtgtgagggagatgggggttgtatatttgatcgtgtattaaaaggtaatttagtttttgtatttgtgttaacgattatagaatggtataatagtattagaatagtaatttttattgagtatttattatgttgtcgtgtgttaagtattttatatttatttatttagataattcgtataatagttttgttatttttattatagagatgaggaaacggagatatagagaagttaaagatttgtttaagattatatattaagatataaagtttaggaggttaatttttagaatttatttgtataatagttatgttgtgttatgtttttgggaggttaatttgttgagaaataattttttgttttataattatgttaaatggtgggtatttttattttaatagttttgtgattttgcgtatgaataaatatattttttttggaattggaaatgttttttttattatgggtggtttttacggttgtttttaattttttgttatttaaaatgtggtttgtagattaggagtaatagtattaggtgggtatttattagaaatgtagaattttaggttttattttaggtttattaaagttgaatttgtattttgttaaaatttttagatggtttgaatgtaatttaaagttggagaagtaatggtttttagtatttttattttgtttgtttagattggagatggtttatattttttattttgtttttttgttttgtatttaataaataattgcgtagtttggtattcggggttattattggttttcgcgttttggtggtagtggttttttggatttagttgtttttttttttatttttttgttttgtgtttttatttttatgatttttcgtttttgtatatagggagaaaaatttattgattttgtggagttggtttttataaaaatagaatttgtattttattaaaatttttagatggtttgaatgtaatttaaagttggagaagtaatggtttttagtatttttattttgtttgttttgaattagtggatggggttgggtgtagtggtttatatttataatattagtattttgggaggtcgagttgggtggattatttgaggttaggagtttgagattagtttggttagtatggtgaaattttgtttttattaaaaatataaaaaaattagttaggcgtggtagtgtttgtttgtagttttagcgatttagaaggttgaggtatgagaattttttaaatttagggggtagaggttgtagtgatttaagattgtattacggtacgttagtttgggtgatagggtaagattttgttttaaaaaaaaaaaaaaaaaaatttagtggatggttggttttagttttttagtttgtgtttattttttgttattgaattttaagtttttttttgggattgttttgtatgtggattttatgttaattttaggaggtttgatttttgtgtgggtggaggtggggataggaggtgagttgtggggagggtgtatagttatattaatttttatttttagttttttaggttttagttagggtttttattgttggttgtatagattaagtatttttagtattaaggaggagatggaatatttttagtttttttgtgaagttttagtttttttggtattatttttttgtaagtagtttttgatttagatttgtttttagttgtatttggtttttatattacgaggattgatggtaatgattttggatgttttttttagtttttaggtaagggttatttaaatttttgtgagattaagtgagagggaaaatataattttagtgtttatgtagttttatggttttgatgttttgtgtatgttgatgattttaaatggtatttttagttgtgattttttttttgggttttagatttggatagttaattgtttatttgatttttttatttgtatatataaaagtattttatatttttttttttttttttttttagacggagttttgtttttgttgtttaggttggagtgtagtggtgtaattttagtttattgtaatttttgttttttaggtttaagtaatttttttgttttagtttttcgagtagttgggattataagtatttgttattatgtttggcgtgtatttgtatgtgtatttttagtagaggcggggtttcgttacgttggttaggttggtttcgaatttttgattttaggtgatttatttgttttggttttttaaagtgttgggattacgggtgtgagttattatattcggtaagtattttatatttaaggtggttaaaataaaattttggatttttatttttatttttaattttgtttattttgtttttttttagttttgtttatttttgtaaatagtattattatttatttagttgttcgaattaatattttttatatttgttgatttttgttttttttttattttgtattttatatttaattaattagtaagttttgttagatttttttttaaaatgtatattgaatttgaatatatttaattatttttatttttatcgttttaatttaagtttgggttattgtaatagttttttaattggtgtttttatttttatttttattttcgttttttagtttgtttttcgtataatagtatggtatgtttaaaatgtatattagatttttttattttttttttaaaattttttaaagattttttatttagaatattatttaaacgttttttgatgttatgtttggttttgtttgatttggtttttgtttatttgaattttattttttgttttttttttttttttttagttagttaaaatcgttttattgtgttatttattttaatttttttcgtatttaatttttttgtaatatttgataatttttatttttttaatgttatatttttttgatttttttttattttttattatgtttttatttagtttttttttgtggttgtttttttttttaaattttgttgtttttaggtgtttttgtttagttttttttgttgttagagtgattttatggttttaattttatttacgtattggtaatttgtaagattttattagttttttaaattttagatttttaattagatatttttatttgttgttttataggtattttaaatttattaagttttaaatataattaatttttatatattttttaggttttttttttaagttttgttttgtattttttatgggttatttaggtttttaagtttggaatttgagagttatttttaaattttttttttttttttatatttacgtttaagttttgtgttttttatagggaggtagtataatagcggttaaaggtgtagagattgtaaggggtttgtgtatgattgttaagagagttgagataggggttttttgtttttgtatgggaggcggtttattttttgtttttgttatttttttatttttttttgtttttatatagttgaaaaaagttgttttttttaggttttgattttttttttttttttttttttttttaaagatggagtttcgtttttttatttagattggagtgtaatagtatggttttagtttattgtaaatttcgttttttaggtttaagtaatttttttgttttagttttttaagtagttgggattataggcgtttgttattacgtttggttaatttttgtatttttagtagagacggggttttattatgttggttaggttggtttcgagttgttgatttcgtgatttatttgttttggttttttaaagtgttgggattataggcgtgagttattatatttggtttaggttttgatttttttagaaaattaagtaggaattgggatatttaggagaaaggaggttatataggtttgtttgttttggtgaaggagttcggtaggtttttgaaagtttagtgttgtttagtaggtttaggttttttttttgggatgtaaggttaaagatttggtttataaaattggtatttgatttttgggtagcgattgtttagagaatttaagaggttgttggatgaggattggtttaggttgtagtgtgttgataaattggtcggggtgaggtagggtgttttgtttggtagtatttgttgttttttgtggtgtaaatattttcgttatggtttgttttaagttattaatatgatgttattaagtagtgagttgggaagataattggtttttggttttcgtgagttcgtatttgtgtatttgttttttatttttttatgtttttagattttttaataattgatagttttttttagttagaaagtttgggataggtagttttaggtattaggattttttatcgttttattttttttttaatattgttagttgtttttttaaaatgatggtttcggtcgggcgcggtggttgatatttgtaattttagtattttgggaggtagaggcgggcggattatttgaggttgggagttcgagattagttcgattaatatggagaaatttcgtttttattaaaaatataatattagtcgggtaaggtggtatatgtttgtaattttagttattcgggaggttgaggtaggagtattgtttaaattcgggaggtggaggttgcggtgagtcgagtttgtgttattgtattttagtttgggtaataggagtgaaattttatttttaaataaataaataaataaataaataaataaataaataaatataatggtttcgtttatatatttagtagcgtgttagggtgttgtattttttttatatttttgttaattttttttgtttgttttttgtttttgatttgatagagttttaattttgtcgtttaggtaggagtgtagtg

SEQ ID NO: 1259 - DNA, 5962 bp, Artificial Sequence
  chemically treated genomic DNA (Homo sapiens)
  unsure 5264: n is a or g or c or t
tttagaatattatagaatatatattttagtttatgtttttttattagttaggtggttttagataatttatttaagagtttttaagtttttttattgtaaaataaagagggtttgttatgagaataaaaggtaatcgggtatatgaaattgttataaagttaatggtatttattttgtaataatttttttggttatagtataaattttttttttttatttgggtttttaggttgatattttattatgattttatagatttttggttaagaatttgtttaatgtattttgttttggtttaaattaattgatatttttataattttgaaatttatttaaattatatgggttttttttataattttgaagttatagttttttaaatatagtgtaatgtgtatttatgtttttaaaatagtatataaaagtgattttatatttatttttatttttttgtatttttgtatttttttagttaagatattattacgaggaaagggtgaattgttaaatgttgtttgtaggagatagttgattttgtaaggaaattagttattcgtattttgggtatatgttatttattttatttttttaattgtttaaggatagtgtgatttttagggttttaggtatgtttatttgttttttagtgtgaggttgtatattaatttagttaggagttgggttacgtttaatattttttgtagatatagttgttagaagttaaaattatttgtagtgtttttttgttgtttttattgtatttaggtttttttataaattttttttttaaaaaaaattttgtattttttttatttgttatttattgttattatacgggagttttgttgacggaggggtgagatgtgggggcggggtgaggtgttttatagttttttgattaaattttagttttttagtgggtttttgttttcggattgtgatttgtgattttcgtgagcgtttttaaattttttttttttttttttttttttttgttaagttgaattgtagttggaagattagagggagcgagtattgaatagttattttttagttgtttagttaagataacgttttgataaattttttttattggggagtaagtttttgttataggaaatgttttatgtatattttaaaattattagattttttttttttttgttagggatattaggtgatattttttggtatatattgtgagaattaagttgtatttttggaagtaaagtttgtaagtgtttagggggcgttttgaagattgtagtttttaggaggttttagtgtttatattggtttatatttagttttttgttaaatttttgtttaggtgtttttgttagtttgtggttttattggtattagttgtaggtgatttggtgtttgttgtgatgttttgtaattttttttttttttcggttttaggttggtagtttttttgagattttagttttttgatgggtttaagacgttattgatttttagtttttttagtttttttcgtggtgtcgagatatgagtgatgatttttaagttttttagatgttgaagttgtaattagaagttttttatgaatttttttttaaaaatagatagtatggtatagtgtagtgttttttaaaagaaaataaatatattgatttttatattttattaagtggtgatatattattttattataattttatgttaaaatagagaaatacgaatttagatttaaatattgtaagtttatattttttaattaagtttttgaaatataatgtatatgttaattaaattttaaaatttcgtaaaaaaattaaaattttaattaatattattaatttaagattgtgtgggtaagttaaaatattattataggtttaatagaaggaagatattatttaattttgatattgtttttggtttgtttttgtatttgattttaataatttttatataggaaagttttgtttaataaggttatataaaatgttattggtatttttatagttttttgtttatgattattaaagaaaaagttttgttaatatgtaattttttaatgttaattttattaaagaatgttttgataattttgtaaatgttttataattttatagtaatatgtgttcgttgtagtattattaaaatttgtatttatattattatttatttattgttttgaattaagaatatgaaaaattttatttcgaaattttattatatatatattatataataaataagttataatgtattaattatatattatgattaataatttgttgtaattttagatatataaaaatattttttaatgagtgtaaaatgttaaatttttttttgagtttagtatatttgtattatagtgagttttaggatatttgaattaatttttttaagttatttgtttatttgattatgaatttttgtttggttattgggtataattttatatggattttattttagatatatatatttataagtaataaaaataaagtaattgggatttattataataattatgaataaagtaattatttatatgatttggaatttgtttatatttgtggtttgttttttgtatattgtttttgatggagatattatagttttttaataatatatatatttattttagtttaagaaaaaattatattttgttaaattttgtaattagattgggtttaaatattagttttgatgatttataattttgatttcgagaaatttatttattatttttaaatattaattttttaattagggaagtgatatgataaagttgttgtgaagttaaatgaaggaatgaatgtaaaattttaattttttatatattatttttgtttttaattaattattggtttgaattgaatatttttaatatggttttttgttaaaggtgtttttatatatagtaagatttaatagataatattatgttatataatttataattattatatataaaattatataaaattatatagtatttatttagatatataaaaagggaagttttttaatgaaaaattagattggttgaagagtgtggaaattattatatagggaagtggttagtattgtggatatatattaaatagtattatagagatatattgaaaataaagtatattgatagaaagaaattttattaggataggattttgggagattggtgttttgttatttttagagtttgatttttttaattacgtagtattgttagggatatttaaattttaaattttagattttgtataaaaaaatttaaaaggattatattttaaaataagaagtatgtataaataattgtaaaggaaagagtgtgagttttgtagtttttagttttgtgttagtaagaatttgatgaggaatagttaatagtatttatgttggtttaggttggattaaattgtgatcgtatttttagtttttaagttgtttggttagaaattatgtagtttattttgatgtttgttttattattattattagttttttagtggttattttaagaataattgaataatattgttattttgtattttttaaagatcgtgcgttgttttcgtatatttttttgtagacgtattgttttttgaaggatggtgtttatgggtatagtaatttggggtattttttggtaggaagtatgattttttttgtttgggtataaaagagtgattacggaatataagttaaatatttttttttagaaatattagttgtaaaatttagtttattaatgtaatgttgaacgtttttatgtgagttatatttgaattttttgaatgtgagtaaataacggagttgaattgtataaaattttgatggatggtagaagggaaagaatattttttttatttgatttatgtttgagattttttttttttattatattattggaaataaataatttgtttggtgttttaaaaattaatgttattattattatagagagaataggagtgagtgtttttaggttattatttgtttttattaaggtattatattttttttttacgtgttttgtgtttgaggttagggataaaggtataggaaaaaggatttaagaaaaaaattcgaatttttaaatatggagttttttttttttttttttttttttttgaggtggagttttattttgttgtttaggttggagtgtagtggtgcgatttttgtttattgtaatttttgttttttgggtttaagtaattttttagttttagtttttcgagtagttgggattataggcgtatgtttggttaatttttgtatttttagtagagattggttttatttttttggttaggttgttttagagtttttgattttaagtgatttagttatttcggttatttaaagtgttgggattataggtatgagttattatatttagttaaatatggagtttttatttaatattatagtaacgtgaaagaggagattatgagaattaatgtatgttttagaaggtatagattatttataaaaaaggaaagattaggttgggtacggtggttcgcgtttgtaattttagtattttgggaggttaaggcgagcggattatgaggttaggggattaagattattttgattaatatggcgaaattttgtttttattaaaatataaaaaattagtcgggtgtggtggtatacgtttgtagaatttgggaggtagaggttgtagtgagttgagattatattattgtattttattttggtgagatagcgagattttatttttaaaaaaaaaggaaagtttaatttgttgtaaattatgtgtttgttttaataatttttgtttttttttttttttatttttttttttttttttttaaagcggtttaaatggggtgaagagtgagttatttgataaatttagattttgtaaatttgtgtattgatgagagtgttattggaatatattaagaaaggtttttaacgtaggaatgtgttattttttttttttatgtattagatgttgaaatattatgagataaagattttaggttttaattgtaaagagagagaagtggataaattagtgttgttttttttaggacgaaaggtaaagaaaaaaaaaggtttattttaatgttttttttagaattgtttttattgattgttatgtgtgtattttgtgtgtgtgtgtgtatgtatgtgtgtgatatatatttgtgtgtttgtgtgtgtatgatgagatgaatgatttatagtagaatgtttttatgtattagtaataatttggtttggtttttttcgataattanaaaatagggatttttgttaaattttcgtgagtgaaaataggttgggtacggtggttcgcgtttgtaattttagtattttgggaggttaaggcgagcggattatgaggttaggggattaagattattttgattaatatggcgaaattttgtttttattaaaatataaaaaattagtcgggtgtgatggtatacgtttgtagaatttgggaggtagaggttgtagtgagcggagattatattattgtattttattttggtgagatagcgagattttatttttaaaaaaaaaggaaagtttaatttgttgtaaattatgtgtttgttttaataatttttgtttttttttttttttattttttttttttttttaaagcggtttaaatggggtgaagagtgagttatttgataaatttagattttgtaaatttgtgtattgatgagagtgttattgaaatatattaagaaagatttttaacgtaggaatgtgttattttttttttttatgtattagatgttgaaatattatgagataaagattttaggttttaattgtaaagagagagaagtggataaattagtgttgttttttttaggacgaaaggtaaagaaaaaaaaaggtttattttaatgttttttttagaattgtttttattgattgttatgtgtgtattttgtgtgtgtgtgtgtatgtatgtgtg

SEQ ID NO: 1260 - DNA, 5962 bp, Artificial Sequence
  chemically treated genomic DNA (Homo sapiens)
  unsure 699: n is a or g or c or t
tatatatgtatgtatatatatatatagagtatatatataataattaatagaaataattttggaaaaaatattaaaataagtttttttttttttttatttttcgttttaaagaaagtagtattgatttatttatttttttttttttataattgaaatttaaaatttttattttatagtattttagtatttggtatatgaagaaaggaaatgatatatttttgcgttgaaaattttttttaatgtgttttaatagtatttttattaatgtataggtttgtaaaatttaaatttgttagataatttattttttattttatttaggtcgttttaaaaaaaaaagagaagtgaaaaggaaaagaaataagggttgttgaaataagtatataatttatagtagattgagtttttttttttttttggagatggagtttcgttgttttattagggtggagtgtagtggtgtgattttcgtttattgtaatttttgttttttaggttttataggcgtgtgttattatattcggttaattttttgtattttagtagagatagggtttcgttatgttggttaggatggttttgattttttgattttatggttcgttcgttttggttttttaaagtgttgggattataggcgcgagttatcgtgtttagtttgtttttatttacggaaatttagtagaaatttttattttntgattatcgaagaaaattaaattaaattattgttgatatatgaaagtattttattataaattatttattttattatatatatatagatatataaatatatattatatatatgtatgtatatatatatatagagtatatatataataattaatagaaataattttggaaaaaatattaaaataagtttttttttttttttatttttcgttttaaagaaagtagtattgatttatttatttttttttttttataattgaaatttaaaatttttattttatagtattttagtatttggtatatgaagaaaggaaatgatatatttttgcgttgaaaattttttttaatgtgttttaatagtatttttattaatgtataggtttgtaaaatttaaatttgttagataatttattttttattttatttaggtcgttttaaaaaaaaaaaaagagaagtgaaaaggaaaagaaataagggttgttgaaataagtatataatttatagtagattgagtttttttttttttttggagatggagtttcgttgttttattagggtggagtgtagtggtgtgattttagtttattgtaatttttgttttttaggttttataggcgtgtgttattatattcggttaattttttgtattttagtagagatagggtttcgttatgttggttaggatggttttgattttttgattttatgattcgttcgttttggttttttaaagtgttgggattataggcgcgagttatcgtgtttagtttgatttttttttttttataagtaatttatgttttttaaaatatatattaatttttatgatttttttttttacgttattataatgttgagtaaagattttatgtttggttaggtgtggtggtttatgtttgtaattttagtattttgggtggtcgaggtggttggattatttgaggttaggagttttagaatagtttggttaagagggtgaaattagtttttattaaaaatataaaaattggttaggtatgcgtttgtaattttagttattcgggaggttgaggttgaagaattgtttgaatttaggaggtagaggttgtagtgagtagagatcgtattattgtattttagtttgggtaatagagtgagattttattttaaaaaaaaaaaaaaaaaaaaaaaagattttatgtttagagattcgagttttttttttagatttttttttttgtatttttatttttagttttaaatataaaatacgtgaagaaagaatatgatgttttagtaagaataagtaataatttaaaagtatttatttttgttttttttataatgataatagtattaatttttagagtattagataagttgtttatttttagtagtatagtagagggaaggaattttaggtatggattagatgaaagggatgtttttttttttttgttatttattagggttttatataatttaatttcgttatttatttatatttaagaagtttaagtatgatttatatgaaaacgtttaatattatattaatgagttaagttttataattgatatttttgggagaaggtgtttagtttatatttcgtagttatttttttgtgtttaaataggagaaattatgttttttattaaaagatgttttaaattgttgtgtttatgggtattattttttagaagataatacgtttgtaagaaagtatgcgggaatagcgtacggtttttgagagatgtaaagtaatagtattatttagttatttttaaggtaattattaaaaggttaatagtagtagtaggataggtattaaagtaagttgtataatttttaattaggtagtttgaagattagaagtacgattataatttgatttagtttggattagtataaatgttattggttattttttattaaatttttattgatatagaattggagattataaaatttatatttttttttttataattatttgtatatgttttttattttaaaatatagtttttttaggtttttttgtataaaatttgaagtttaaaatttagatatttttgataatattacgtgattagaaaagttagattttgggaataataagatattaattttttaaaattttattttaatgaggtttttttttgttagtgtgttttatttttagtatgtttttgtaatattgtttggtgtatatttatagtgttgattatttttttatgtgatgatttttatattttttagttaatttaattttttattaaaaaatttttttttttatatgtttaaataggtattatataattttatatagttttatatataataattatagattatgtaatataatattatttattaggttttattatatgtaaaaatatttttagtagggaattatgttaaaaatgtttagtttaagttaatgattaattgagaatagaggtaatatgtaaagggttgggattttgtatttatttttttatttgattttatagtaattttgttatattatttttttaattgagaaattaatgtttagagatggtaagtaaatttttcgagattagagttatgagttattagagttggtatttaaatttagtttgattataaaatttggtaaaatatagtttttttttaagttgaagtaggtatatgtattattaggggattataatatttttattaaaaatagtatatagaaaataaattataaatatgggtaaattttagattatgtggatagttattttgtttatagttattgtgatggattttaattattttatttttgttgtttatggatatatgtgtttagaatgaggtttatgtaagattatgtttagtgattaaatagagatttataattaaatagataaatggtttgagagaattgatttaaatgttttaggatttattgtggtataggtatattgaatttaaaagaagatttaatattttatatttattaagaggtatttttgtatgtttaaagttatagtaggttgttagttataatatatagttaatatattatgatttatttattgtatgatatatatatgataaagtttcgagataaaattttttatgtttttaatttaaagtaataagtaaatagtgatataaatatagattttaataatgttgtaacggatatatattgttgtgggattataaagtatttatagaattattaaaatattttttaataaaattgatattgaaaaattgtatattggtagagttttttttttgataattataagtagaaaattgtgaaggtattagtaatattttatatagttttattaaatagaatttttttatatgagaattattgaagttaaatatagaaatagattaaggatagtattagaattgaatagtattttttttttattaaatttataataatattttggtttgtttatataattttaaattggtggtgttagttaaaattttaatttttttgcgagattttaaaatttaattaatatatgtattatattttaaaaatttggttaagaagtgtaggtttatagtgtttaggtttaaattcgtgtttttttattttaatataaaattataataaaataatatattattatttaataaggtatagagattaatatatttatttttttttgagaaatattgtattatgttatattgtttatttttaaaagaaagtttatggaagatttttggttgtagttttaatatttaaagagtttggaagttattatttatatttcgatattacgaaaaaagttggagaaattaaaaattaatgacgttttggatttattagagaattgaggttttaaggaaattattagtttgaaatcgggagagagaggagattatagagtattatagtagatattagattatttgtagttgatgttagtggaattataaattggtaggaatatttaagtaggaatttggtaagaggttgagtatggattagtgtgagtattggagttttttgggggttgtagtttttaaggcgttttttaaatatttataggttttatttttaggaatataatttggtttttatagtatatattaaaaaatattatttgatgtttttggtagagagaagggaaatttaatgattttaaaatatatatagagtattttttgtaataaaggtttattttttagtgaaaagagtttattagagcgttattttagttaggtagttgaagggtaattatttaatgttcgttttttttagttttttagttgtagtttaatttggtagagaaaaaggaaaaaaaaaaaaaagtttagaaacgtttacgaaggttataggttatagttcggggataagggtttattaaaagattgagatttaattagaagattatagaatattttatttcgtttttatattttattttttcgttaatagagttttcgtatgataatagtggatgataggtgaaagagatgtaaggttttttttgaaagggaagtttgtaggggaatttaaatatagtagaggtaataaagagatattataggtaattttagtttttgatagttgtatttataggaaatgttagacgtaatttagtttttagttagattaatatataattttatattaaaaggtaagtaagtatatttaagattttaaaagttatattgtttttagatagttagggaagtagaatggataatatatgtttaaaatacgaatgattaatttttttgtaagattagttgttttttgtaagtaatatttgataatttatttttttttcgtgatgatgttttaattaagaagatataaaaatgtaaggaaatgaaagtgaatatgagattatttttatgtgttattttaaaaatataaatgtatattgtattgtgtttagggaattatggttttagaattgtaggaaagatttatgtagtttaaatgagttttaaagttgtaaaagtgttaattaatttaagttagagtaaaatgtattaagtaaatttttaattagaagtttgtgaaattatgatggaatgttagtttaggggtttaaatgagagaaaagaatttatgttatagttaaaaggattgttgtaaggtggatattattgattttatagtaattttatatgttcgattgttttttatttttatagtaaattttttttattttgtaatgagaaaatttaaagatttttgaataaattatttagggttatttggttagtgagagagtatgaattagaatgtatgttttgtgatgttttaag

SEQ ID NO: 1261 - DNA, 5763 bp, Artificial Sequence
  chemically treated genomic DNA (Homo sapiens)
aaaattggttaggtgcggtggtttatgtttgtaattttagtattttgggacgtcgaggtgggaggattatttgaggttaggagttcgagattagtttggttaatatggcgaaattttatttttattaaaaatattaaaattaattgggtgtggtggtttgtgtttgtaattttagttattcgggaggttgaggtaggagaattattagaatttgggaggtagaggttgtagtgagttaagattatgttattgtattttaggttgggtaataagagtaaaattttattttaaaaaaaaaaaaaaaaaaaaaaaaaaggttaggtatattggtttacgtttgtaattttagtattttgggaggtcgaggagggcggattacgagtttaggagattaagattattttggttaatatggtgaaatttcgtttttattaaaaatgtaaaaaattagttgggtatggtggcgggtatttgtagttttagttatttgggaggttgaggtagaagaatggtatgaatttgggaggcggagtttgtagtgagttgagattgtgtttttgtattttagtttgggtaatagagtaagatttcgttttaaaaaaaaaaattttttaaaaaaaaaaaaattaaattaaaaattgagttattatatgatttagtaattttattgttgggtatatatttgaaagaagggaaattagtatattaaagagatatttgtatttttatgtttgttgtagtattgtttataatagttaagatttggaagtaatttaagtgtttattaatagatgaataaataaagaaaatatggtatatatatataacggagtattattcggttataaaaaagaatgagattttgtaatatgtaataatatggatggaattggaggttattatgttaaatgaaataagttaggtagaaaaagataaatattgtatgttattatttatttgtgatagttaaaaattaaaataattgaatttatagaggtaaagtattggatggttattagaggtttggaagggtagtatagggtttgtggggagatggggatggttaatgcgtataaaaaaattgaattaatgagatttatttggtagtagaatagagtgattatagtaaataataattgtatatttaaaaataattaaaagagtataattagattgtttataagataaaagataaatgtttgaggggatggatattttatttattatgatgtgattattacgtattgtatgtttgtattaaagtattttatgtattttataaatatatatatttattatatatttataaaaattaaaaattaaaaatgtaatataaagaaagaaatagaaaagaattatatttgaatagttatgttaaaataataagatagtaggtgtttttttttttttttttagagatagggttttgttttgttatttaggttatagtgtagtggtatgtagaggttaatttattgtagttttaattttttaggtttaagtgatttttttatattagtttttttaatagttgggattataggtgtatattattatgtttaggtaatttttgtattttattgtagagatggggttttgttatgttgtttaggttggttttgaatttttggatttaagtaatttatttattttggttttttaaagtgttgggattataggtgtgaattattgtgtttggttttttaagtttttgttaaaatgtatttgtaatttttatattgattatatttaaaagtattaaatttgtaaagaaaaggttttggaggagtttgttttttataaggttagttagaagttataaggggttaggttggggttaaggtgagggtaggtatatgtaggggtagatgttgggtatggagtaggtgttaggtgttagttgggtatgaatgtgtattcgttttttgatttttgttttttgatttttagaaggaattagtattgtttggagataggaagaagtagagtacggaaggtagattttttggttagagatttcgtagttaggagtatagtgagaatagagtttaagtttatttgtttagagtttaggttttttttttttataattgtagtttttttattttggtttggtttagtagagtgaggaggggttatttatttagttatatttgttggtggttgttgggggtgtatgtttagaagaggaaaagatgcggtttaggtagttatttagtagttttttttgtataatgtttgagttataagttagaagggagaaaagggttatatgattagtgtagtttttggtttttgttggttttagagatttttggttttaggttagttataggtgaagtagggttttaagtttttgtttttttattttttttttataagaggagttttttttttttttgtaagtttttatttgtgattttggattttttagtatttgaggttagtttatagtttttgcgggagaaagatatgtcggtttttttggatgttattttttattttttatgggtagttagtggttttgggggttgagttagatatagagtttgtttatttagggttagttaggggtttttatatttgattttagttttgttatggtaggaaggtttgggagtaggtgaggttaggggtatgtatattaatatatagggtaggggaatgtaggggtttttagttttttatatagggagggtagttagggtttaggtttatgtaatagggattattttttgttttttagtgtttttgtgtttagtatagggttgggtagagagtaggtattagatatatttttgtcgaattataataaaatgttttagttttgtggaaattagattaaaatgtttaaagtgaggtgttttaggggtagagtttttgtatttattttagttgtaagttatattgagtttagtttataattagaagcgataattttatatatttttttaagtgtagattattattggtttggttatttttagttataagttttatttattttttataaggttggagtttttttttttagttttgggtttttttttttttttatttatggttttgatagttttattatttttatttatatatgtggttttttattttatttaagtattatttttgtttagtttttatggtaaattttattggtttttttagtgtatttattttttatattatgttgttgttgtagttgttttagaatttgtattgagtttttggtgttggttttattgatgtgtagcggtgttgtttaatatagtagtcgttatttatatgaggttatttaaatttaaagttttaaaaattaataattcgattttttagttgttttagttatattttaagagtttaatgattatatgtggttaatggttattttgttggatagtataaaggtagaacgtttttattattatataaagttttattagatagcgtaggtttagagtttcgttttgtagtattgttttagttagtattttttattttgtagtttagttttttattttattttaaatagattttttattttcgttataaatttttgtgggtttgtattacgtttgtttttcgggaaggtgattttttcgatttcgggttttcggtgggcgtttatgatcggtgtttttttattattagagtagttgaagatttgattaaatttagttatttatttgatgagtagattttttagatattcggagtgggtttcgggagttagttgttgaggatttaggtgagaggcggattttgttttcgttcggggattttttgttacggttatttcgtttaatttcgtcggggtattcggatttagaattgaatttatttcgtttgggagtttaaggacggcgagggcggcgtatggtttttttaagtcgttttcgtttggttttaagttttataggatttgttagattagttttcgttcggagtttcgtatttagatttttgcgttgtaggtgttttcgtattggattagttcggatcgcgaagggaatagtcggaattcgttaggtttagagttttgtcgttttttatttattcggagtttcggtcgtagcgattcggtttataatattcgtttaattttttggttacggcgttcgtttagggttaaattacgcgtacgtttgcgcgttgagtttttagtcgcgtacgcgtattggttcgcgtttagttttcgttaggggattttttttatggttttttatcgggttgttttaggttttagtttcgtcgaaaggttttattattttcgattttcgtttgttttggggatgtttttagttttgttgcggtagaacgcgatatgttaatcggaatttttaggtcgtttgttttttatttatatttagaggtttcgtttagacggtttttaaaacgtttgaaaggtcgtttttgttagagtttttgttatttgttatttttatttttatttagttttagtggatagtttcgtttattttttttgggatgatatttttggcggttgagatgagcgagtttttttgggttttgtcgtcgggtgtgggttgatttgtttatagttggggtttgataaggtagtagtaaaagggtggaggggaggtagtgttgaagttgggtaagtaattttttttaatttatagggaaaaaatcgaaatttagaaaagtttaatgttatttaggggttggagtttagatttttggtagtttttatttttataatgtttttgggttgattaggttgtagaggggttttattttaattttagggtattttaagtgtttttattaaatttttttaatatttgtttattaagttgtattaggtttttgtaattgatttatgggatttgaggtttggttttttatggtttttgttattaggttttaggttagggtttagtaggttttgagttgacgtgtggagttagagttatttaatttcgtagggatagttttataatttttcggatggggttgtggtgggttatagtgtagtttttagttagaaggatggggtggtttttatttttgttgtttttgatttaatgtttaggggtttttggtaagtgtttttaattttgatttttatttgtttttaggagggggttggttttatttttttattttaggatgagaaaaaagtcggggagttagaggtttagtgggtatggggtagtgattttgtttttttgagtatagttgggaagttttaggaatatatagatattgtttatttaggtttttattagtacgtttgttttagtattgaagtagtgttaggattatatagatgtacgtatatagtaggtagtgattttttttgagtttgatttatttttttaatttagtatatgtttttgtgtaggtgagagtttagatttggagtttgaatgtttagttagggtttttggttgggtaatgtgatggttttgagttttagtatttttatttgagagatgaggtggggtaagttttattatttattgtttttatagagcgtatgtgttagatttgagttcggtgtttgggttattaaatagaggtatcggtgataattattaagtttgggtttgttttttaggggaaattttttttataagtatttgtgtagggggttagattggtttttgaaagtgtatatagggtttattttagaagttttgtagttttgattttttgaatgaataaagtgtggatatgttaatatatattattgatatgtatgtttatttgatttgtatttatttatgtttattttgtagg

SEQ ID NO: 1262 - DNA, 5763 bp, Artificial Sequence
  chemically treated genomic DNA (Homo sapiens)
tttgtagagtaggtatgagtgggtgtaggttaggtgggtatatatgttagtaatgtgtattggtatgtttatattttgtttatttaggggattaaagttataaggtttttgggatggattttgtatgtatttttaagggttagtttagttttttgtatagatatttgtgaaaaaaattttttttgggaagtaggtttagatttggtagttattatcggtgtttttgtttagtggtttaggtatcgggtttagatttaatatatacgttttgtgagagtagtgggtgatgaagtttgttttattttattttttaaatgagaatgttaaggtttagagttattatattatttagttaggggttttggttaggtatttagattttaaatttgggtttttatttgtataaaggtatatgttaggttagaggggtagattaggtttaggaggggttattgtttgttgtgtgcgtgtatttgtgtggttttgatattgttttagtgttagagtagacgtgttaatagaggtttaagtgggtaatgtttatgtgtttttagggttttttagttgtgtttaagagggtaaggttattgttttatgtttattgagtttttggtttttcgattttttttttattttagaataggagaatggggttaatttttttttgaaggtagatggggattagggttgggggtatttattagggatttttaagtattgagttagaagtagtaggagtgggagttattttatttttttggttggaggttgtattgtgatttattatagttttattcgggaagttgtgaaattgtttttacgggattgggtggttttggttttatacgttagtttagggtttgttggattttgatttgagatttggtgataggagttatgaggggttaggttttaggttttataggttagttgtaagggtttagtatagtttagtggataggtgttaggaaggtttggtggggatatttgaggtgttttggggttggggtgaaatttttttgtagtttagttagtttaagggtattgtgaaagtgagagttgttagaggtttgggttttagtttttgggtgatattaaatttttttgaatttcggttttttttttgtaaattggggaaaattatttgtttagttttaatattgttttttttttatttttttgttgttgttttattaggttttagttgtaggtaggttagtttatattcggcggtagagtttagagaggttcgtttattttagtcgttagaagtgttattttagggaaggtgagcgaggttgtttattaggattaaataggggtggaggtaataggtagtagggattttggtaggaacggttttttagacgttttaaggatcgtttgagcggggtttttaagtatgggtaggagataggcggtttagggatttcggttagtatgtcgcgttttgtcgtagtagggttgggagtatttttagagtaggcggaggtcggaggtggtgaggtttttcggcgaagttgaggtttggaataattcggtgggaagttatggagggggttttttagcggaggttgggcgcgggttagtgcgcgtgcgcggttggaggtttagcgcgtaagcgtgcgcgtgatttggttttgaacggacgtcgtagttaagaggttgggcggatgttgtgagtcgggtcgttgcggtcgaggtttcgggtgagtgaggggcggtagggttttgagtttggcgggtttcggttatttttttcgcggttcgggttagtttagtgcgagggtatttgtagcgtagggatttgggtgcgaaatttcgagcggaagttggtttggtaggttttgtggagtttggggttaggcgggggcgatttgggggagttatgcgtcgttttcgtcgtttttgggtttttagacggagtaggtttagttttgagttcggatatttcggcggggttggacgggatagtcgtgatagggagttttcgggcggggataaggttcgttttttatttgggtttttagtaattgattttcggagtttatttcgggtgtttggaaggtttgtttattaaatgaatgattgagtttaattagatttttaattattttggtagtgaaggggtatcgattatggacgtttatcgagggttcgaggtcgggaaaattattttttcgaggagtaggcgtggtgtagatttataagggtttgtggcgggagtagagggtttgtttggggtgagataagagattgaattgtagagtagggagtgttggttaaggtagtgttgtagagcgaaattttagatttgcgttgtttaatagaattttatatgatggtgggaacgttttatttttgtgttgtttaatagagtaattattagttatatgtggttattgaatttttgaaatgtggttaaggtaattgagaaatcgaattgttaatttttaaaattttaaatttaagtaattttatgtggatgacggttgttgtgttggatagtatcgttatatattagtgaggttagtattagggatttagtgtaggttttggagtagttgtagtagtaatatgatgtgagggatagatgtattaggaggattaatggagtttgttatgagggttgggtaagggtggtgtttggatgaggtgggaggttatatgtgtgagtgggaatggtgaaattattaggattatggataaaagaagggaggaatttagggttgaggaaagaggttttagttttgtggggagtaagtgggatttatggttagagatgattagattagtggtggtttgtatttgggggaatgtgtaggattgtcgtttttggttgtgagttggatttagtatggtttataattgagatggatataggggttttgtttttaggatattttattttggatattttggtttgatttttatagagttgagatattttgttatggttcggtaaaaatatatttagtatttgttttttgtttagttttgtgttgggtatagggatattggagaataagaagtggtttttgttatatgggtttagattttggttattttttttgtgtaggaagttgggagtttttgtatttttttgttttatgtgttagtgtgtatgtttttggttttatttgtttttaagtttttttgttatggtaggattgaggttaggtgtgggggtttttggttggttttgagtagataggttttgtgtttggtttagtttttaggattattggttgtttatgagagatgaaggatggtatttaagggggtcggtatgtttttttttcgtaagagttataggttgattttagatgttgagaaatttagggttataggtaagagtttgtagggaaggaagaggttttttttgtgggaagaagatggagggataaaggtttgaagttttgttttatttgtggttggtttaggattagaagtttttggggttagtaggggttaggagttgtattgattatgtggttttttttttttttttgatttgtggtttaggtattgtgtaggagaagttgttgaatgattatttgaatcgtattttttttttttttgaatatgtatttttagtagttattagtaggtatggttgggtgggtggtttttttttattttgttgggttagattagaataaggaggttgtagttgtagggaaagggagtttgggttttggatagataggtttaggttttgtttttattgtgtttttggttgcgagatttttggttagagagtttgtttttcgtattttgtttttttttgtttttaggtagtgttagttttttttgagagttagggagtagaggttagggagcgggtgtatatttatgtttagttagtatttggtatttattttatatttagtatttgtttttgtatgtatttgtttttattttggttttagtttggttttttgtagtttttgattgattttgtaaagaataaatttttttagggttttttttttataagtttaatatttttaagtgtagttagtataaaagttataagtatattttagtagaaatttagagggttaggtatagtggtttatatttgtaattttagtattttgggaggttaaggtgggtagattgtttgagtttaggagtttaagattagtttgagtaatatggtaagattttatttttataataaaatatagaaattatttgggtatggtggtgtgtatttgtagttttagttgttagggaggttgatgtgggaggattatttgagtttaggaggttgaggttgtagtgagttggtttttgtatgttattgtattgtagtttgggtgatagagtaagattttgtttttaaaaaaagaaggaaaagtatttgttattttgttattttaatatgattatttaaatgtgatttttttttgtttttttttttgtgttatatttttaatttttaatttttgtgggtatgtagtaggtatatatatttatagggtatatgagatattttgatataggtatgtaatgcgtaataattatattatggtaaatggggtatttatttttttaagtatttattttttgttttataaataatttagttatatttttttagttatttttaaatgtataattattatttattatagttattttgttttgttattagataggttttattaatttaatttttttgtacgtattagttatttttatttttttataagttttatattatttttttaagtttttggtaattatttagtattttgtttttatgagtttaattgttttaatttttagttgttataaataagtgataatatgtaatgtttgtttttttttgtttggtttattttatttaatataatgatttttagttttatttatgttgttgtatattataggattttatttttttttatggtcgaatagtatttcgttgtgtatatgtattatgttttttttatttatttatttgttgatggatatttagattgtttttaaattttggttattgtgaatagtgttgtaataaatatgggaatgtagatatttttttgatatattgatttttttttttttaggtatatatttagtagtggggttgttggattatatggtagtttaatttttagtttagtttttttttttttgaaaaatttttttttttgagacggagttttgttttgttgtttaggttggagtgtaggggtataattttagtttattgtaagtttcgttttttaggtttatgttatttttttgttttagttttttaagtagttgggattgtaggtgttcgttattatgtttagttaattttttgtatttttagtagagacggggttttattatgttagttaggatggttttgattttttgagttcgtgattcgtttttttcggttttttaaagtgttgggattataggcgtgagttagtgtgtttggttttttttttttttttttttttttttttgagatggagttttgtttttgttgtttagtttggagtgtagtggtatgattttggtttattgtaatttttgttttttaagttttagtaatttttttgttttagtttttcgagtagttgggattataggtataaattattatatttagttaattttggtatttttagtagagatggggtttcgttatgttggttaggttggtttcgaatttttagttttaggtgatttttttatttcgacgttttaaagtgttgagattataggtatgagttatcgtatttgattaatttt

SEQ ID NO: 1263 - DNA, 9373 bp, Artificial Sequence
  chemically treated genomic DNA (Homo sapiens)
ttattttatttttatttttatatttagtttgagtttttgttgtttgttttttttattatttttgggaggggttttttgttgtatgttataaaagattatttaattatttttagagttttcgttgtggttttgtttaatgggttgttgtagtttagtagaagttgagttgagtaagatatagatggttaaaatggggggagtttgagttttggtattggatggagtttttggtgaggtaatttagtttttagttgaaatttagaatttagtttttttttagttgtaggtttttgaggaaattgtttttgtttaggtttttttatgaagggttgtatgttttagtttttttattttagttagtgtatttttttaaatggtttttaagagtgagttgagggtttgagagaaggtttagttgattttttaaggtagaagtgggtttgttataataagagttaatattgttacgtgtattcggttttttttagttattttagtttttggtatggtataggtagatttgtatggggtattatggatatttaggaggttcggtagtgaaagtttagttttatttattttattataggatttagggtataatgtagagagtttttattttgttgtcgggggattttttagttttggttttagggaatataaggtttaggaagtatttattggagaaaattgttttttgaatgtggtttttagattgttagagagaattatttttatgtagtttttgagagttgagttaatattttttgttattaaaattaagttatattgaagaatgagtttgtgtgggtgatatggatttagggtatattggaatagttgtatttattgttttagaaaatggtagtatagtttttgtttttggttttattgtggtttatattggaatgggtatggtagtaggttattagtttagattttaaagttttcggggagtagttataggtttggtgggtgttgtttattttgtatatatgttttgggttttttttatgtttgttttttgtttttgttttttttttgtttttagtaagaatattaaattattgtttttggggtttgggtgatgttaagttagttgtttttgattgttattggtattttggttaatagtgagtttttaagtgttttttttggttgttttgatttttgtaggttttttagtttttgtgtagtttagtatatattttggggagattatagttggataaatgtgtatatttaggattataggtatttaggagtgtggggtgtatttgtttggagattaggggtgggaagatagataaatagggaaggtgttcgtagtggaagagttagtatgtgtaaagggaaggatttggtaagaatttagtataggtcgggtatggtggtttatgtttgtaattttaatattttgggaagttaaggattgtatattattggaagttaggagttttagattagtttggttaatatggtgaaattttgtttttattaaaaatacgaaaattagttgagtatggtggcgtgcgtttgtagttttagttatttaggaggttgaggtaggagaatcgtttgaatttaggaggtagaggttgtagtgagtcgagattgcgttattgtattttagtttgggcgatatagtgagatttcgttttaaaaaaaaaaaaaaaaaaagaatttaatataatttgtttgtagtgaagttggagtggtttatataagggttggggtttttaaattttaggtaatttgtagtgtgatgtggttatattatagttagagagatttttttgttattgttaaggtgattttgggattagagaaagaggttagatttagttttttagaatagtgtttagaggggattgagagtttaaggagggaaaagtggttagtatttttttaaggcgttaggtgttagggtagtcgagtaggtttttagttagttatgttagtttgggggtgtttttgtatttggtatttaagagttttattagttgattttttttatatattttgattgtttttttttatagaggcggtagatggcgagagggggaaggggtgtttttgtgtatttttgttgttgagaattaaggttgttttataggggattttagtttggggatagttattagcgcggttatacggtggtagcggagaattaacggatggttgtcgtaatattatttttaaaaaggggtgggtggggtgatttaagagggtttgtgaagtttttttttaattattagagatttttttgaaagtttggaggtgggatttgggttattagaatttttgtttgtgcgttaggttgagaatgttttattttagttttgttttgtttatttttagatgtgttgattgtggaatgtaggaattacgttacggtttttttcgggtgtttatttattttttggttaattttgttttggaaaaggatgttttttatgttattttagggtatagtattaattttgtattgggtgtggtcgtttttatttttatttttttttttagtttttaggtgtttatggagttttaggttggaaggagggggagttttgtattggggatggaggaagtgaagtatttagagtaaattgtgttggggtgagtgtagtattgggtttgtgagatttaggagaggggattggtaaagtttggattaaaaaggttttttggaggaggtgttatttaggtggtaaaaggagaaaagggaaagagtgtttttggaaggaggaatagtatttataaaggttaggttaggaaggggatgtaggtatagaagtatgaattgaaaggggagtgaggagatatagttttttaagttaggttaaattttgttgggttgagggttttttttttttttagtttttttatttatagttttggggtttatagtttatagtttagatttattttgtggattttttttgttttttagggtttaggtttatttaattgaggggtttgttaggttaaggttgttttttaggggttttagtttagtgttgggggattagttattaaggggtagttgttgagatttaagtgtgggattaggtttttttatttttattttttataaatagaagagagaattttgggaaattatttagtcggaattacgttttttttttttttttttggagatggagtttcgttttgttatttaggttggagtgtagtggtataattttagtttattgtaattttttattttttaaatttaagttatttttttgttttagtttttttagtagttgggattataggtatttattattacgttcggttaatttttgtttttagtggagatagttttattatgttggttagatttgtttgtttattatgttggttttgaatttttgattttaagcgatttattcgtttcggttttttaaagtgttgggattataggcgtgagttattacgttcggttatatattttattttaaaaatatttttagtagtttttttgttttgttgagttttgttatgttgtttaggttggttttgaatttttaattttaagtaatttttttgttttggttttttaaaggagtgttaggattataggtatgagttacggtgtttagtttagaattatatttttattgaagagaataagatttagtaaggtttatagagtatgttggaagtgttttgagagttaaagtttatgatttttttatattaggggggtattgggtagagttaggaaggaagggggagtttttaaggtttatattgtggattttattatatagtttttatatattgaggttgtagaggaggtatgggtttttatttacgtgtttttttgattttgaggtttagttagtaaggttagattttattttaagatttttatggttttgggagagtagggtataatatatttttttttgatattattttgtcgttgatagtttaggagaagtatatggaagaatggtttcggtcgggcgcggtggtttacgtttgtaattttaatagtttgggaggttgaggcgggcggattatttgaggttaggagtttgagattagtttggttaatattgtgaattttgtttttattaaaaatataaaattagtcgggtgtggtggtgcgcgtttgtaattttagttatttaggaggttgagataggaggaggttgaggttggagaatcgtttgaatttgggaggcggagtttgtagtgagtcgagatcgcgttattgtaatttagtttgggttatagagtaagatttttttttaaaaaaaaaaaaggatagtttttttttataaagggtggcgttttataatattttttgtaagtgttttatattttttttttggttttttatataattttggtttttgttttttatatggtgggtttttaggttatttttgggtattagttattgaggttgttgttattaagtgtaaattagttttatcgtaagtaaagagtttagtgttttgttttttttttcgttgcgaattagtcggtagtggggggatgggatgggacggtttagattggtttatttttttttaggttatattatgtatatttatttataggtcgttgagaaaaaggcgttaagacgttaggtgaaggtataggagttaggtttttaagggtcggaagagtcggatgggcggagggtttgggttaggttaagtttttttcgcggtttcgtttttatagttcgatttcgttcgtttagttcggcgttttcgggtcggttgagcgttaagcgttagtgtatagcggcggttggggcggtaggtgaggcggttggggcgttgttgtcgtgcgttcgtaggcgttaggtgtttagattcgagggtcgggaagggatttgggttttataggaatttggggcgggggttcgttattttggggttgtcgggatcgttgtttaaatttggtttagtttagatttcgagtcgggtttttagttaggtttacgtttaggtttaggtttaggtcggtagggattttttagggttttagttcgtttcgatggagtttttttcgtcgttgttttagttttttttgttgttgttgttgttgtttgttaagttcgcggcgggcgaggattggtagtgttcgcgtattttttacgcggtttttcgcgattttgacgtgaagtacgtggtgtttagttttttcgtcggaggtttggtataggttatggtgatttacgagggcgatagaaatgagagtgttgtgtttgtagttatacgtaatcgtttgtatgtgtttgggtttgatttgaagtttgtttagagtttggttacgggttttgttggagattttggttgttagacgtgtgtagtttgtggtttaggattttacggttttttcggtgatatagatataaaggtgttggtgttggatttcgcgttgtttgcgttggttagttgtggttttagtttgtagggtcgttgttttttgtatgatttagagttttaagggatagtcgtgtatttggtagcgttagtttgtttttttttagtttattataatcggttcgatgattgtttcgattgtgtggttagtttattgggtattcgtgtaattgtggttgagtaaggttaggttttttatttttacgtggtatttttattggacgtagtcgtggttgttagttttagtttacgtttagtgtttattaggcgttttaaggttgacgtttcgggattcgtatcgggttttgtggcgttgttagtgttgtttaagtattttgttttttatagtattgaatacgtgtatagtttttatacgggagttttcgtatattttttgattgtatagtcggttagcgtgatagatgattttagtgttttgtatatacgtttggtacggtttagcgttattgagttagagttgggtgattatcgggagttggttttcgattgtagatttgttttaaaacgtaggcgtcggggggttttagaaggcggatagttttattttgtgttgcgggtggtttatttcgttttagtgggtgtttaatttgttattgagttgagtatcgtcgagggttaggaagtattatttggggtttttgtgattggtaaggatggtggttttggcgtgggttttaattttgtcgtttgtgttttttttattgatttgttggatatattaattgatgagggtgtggagcgttgttgtgaatttttagtttatttaggttttcggcgaggtttcgattttttttagtcgtttagtttttgttttaattcggtaagttgaaagaaggggtttttatttgtgagttgtatgtatatggttgaatataggttgttttttttttattattgaggggatttgggggcgcggtgggggggtaggcggaaagaagtatttttttttatttagtttttaagtgttggggtggtgtgagaaattagttagataaaggttatattggaggtttagtttttaggttggtttttgtggttgttttattttgtttttttttttatttgtttattatggtttttggttttttaggtagtttttttggttatgtgaggatagggttatataatcgtgtttttgttagtatagtttttgaatgttgggtagaatgatgggtatttttttttatttgtttattatttatatttttagggatatacgtagaaaaatagtatttttttttttttttttttattttcgttattattattattattacgtataaatatatagggagatgtttatagatttatagatttatagttgtttgttaatagttttatttttttttgttttgttttgttttttaaagggggtgggacgggagttgttagagaattttttttttttttatattttttttttttatttatttttatttttttgttagttattacgttttagggagttttttgggttttggaagttgggagtttgttagggagtttgtatgttttgggttttattaacgtttttgttatgattgggggtgattgggggagtatttagaatttatggaatggtagtttggttttagaaggttttgggagttttattttagttttatgtaagtaattataaatatttggggataagtaaaggtttaggaagggttggttggaattggtttattttagatttttttttttaattgtatttggagttttattttaggtaggaagttttaaagtttgtgttgaattgggggttttttttatagattttatttaggttttttttagttatcgtgtaggtaatagtagtaagattggattaaggaatgggatttatagttattgtttttagattttttagtaattattttgtggttttgggtttgttgtgatattttcgaaagattttttttcgtttttattgatgtttcggagatgggagaatttatatttaatgtgaggttgggggtttttagtttttttttttttgttgagtatatttgggttgagaggttttagggttggggattttttgtttgggtttgggtaggtttgtttggtttttttttttttttaatggggagttagaatttttttttagtttgtttagtggttagtgggttagaagatatttagtacggttgggtagtgttaggttttaggaagattaattttggtttttgtttataggttggttaggtttttaggaggtgtgtgaattatttcgtttagtgtttgtttagtaattttgggtatgtagttattagggtagtatttatatagtggttggttttaggaggtttgagggatttagagttggtgtttgttttttatgggatattggatatttacgtgtttttaggagttgggggtttttatttaagtttgggaatttagagttaaggttttggggttagggataagtaggttagggtgtgggtttgattaaggtagggttttatttttttttagagttttatttgtttttgagttatgttagaaatatttggtagtttttcggttcgggttaagttaagtcgattttttgttttaagtgaggataaaattttagtttttatttattttaagttgtaggtataaggtgtatggggtttcgaggtttagttttatatttatttttgtttttagggttattaattagtgttgaggttttaggattgggttaagtttttgtggtttgatggagtttttagaggtttttgtttcgaggagtgtttttcgggttggtgagagagagttttaagtatttagggttggttattgagtttcgtttgtatttcgtatttagttttaatatcgcgagtttatattttggtgtattggttttttagagtttttatagtttttttttggagcgtgattgtagtttttaaaaatatttttttgttaaaagtaggggagaggttagtattttttagtttttagaatttagttttggtatttaggttgtaggggtttggtttattttttttgtattttgaaggggggtataggaagtagttaggagtataggtagatttttggagtttagggagaaggattatgtttttaattttgtgttggttaattaattttagtatttagttttttatgtaagtggggaaatcgaagtttagaggagatagggtttgttgaagtgtatatagagagttagagaagagttagtagggggtaggagaagatttttgcggagttgagatttttaattgggttttttttttgagggtttatgatgttttggattagagattaaattttttgagtttgtttttttatttgtgagatgtacggggtgggttaggtatcgtggtttatgtttgtaattttagtattttgggagattaaggcggattaattataaggttaggagttcgagattagtttggttaatatcgtgaaatttttatttttattaaaaatataaaaaattagttaggggtggtggcgagtatttgtaattttagttattcgggaggttgaggtaggagaattttttgaattcgggaggtgttgtagtgagttgagattatattattgttttttagttttagtaatagtgtgagatttcgttttaaaaaaaaaaaaaaaaaaaaaaaaaaaaaaagatgttcggggtggttgtgaggatggaatgggggtaatttattattaggatgggtatggtagggtggggtagggagaatgaggagtggattttttagtttgggttttttttttgtttttgttatattgagagttttgtgggggtaatgtgggatggtaatcggtaggtttagggttttttttagttaggttaggtgaggggtgagagtgttgggttgttgtggttattgataaaggttttagagggtcggggtataaggttgaattttgatttttttttttttttgattttttttagt

SEQ ID NO: 1264 - DNA, 9373 bp, Artificial Sequence
  chemically treated genomic DNA (Homo sapiens)
gttgggaaaggttagggaagggaaggagttagggtttagttttgtgtttcgattttttggggtttttgttagtggttatagtagtttaatatttttattttttatttggtttgattggagaaggttttgggtttgtcggttattattttatattgtttttatagggtttttagtgtagtaagggtagggagaaggtttaggttggaaggtttattttttattttttttgttttattttgttatgtttattttgatggtgagttatttttattttatttttataattatttcggatatttttttttttttttttttttttttttttttttgagacggagttttatattgttgttggggttggagggtaatggtgtgattttagtttattgtaatatttttcgggtttaagagatttttttgttttagtttttcgagtagttgggattataggtgttcgttattatttttggttaattttttgtatttttagtagagatgggggttttacgatgttggttaggttggtttcgaatttttgattttgtgattagttcgttttggttttttagagtgttgggattataggtatgagttacggtgtttggtttatttcgtatattttatagatgaggaaataggtttaagaggtttggtttttggtttaaggtattatagatttttaagaggagagtttagttggaagttttagtttcgtaagagtttttttttgttttttgttggtttttttttgattttttgtgtgtattttagtaaattttgttttttttgggtttcggtttttttatttgtataaggggttgaatgttggagttaattggttagtataaggttggggatatggtttttttttttagattttaaaggtttgtttgtatttttggttgttttttatatttttttttagggtataaaagggataaattaaatttttatagtttgggtgttagaattaagttttggaagttagggggtattaattttttttttgtttttagtaagggggtgtttttgggggttgtaattacgttttaggggaggattgtggaagttttgggaaattagtatattagggtatgaattcgcggtgttggagttgagtgcgaggtgtagacggggtttagtagttagttttaggtgtttaggatttttttttattagttcggagggtatttttcgaagtaggagtttttgaaggttttattagattatagaggtttaatttagttttgagattttagtattgattagtagttttggaggtaaaagtagatgtggagttgagtttcgaaattttatatattttgtgtttatagtttggggtgggtggggattgggattttgtttttatttgaggtaggaaatcggtttggtttggttcgagtcggaaggttgttaggtgtttttagtatgatttagggataggtggggttttgaaggggaatagagttttattttagttaggtttatattttagtttgtttgtttttagttttaggattttagttttaggtttttaggtttaggtaggggtttttagtttttgaaaatacgtaagtgtttaatgttttatggaggataggtattagttttgagttttttaggttttttgaggttaattattatgtgggtgttgttttagtggttgtatgtttagagttgttgggtaaatattggacggggtgatttatatattttttgggggtttggttagtttgtgagtagggattaagattagtttttttggagtttggtattgtttagtcgtgttgggtgttttttgatttattgattattaggtaagttggggagaggttttgattttttattgggaaggagaaggggttaggtaggtttgtttaggtttagataaggagtttttaattttagggttttttaatttagatgtatttagtagagggagggaggttaaagatttttaattttatattgggtgtaagtttttttattttcgaggtattaataggagcggaaaggagtttttcgagaatgttatagtaggtttagggttataggatgattgttagagaatttaagaatagtagttgtgggttttattttttggtttaattttattgttgttgtttatacgatggttggagagaatttagatagagtttgtggaaggagtttttagtttagtataggttttgagattttttgtttggggtagggttttaaatatagttaaaaaaaaaagtttgggatggattaattttaattagttttttttaggtttttatttatttttagatgtttatagttgtttgtataagattagagtgaggtttttagaattttttagaattaagttgttattttatgagttttgggtatttttttaattatttttaattatggtaaaaacgttagtgaagtttaggatatgtaggttttttaataagtttttaatttttaaggtttaggaggttttttggaacgtggtggttggtagaaggatgggggtgggtggggggagggggtgtggaggaaggggagattttttgataattttcgttttattttttttggaaagtagagtaaaataagggaaagtgaaattgttggtaagtagttgtgagtttgtgaatttgtgagtatttttttgtgtatttgtgcgtggtggtggtggtggtggcgggggtgggggaggggaggggggagtgttatttttttgcgtgtgtttttgaggatatgggtggtggataagtaggagggaatgtttattattttatttagtatttaggagttatgttaatagagatacggttatgtaattttatttttatatagttagggaaattatttaaaaaattagaggttatgatgggtaggtaggggaaagagtaaaatgaggtagttataagggttagtttgggagttaagtttttagtgtagtttttgtttggttggttttttatattattttagtatttaggaattgggtgagagagaatgttttttttcgtttgtttttttatcgcgtttttagatttttttagtgatggaagggaagtagtttgtgtttagttatgtgtatgtagtttataagtaagggtttttttttttagtttatcgggttggggtaaaaattgggcgattggaagaagtcgaggtttcgtcggaggtttggatggattggggatttataatagcgttttatatttttattaattagtgtgtttagtaggttaatggggaaggtatagacgatagagttggggtttacgttaggattattatttttgttagttataaagattttaaatagtattttttggttttcggcgatgtttagtttagtggtaagttgggtatttattggagcggagtgggttattcgtagtatagggtagggttgttcgttttttggggtttttcggcgtttgcgttttggagtaaatttgtagtcgaggattagttttcgatagttatttaattttggtttagtggcgttaagtcgtgttaggcgtgtgtgtagggtattaggattatttgttacgttggtcggttgtatagttaggaagtatacgaaggttttcgtgtggaagttgtgtacgtatttaatattgtaggagataagatgtttgggtagtattgataacgttataaagttcggtgcgaatttcgaggcgttagttttgagacgtttgatagatattgagcgtgggttgaagttggtagttacggttgcgtttagtgaggatgttacgtagaaataggaggtttggttttgtttaattatagttatacgggtgtttaatgggttggttatatagtcggggtagttatcgggtcggttatggtgggttgagaagaggtaggttggcgttgttagatgtacggttgttttttggggttttaggttatgtaggaagtagcggttttgtaggttggagttataattgattagcgtaggtagcgcgggatttagtattagtatttttgtgtttgtgttatcgggagggtcgtggggttttgggttataggttgtatacgtttggtagttagggtttttagtagggttcgtggttaggttttggatagattttaggttaggtttaagtatatgtaggcgattgcgtatggttataaatatagtatttttatttttgtcgttttcgtaggttattatggtttgtattaggttttcggcggagaagttgggtattacgtattttacgttaaagtcgcgagaggtcgcgtagggggtgcgcgggtattgttagttttcgttcgtcgcgggtttggtaggtaatagtagtagtaataggaaggattgaggtagcggcgggaggagttttatcgaggcgagttgggattttagaggatttttatcggtttgggtttggatttgggcgtgggtttggttgggggttcgattcgaggtttggattgggttaaatttaagtagcggtttcgatagttttaagatagcggattttcgttttaggtttttgtgaaatttaaattttttttcggttttcgggtttgagtatttgacgtttgcggacgtacgatagtaacgttttagtcgttttatttgtcgttttagtcgtcgttgtatattggcgtttagcgtttagtcgattcgagggcgtcgggttgggcgggcggagtcgggttgtgggggcggggtcgcgaggaaggtttggtttagtttaggtttttcgtttattcgattttttcggtttttggaggtttggtttttgtatttttatttggcgttttggcgttttttttttagcggtttgtgggtggatgtgtatggtgtggtttggagagaggtgagttagtttgagtcgttttattttatttttttattatcgattggttcgtagcgagaaggggggtaggatattgggttttttgtttgcggtggaattagtttgtatttagtagtaataattttagtggttggtgtttagaggtggtttgggggtttattatgtggagaatagagattaggattgtgtggaagattagaggggagatgtggggtatttataagagatgttatggggcgttattttttgtgggaaaggattgtttttttttttttttgagaaggagttttgttttgtggtttaagttggattgtagtggcgcgatttcggtttattgtaaatttcgttttttaggtttaagcgattttttagttttaatttttttttgttttaattttttgaatagttgggattataggcgcgtattattatattcggttaattttgtatttttagtagagataggatttatagtgttggttaggttggttttaaatttttgattttaggtgattcgttcgttttagttttttaaattgttgggattataggcgtaagttatcgcgttcggtcgggattatttttttatgtgttttttttgagttattagcgataagatggtgttagaggaaggtgtgttatgttttgtttttttagggttataagggttttaggatgggatttggttttgttgattggattttagagttagagaggtacgtaagtggaggtttatattttttttgtagttttagtatatggaagttgtataatggggtttatagtatgggttttggggattttttttttttttttggttttatttagtgtttttttgatatggaggaattatgggttttggtttttaggatatttttaatatgttttgtaggttttgttggattttattttttttaatgagaatgtagttttgggttgggtatcgtggtttatgtttgtaattttagtatttttttgaggggttaaggtaggaggattgtttgaggttaggagtttaagattagtttgggtaatataataaaatttaataaaataaaaaaattgttaaaaatgtttttaaaataaaatatgtgatcgggcgtggtggtttacgtttgtaattttagtattttgggaggtcgaggcgggtggatcgtttgaggttaggagtttaagattaatatggtgaatagatagatttggttaatatggtgaaattatttttattaaaaataaaaattagtcgggcgtggtggtgggtgtttgtaattttagttattagggaggttgaggtaggagaatagtttgaatttagggggtgggaggttgtagtgagttgagattgtgttattgtattttagtttgggtgatagagcgagattttatttttaaaaaaagaaaaagaaaacgtagtttcgattaggtgattttttagagtttttttttttgtttatgaggagtgggggtgggggagtttagttttatatttggattttagtagttgttttttggtaattggttttttaatattagattgaggtttttgggggataattttagtttgatagattttttagttagataggtttggattttagaagatagggaaggtttatagggtgggtttgggttgtgaattatgggttttaaggttgtagataaggaggttgggggagagaggagtttttagtttaataggatttagtttggtttggggagttatatttttttattttttttttagtttatatttttgtgtttgtattttttttttaatttgatttttgtaagtgttgtttttttttttaggagtatttttttttttttttttttttgttatttaaatggtattttttttaggaagtttttttgatttagattttgttagtttttttttttgggttttatagatttagtgttatatttattttagtatagtttattttggatattttattttttttatttttagtgtaggattttttttttttttagtttggagttttatgagtatttgaagattgaaagaggaaatggaagtgggggcggttatatttagtgtagggttgatattgtgttttgaggtgatataaaagatatttttttttaaagtagaattggttaggaaatgaataaatattcggagaaaatcgtggcgtggtttttgtattttatagttaatatatttaaagataggtaaggtaaaattaaaatgaaatatttttagtttggcgtatagataggggttttggtgatttaaattttatttttagatttttagagggatttttggtggttgggagaagattttataagtttttttagattattttatttatttttttttgggggtggtgttgcggtaattattcgttagtttttcgttgttatcgtgtggtcgcgttaatggttgtttttaggttgaggttttttgtaaggtagttttggtttttaatagtaggggtatataggagtattttttttttttttcgttatttgtcgtttttataggagggggtagttaaggtgtgtgggggaggttagttaatgggatttttaagtgttaagtataagggtatttttaagttaatatagttggttaagaatttgttcgattgttttagtatttgacgttttgaaggaatattagttatttttttttttttgagtttttagttttttttgaatattgttttagagaattaggtttaatttttttttttaattttaagattattttagtagtagtaagggagtttttttaattgtaatatgattatattatattgtaggttatttggagtttgagaattttagtttttgtgtggattattttagttttattgtaaataagttatattaggttttttttttttttttttttttgagacggagttttattgtgtcgtttaggttagagtgtagtggcgtagtttcggtttattataatttttgttttttgggtttaagcgatttttttgttttagttttttgagtagttgggattataggcgtacgttattatatttagttaattttcgtatttttagtagagatagggttttattatgttggttaggttggtttggaatttttgatttttagtgatatataatttttggttttttaaagtgttgggattataggtatgagttattatgttcggtttgtattaggtttttattaggtttttttttttgtatatgttggtttttttattacgaatattttttttatttgtttgtttttttatttttgatttttaagtaggtatattttatatttttaggtgtttatagttttaggtatatatatttatttaattatgatttttttagaatatatgttgaattatatagaagttgagaaatttataagagttagggtaattaaaagaggtatttaggggtttattgttgattagaatgttagtaataattagggatagttggtttggtattatttaggttttagaggtagtggtttggtgtttttattaggagtaggggaggaataaaagtagaaaataggtataaaagagatttagggtatgtgtgtagggtgaatagtatttattaagtttatggttgtttttcggaggttttggaatttgggttggtagtttgttgttatgtttattttaatgtgagttatagtggggttaagggtaggggttgtgttgttattttttgggataataaatataattgttttagtgtattttgggtttatgttatttatataggtttattttttaatatggtttgattttagtagtagaaaatattggtttaatttttagaaattgtatgagggtgattttttttgatagtttgaagattatatttagaggatagttttttttaataagtattttttaggttttgtgttttttggggttagaattagaagatttttcggtagtaaagtggaagttttttgtattgtgttttgggttttgtggtagagtaaatggggttgggtttttattgtcgagttttttggatgtttatggtgttttatgtaggtttgtttatgttatgttagggattagggtgattaaggagggtcgagtgtacgtagtagtattagtttttattatggtaggtttatttttgttttagagggttaattgggtttttttttagatttttagtttatttttgaggattatttggaggaatgtattggttgaggtaggagaattgaggtatatagttttttatgggaaggtttgagtagggatagtttttttagaggtttgtagttaaagggagattggattttgaattttagttgaagattgggttgttttattaggggttttatttagtattagggtttagattttttttattttgattatttgtattttatttaatttagtttttgttgaattatagtaatttattaaatagagttatagcgagggttttgaaggtggttgagtagttttttgtggtatgtagtagggggttttttttaggagtgataagagaggtagatagtagaagtttagattgaatatgggggtgggggtagggtag

SEQ ID NO: 1265 - DNA, 9725 bp, Artificial Sequence
  chemically treated genomic DNA (Homo sapiens)
ttttttgtagataaattagtttcggttttgttcgtggtaatttttttttaattaggtaggggttgagaagagattagagagttgtatttagggattgggagataggagatattttttgttgtttgtttaaatttaaagttttttttttttttaatttttattttttattagatagatttgttaatttgttttttttttaaaaggtaggtagttatttttattttatagaagaaaaaaaaatgaggttttagaaagttgtatgttttaaattatttaatgagttttatgtttcgaattatttaatattagattattcgattttaaatgtgtacgatgtttaggaagatttattggaaagggaggtaaaaagtaatatcgataatgatttaagaaatgagaataatattttatatttattaaatgttaggtatttttttatgttatagttgttgaatttgtagtgtagaaaagtgaagtgatttatttagttttataggaaatatatggtttaattttatttgaagttagtttagttttagattttgaagttagtttagttttaggagattcgaagtagagttgttttttgggttagtgtttgtttttagtatatttagcgttattcggtattttgtaaggtttgttatttagtttttattagtaattttgtggatgggtattagtatgtttattttttgaaaggggaaattaagatttagtaaggtgacggcggaaaacggtgagaagtagggtttggatttgaatatagaattatagaaggtcgatttatagtttttttttttatatttgttgtttttagaattagatgtttttatgaattcgttattttttttttaggttgtgggatttgtaaggagatgtagttttttttatttttatttttttcgtttttatttttgtgatggtttttttttagggatatcgtgttgaattaggttttattatagttgaagttaggttaattttttttttttttgcgtttggacgattttatttgtggaatggggagaaagtttaggttttagggggtttttagtaatttgtatcgtgtttttggtaaaagttttttttttttagtttcggtttaaattcgggttcggttttgatttcggattttagggggcgggaataggagaataggaaagaataagtttgggtttgtagagtttcgtaagtaagacgtttgtatttttaaaatttttagttgtgattttgaatatttatttattcgattttttgggttgtgtaattcggaaagtgatttttttagatattagaggatcgaattttttttatttttattttgtaataagttagtaagaaaaatgagtttagagacgagtagttttttgttcgaagttatatagttaatgttttggggggtgggtgagcggtgttgtggaatttttggcggatgttggcgttcgcgggtttgtttgtttttgatattcgggttcggtagaataggtcgttaacgagtttttattaggaggaattgttatttttttgggagcgagtttgttttattagggcgaattgttattttttttggagcgaggttgtttcggtttcgcgtaggttgagtgttggggtcgagagtaattaacgcggtttcggcgcgggtagtcgtttttgtttcgggtagcgggggcggggtagggcgggggcggggcgttcggcgcggttggagtcggttattcggcgtagttttttttttcggagttcgttttttattttttcgcgtttggcgtttgttcgaagtttaggttcgtttatagtttttttcgttgtttttttttcgtttttttttagtcgttggggttataaattagttttcggttttcggggttataaacgttgcgttttgcgcgtagtgttttatagtttgtaaggagtgttttttttttgggattcgtagcgcgcgtacgcggttgttttaagaaggggtttggcgggtgtaacgcgtttcggggagcgcgggaaggtgtagggttgaggatttacgtttagaggttttagtcgcgcgggagggatttttgtgttttttatttttatttgcgcgattttgggtagagtattagcgttttttagttttaggtatttatttgtgaaatgggaaaaataatttgttagtagcggtgtgttggaagaaattaataagattttggataggtttaggtattaaagtattttttagagttgatgttttttggtggttgagtttttattggaatttcgtttttttgttagtaaatattgtagttacgtatatatttttgggaattaatatttattgagtgttttttacgtgataaagttagtttttcgttagattattgtttttaaatttggatattttttagatcgagttaaatttttagtttcggaaattttataaagaatttatcgtaagttttgggatgtattttatttttcgatttttggtagggagaaagtattcgatatattgtgattgtttttgatatataataatgttttaatttggattttttatgttttttagttattttaggtagtttattgaatttaattattattagagttattttaggtaaggattattattttttattttggagataaaaaaaaaaacgttggttggaggaagtaatttagagtgtttaaggttatttcgttaggaaaaggtgaataaaacgttttgaaaacgtagttaaagttggataaaatgtagatttggggttttttataaagggttagcgttgtgttgcggttttagtttttttttagtagaagtgagtttttttttcgatttgtttttattttagtagagagttggggagggaattggtaaagattttaggagtaggttggttttttttttagtattttttttatttatggttagagtttggtattttgattttgaatatcggtaatttttttatttttgtttttttatttttggttttgtaatttatttgtttttgtttggattttagtattttagagtagtaaaggggatttggtttttttttttttagagaagtttattaaaataaaggagttttagtggtattgatttttgtttcgaattttttaggaatgagtttgtgtgttttatagttgatagatattaataaggagtttttaggaataattataaaatattggttgcgtttagtttaattgaaagttgaatttttttgtatattttggtagttgagggttaaacgaattttagatttgtttttaaaatatatagtttgtattttgttttgtatatttagaaggtatagaagttaatttggatttatttgtattgtatttgagatgtatattaaattaattattattaggtatgatttaaggggaaaacgtatatatttttaggtagtttttatagtttttttttttttaatttttttgagtttttagttggttaagaagaaatgtgtatattttttatagtgagagagaaatttagaagttttagaagattgtgtttaggatttatttatttttttatttttttaggattatttttaattaaattgaattaattggtttgtgtagattgtttttattttttaagatttaggtaatatttttttttagtttttttcggttagtatagttttattttagggaaaggtttggggtgaagtaaatagtgttttagagaggtatattgggaagggtatataagggtttgtaggtttaggggttaagtttttaatatttttgaattgggaggtagtttttaagttttggttatttaaataattaaaaataatgttttttttttttaatgttttagggaatgtttagtaagtatttgttgtaggcgaggttttgaattgggtgattttttatttatttcgttagtcgtaggataatcgtttagatataggaaaagatagtcgtagtttgaaaaaagttttttgaagttaattttttaggttaggtattttgaggattagcggagagattcgaggtttttaattttcgaagttcgttttttttttttttaggttgagatagttattattgaggttttggaaaggaattatcgagggtataatttggggtggggtggagatatttatgtttttataaaaaattaggtgttatgaataaaaatgtgttttttaaaatgatatgtaggtttggggtgtgtaaatttggaagtcggtatttttgagatttgtaaacgagagggaggtattagatattggcgattttttttttttttttttatttttattatttttcgaggtaaatattggtatttaaatacgtacgataaatataggtttaaataaatttatgaatgtatatttgtattgttttgagaaaaaggtcggattcggatcgcgtttagaaaggaggtttaggagataagtatagagattttaattttttaaaagtgcgttggatttgttttttagtgagagagatggggataattgatttaaattttttatttcgaattatttgggagagaggtatttttgattatttttcgggtttttttcggttttttttttttaggggaaagagttgtaataataatagtgggcgtttttgagcgttggttagtggcgagttatttttttaagtgtatatattttttttatagggatattggtttgtgagttttagtatcgattttttggaattgtaaagtaagttaattttgacgtatagtaggggtttcgtaaatgtttttgtaatgttgtttgcgaattttgaatttattttggcggtaaagggagagtgggatgggcgtagggttttttttaaagaagggttaaaagagagaagaaatgggattcggcgaattttcgttttaaataatcgtttttaattaggtttcgggttttttagtttcggcgtgattataattttttagggatcgtttaataataattttgttgattgtttttgtaattaatttttaatttattttaaataggaaaaaaaaaaaaaaaaaaaaaagggggggggggtagttttttcgggaaaagttaattaggggcgagcgtttttggcgttagcgttaggttcggcgcggattggcggcgcgcgttttttattttttttcggaggaaaggtttagtttttagcgcgtttttttcgttttcgtagtaaaaaagtttgagtcgtcgttgtcgggttgttagcggagtcgcgcgtcgggagttacgtagggtagagaagttatggttttttcgtttaaaggtaatgatttgttttcgttcgacgaggagggtttagtagtggtggtcggattaggttcggggtttgggggcgtcgagggggtcgcggaggagcgtcgcgttaaggtttttagtttgttttttagcgtggaggcgtttatgttcgataagaagtcgtttaaggaggcgttttcgttgtcggtcgaaagcgtttcggtcggggttattttgcggttattgttgttgtcggggtacggcgttcgggaagcgtatagtttcgggtcgttggtgaagtttttcgagatcgtttcggttaagtcggaaaatttagaagatggagcggcgtggatgtaggaattcggtcgatattcgtcgtcgttaagtgagtgcgcgtcggggtaggagtaggaggtagcgcggggtattggagggagcggggggcgggtgttttagggttgagggtatcgagatttttttgcgtgcgttatattttcgggaaagtaagtttagggtttttggatttttgggtgttcggggcgttcggcgcgtttagtgcgtcgttcgtatttaagatattttttgggtaataatcgcgttgtgtgtgtttgagattttttcgatatatagattgtttttttaagagcgaattttagttgggtttacggggtcgttcggtggttcgtttttatagttttcggttttgcgttttggttatttggtttgtttttgttttattgtttttcggagtttttgtttggggagtgaaggagttggatttatgtttagtgagtatttggatgtattaggaacgagataggtttaaaatttaattttgagagttgtgtttttattttaaagatgagttaattgggtttagttagatattgaggagaaattattttttttcgtgagtttcgcgggtgtcgaagtcggattttacgaagggatggtggtattagggatggtggtattagagtttggtgcggggaggaaatgtttttttgtggttttcgtagttagtattttttcggtaaggttttgagtttcgtcgggagcgggttggggttagaagcgtacgggttttttttggtttatagtaataattaatcgtattttagtagggtttgagagtttgtagagtgatgtttattagtttattagatcgagatttttattagaatttttaagtgtagatattggatttgtgattattttattttttagacgtggacgttgaggtttttaaagaagacggtttttgtttgttttaggttattaataattattgattggttaggggtatttgttgtttacgttttgtttttttgtttgatatgttttgattatttttgcgttttttttttagagagattaggtagagattcgtatttgtattttatttgagaattgaggttgtagagaatttttcgttttagtatttatttttggtttttgagtttttttataatttggagacgttattttttatagttttttttatttttattttttggtttttatggtttttttattttttaattttttattacgttattttttatttgtaggaaaggtgagggtgggggttgtggagggattttttttaaagttgagagagatttttttattatttatattatttagtttttaagattagacgtattgtattttgttaataaaataaggttatatatttaggcgttagtggttgttttttttggtagtttttttttattttgttagaaattttgaaagatttaaagggcgaggagattaagggatttaaagaatttaaatttaagtttggatagtgttttatagtattttttatcgtattattttattttttttgtagggtagtagtcggttttttaatagatgaggatattttagtaaagtttagagaggaatcggtagtttgggtttgattaaaaaaaaaaaaaaaaaaaagttggggattatttaatgattatttattaggtggtagatagatagggttttgggtatttttaaaattttagtattgtggattatattgagggattagtgttatttatttattttatcgatagtgaggtagaggtttagaaaattaaaagatttaatttgtttaataaatattgagtatatagtttacgtttatgtttagttaatgatataggttttaaatggagtagtgtttagaggttaggaattttgttattttttaggtttgtgggtttggaaaggtaatgattattatttttttaaatatttttgttttgtgtttaagtttttttgttttgggtaaggtaatttcgggtttaggttgtgatttttttatgaaaagaattagaaattttgagaatcgagtttataatttgtatattttgtatatgtatttcggaatttaaagtaaaaaaaaataaaaaaataaaaaaaaaatattatgaagaattgttggtgttttgggtttggaggtggtagcgggaattttgtggttagagtagtgggttttgagaatgttaggcgacggagtttggggcgagagggagttattcgttcgggtttgattttgttatttggaggaagtaggataaacgttgttttgttttatataatcgtattttttttttggttggtttaaaattaggtgggggtggagggatggggagtgttgtattgggaggaagttttatagttttatggttttgatatatatgtgcgatttcggttatttggattttataatttaaatgtaattcgaaggattagttggaattattttgtttaggcgtatagtgttttaaaattttacgtagagttaggagtaagagtatatatacgttaggaatttggtatttgagttgagatatttgagtttttttgagggttcggtttagtttagaaagggcgagaattttgtaggttttttgagagtttttgatagtgttgttaatttgtaaattaagaagttggtttttcggttgtttagtaatttagggattagtaaatgtaaaagtatagatttttatggtagttttttattttttttttttttagatttttgttttttggttggttataaagttttttatttttttttgatttagtaaagtgatgggtaataatgcgatattggaataaatttattttttgttggaaatggaagttgggttgggatttgtgttgtgttatttttaagtatgaagtgtaaatttttttttgggttattaaagtaattaaataagaaatgtaatatttttttatgaatatattagagttaatattgtggttatatttggaaaattagtatagttcgtaaaagttaaatgtagaaaattaattgttaagtattttattattatagttttattttttttcgtttatttatttttgaggaagataagtttaaagttagttgatgttatggaattataaggatgttttagttcgtgatttgttgtaattgaatttattttaaatgtggagtttggatgttgttggtatatttttattttgtttgtttttttttttgataaataaattatttatatatttgttcgaagttatagaatgggtagaggggatgattaagatgttattacgtgtttttaatttggaggtagtatgattttttttgatatttatatttatgggttagttaattttttttttcgttttagtaaagtttatattatagaagcgtttagttaagaattttattttatatttagatttgtaaaatgatgtttagattttataatttgtggattggatgtaatgatagtttgtgattgtttattgcgtgggattgtttttaaatttaaagatgttattaatttattatagattttatttgtacgattattttttataaatatgttgacgtaatttattttttttggtttagagaggagattaagggaaatagttaattcggttgttaaaattttttttatttttttttttatatgtgattgtttttatgtttaagggaggttgggttaattatgaatttggttttttatttttaaagagaagataaattatgtttagaagagatagcggtttattttttatcgattatttgatttttttgttttatattaaatgttttatttttgttatttttaatgttgtttgttttttatatagaaggtttagttatattattatatttttaaaattttttttaaaaaatttatttttaaaaaacgaagtaatttatttatttatatatggtttttttttttttaagaaatatatatagttttgataaaggtattttttttaaagatgaaataaagtatgtttttttatatatagatatgtgtgtgtgtgtgtgtgtgtgtgtgtgtatatgtatgtatatatagatttttttaaagttaagtgtttttagttgagaggggaggttcgaaaggaaaaaatttagagagatgacgggggagatgggttttttttagtattattttaatgtaatttttttttgttaattcgtttttttttttgttttttagg

SEQ ID NO: 1266 - DNA, 9725 bp, Artificial Sequence
  chemically treated genomic DNA (Homo sapiens)
tttagagaatagagagaggagcggattagtaaaagaaagttatattaaaataatattaaaaaaaatttatttttttcgttatttttttaggtttttttttttcgggtttttttttttaattgaaagtatttagttttaaaaaaatttatatatatatatatatatatatatatatatatatatatatatatatatttatgtatggaaagatatattttgttttatttttgaaaaaggtatttttgttaaaattatgtgtgttttttggggggagggggattatatataaatgggtaagttgtttcgttttttaaaaatgagttttttaagaaaagttttggaaatgtaatggtgtaattgaattttttatatggaaaataaatagtattagagataatagaaatagaatatttaatgtaagataagggaattaagtggtcggtgagaaatgaatcgttattttttttgagtataatttattttttttttaaaaatgggagattaggtttatgattagtttagttttttttggatatggagataattatatatgggaaggaaaatgaaaaaggttttagtaatcgggttagttgttttttttggttttttttttgaattagaaaaagtggattgcgttagtatatttatgaaggataatcgtgtagataaggtttgtggtaaattaatagtatttttgaatttgggggtagttttacgtaataaatagttataagttgttattgtatttagtttatagattataaaatttgaatattattttatagatttggatgtgggataaggtttttggttgggcgtttttgtaatataaattttattaagacgaagggaaaaattagttagtttataaatgtaaatgttaggggaaattatgttgtttttaaattgagagtacgtgatgatattttagttattttttttatttattttatggtttcgggtaaatgtgtaaatgatttgtttgttagggggaaaaataagtaaaataaaggtatgttaatagtatttagattttatatttaaaatggatttaattatagtaaattacggattgggatatttttgtgattttatagtattaattaattttgggtttgttttttttaagggtgggtgggcggaggaggatagagttgtggtgatagaatatttaataattaattttttgtatttggtttttacgagttatgttaattttttaaatgtggttatagtattaattttaatgtatttatgggagaatgttgtattttttgtttagttattttggtggtttaagaaagagtttatattttatatttgagggtgatatagtataagttttaatttagtttttatttttaataagagatggatttgttttagtgtcgtattattatttattattttattgaattaaaaagagataagaggttttgtaattaattaaagaatagaaatttgggaaagggaaggataagaaattattataaaagtttatatttttgtatttgttaatttttaagttattagatagtcggggagttagttttttaatttataaattaataatattgttagagatttttaagagatttgtaaaattttcgttttttttaaattaggtcgggtttttaggaggatttaggtgttttagtttagatattaagtttttagcgtgtatatatttttgtttttggttttacgtggggttttgaagtattgtgcgtttgggtagggtaattttagttggtttttcgggttatatttgaattatgaaatttaggtgatcgggatcgtatatgtgtattaaaattatgaagttatgaggtttttttttaatgtaatattttttatttttttatttttatttaattttaaattagttagaggaaggatgcgattatataaggtaaaatagcgtttattttattttttttaaataataaaattaggttcgggcgggtagttttttttcgttttaggtttcgtcgtttggtatttttaggatttattattttgattatagggttttcgttgttatttttaggtttaaagtattaataattttttatggtgttttttttttgtttttttgtttttttttattttaagtttcgggatatatgtgtagaatgtgtaggttataaattcggtttttagaatttttggttttttttatgggaaggttatagtttgggttcgaggttgttttatttagagtagggaagtttgagtatagggtagagatgtttagaggggtagtagttattgtttttttagatttataggtttaaaggatggtaggatttttaatttttggatattattttatttaaggtttgtattattggttgggtataggcgtaggttatgtatttaatatttgttaaataaattaagttttttaattttttgagtttttattttattgtcgataaagtgggtaagtaatattaattttttaatgtggtttatagtattaaaattttaagagtatttagagttttgtttgtttgttatttggtaggtgattattaaatggtttttagtttttttttttttttttttttggttaggtttaaattgtcgatttttttttgaattttgttgaaatgtttttatttgttaagaggtcggttgttgttttatagaggagataagataatacggtgaaaagtgttataaagtattatttaaatttgagtttaaattttttgagttttttaattttttcgttttttgaattttttagagtttttaatagggtggagagagattgttagaggggatagttattgacgtttgggtatatggttttgttttgttaataaaatatagtgcgtttagttttgagggttgaatgatgtaaatagtgaaaggattttttttagttttggagaaagtttttttatagtttttatttttattttttttataggtaggggatggcgtggtgggaaattagggggtagagaaattataaaagttaagagataaaagtaaaagaggttgtaaaggatgacgtttttaaattgtaaaaggatttagggattaaaaatggatgttgaagcggagaattttttgtagttttaatttttaagtggggtgtaggtgcggatttttatttagtttttttggggagaggacgtaaaagtggttagggtatattaaatagaggagtagggcgtgggtaataggtgtttttggttaattagtggttgttggtaatttgggataagtaaaggtcgttttttttaaaagttttagcgtttacgtttgaaaaatagggtagttataagtttagtgtttatatttgggggttttagtgaggatttcgatttggtgagttagtgaatattattttgtaaatttttaagttttgttggaatgcggttaattattattgtgagttaagaagagttcgtgcgtttttggttttagttcgttttcggcgaagtttagaattttgtcggggaggtgttggttgcggagattatagagagatatttttttttcgtattagattttgatgttattatttttggtgttattattttttcgtgggattcggtttcgatattcgcgggatttacgaaagaaaatggtttttttttaatgtttggttaagtttagttagtttatttttaaaatgggggtataatttttagggttgagttttgaatttgtttcgtttttggtatatttaagtgtttattgaatatggatttaatttttttattttttaggtagagatttcggggaatagtgaaataaaaataagttaagtggttagagcgtagggtcgagggttgtagaaacggattatcgagcgatttcgtaaatttagttggggttcgtttttgaaaaaataatttgtatgtcgagggagttttagatatatatagcgcggttattatttagagggtgttttggatgcggacggcgtattgggcgcgtcgaacgtttcgggtatttaggagtttagaggttttgggtttgttttttcgggagtgtagcgtacgtagaagggtttcggtatttttagttttggaatattcgtttttcgttttttttagtatttcgcgttattttttatttttgtttcggcgcgtatttatttggcggcggcgaatatcggtcgggtttttgtatttacgtcgttttattttttgaatttttcgatttgatcgaggcggtttcgaagggttttattagcggttcggggttgtgcgtttttcgagcgtcgtgtttcgatagtagtagtggtcgtagggtggtttcggtcgaggcgttttcggtcggtagcggggacgtttttttgggcggttttttgtcggatatgagcgtttttacgttgaagggtaggttggagattttgacgcggcgttttttcgcggttttttcggcgtttttaggtttcgggtttggttcggttattattgttgggtttttttcgtcgggcgaaaataagttattgtttttggacggagaagttatgatttttttgttttacgtagttttcgacgcgcgatttcgttggtaattcggtagcggcgatttaaatttttttgttgcggaaacgggaggggcgcgttgggagttgagtttttttttcgaggggaagtgggagacgcgcgtcgttaattcgcgtcgggtttggcgttgacgttaaaaacgttcgtttttgattggtttttttcgaaggggttgttttttttttttttttttttttttttttttttttttgtttgaaataaattaggagttaattataggagtagttagtaaagttgttattaggcgatttttgaagggttataattacgtcgaaattgaaaagttcgagatttaattaagagcgattatttaaagcggaagttcgtcgagttttatttttttttttttttgatttttttttaaaagggattttgcgtttattttattttttttttatcgttagaataagtttaagattcgtaaatagtattgtagaaatatttacgaagtttttattatgcgttaaaattggtttattttatagttttagaaagtcggtgttgaaatttataggttagtatttttgtgaaagaaatgtatgtatttagaagagtaattcgttattagttagcgtttaaaagcgtttattgttattattataatttttttttttggaaaagaggggtcggaaggagttcgagaagtggttaggagtgttttttttttaaatggttcggagtgaagaatttaaattagttgtttttattttttttattagaaagtaaatttagcgtatttttagaaagttgaaatttttgtatttgttttttgaattttttttttgagcgcgattcggattcgattttttttttaagatagtgtaagtgtgtatttatgagtttgtttgagtttgtgtttgtcgtgcgtgtttgaatgttagtgtttgtttcggagggtaatgggggtgggggggaggaggaaaagtcgttaatatttagtgtttttttttcgtttgtaagttttagaaatatcggtttttaagtttgtatattttaggtttatatattattttgggaagtatatttttatttatggtatttggttttttataaaaatatagatgtttttattttattttaaattatattttcggtaatttttttttaaagttttagtgatgattgttttagtttggggaaggggagagcgagtttcgaggattagaggtttcggattttttcgttggtttttaaaatgtttgatttagaaggttagttttaaaagattttttttaggttgcggttgtttttttttatatttgaacgattattttgcgattgacgaggtaaataggaagttatttagtttaggatttcgtttatagtagatgtttgttaaatattttttagagtattggaagggagagatattgtttttaattatttaaatgattaaggtttggaggttattttttagtttaggagtattagaaatttgatttttagatttatagatttttatgtattttttttaatgtatttttttgaggtattgtttgttttattttaaatttttttttgaagtgaaattgtgttggtcggagagaattggaaaaaagtattatttgaattttagaggataaagatagtttgtataggttagttaatttagtttgattaaagatggttttgaaaaagtaaaagagtaagtaagttttaaatatagttttttaaaatttttgagttttttttttattataaagaatatgtatatttttttttaattaattggaggtttaaaaaagttaaaaaaaaaaaaattatgaaaattatttggagatgtatgcgttttttttttgagttatatttggtgatagttgatttgatatgtattttaaatatagtataggtaaatttagattaatttttgtattttttagatgtataaggtaaggtgtaggttatatattttggaagtaaatttgaaattcgtttagtttttagttgttaaagtgtataaaagggtttaatttttagttaggttaaacgtagttaatgttttataattatttttgaaaattttttgttaatatttgttagttataaggtatataggtttatttttgagaaattcgaaataaaaattaatattattggaatttttttattttaatgaatttttttgggaaaggaaaagttaggttttttttattattttggaatattgaagtttaggtagagataaataaattataaagttaggaataggaaaatagagataaaaaaattatcggtgtttaaaattagagtgttaagttttgattatgaataggaaagatgttgagagaggaattagtttgtttttggggtttttgttagttttttttttagttttttgttgaggtggagataaatcgggaaaggggtttatttttgttgggaaagggttggaatcgtaatataacgttagttttttatggaaagttttaagtttgtattttatttaattttggttgcgtttttagaacgttttatttatttttttttggcggagtgattttgggtattttaaattgttttttttagttagcgtttttttttttatttttaaaatgagagataataatttttatttgagatgattttggtggtgattaaatttaataggttatttaaagtaattagaaggtataggaggtttaggttaaaatattattgtatattaaaagtaattataatgtatcgaatgttttttttttgttaaggatcgaaagataaggtgtattttagagtttacggtaggttttttgtaaaattttcggggttgagaatttggttcggtttgagaagtgtttaggtttggggatagtgatttagcggagaattggttttgttacgtagaaggtatttagtaaatgttagtttttagggatgtatgcgtagttgtaatatttgttagtaaaaaagcggggttttaataggaatttagttattaggaagtattaattttgaaggatgttttagtgtttggatttatttaggattttattggttttttttaatatatcgttgttagtagattattttttttattttatagatgaatgtttaaggttgggaagcgttaatattttgtttaaggtcgcgtaggtagaagtgggagatataggaatttttttcgcgcggttgaggtttttgagcgtagatttttaattttgtattttttcgcgtttttcggggcgcgttatattcgttaggtttttttttgaagtaatcgcgtacgcgcgttgcgagttttaaggagaaaatattttttgtaaattgtggagtattgcgcgtagaacgtagcgtttgtaatttcgagggtcgaaggttagtttgtaattttagcggttagaagggggcgggggaggggtagcgaagggggttgtagacgggtttgggtttcgggtaggcgttaggcgcggggagatgaaaggcgggtttcgggggaaggggttgcgtcgggtgatcggttttagtcgcgtcgggcgtttcgttttcgttttgtttcgttttcgttgttcggggtagaggcggttgttcgcgtcggagtcgcgttaattgttttcggttttagtatttagtttgcgcggagtcgggataatttcgttttaggaggaatgataattcgttttaatgggataagttcgtttttagaggagtgataattttttttaatgggagttcgttagcggtttattttatcgagttcgggtattagaagtaggtagattcgcgggcgttaatattcgttaggaattttataatatcgtttatttattttttaaaatattggttgtgtgatttcgggtaaaaggttattcgtttttgagtttattttttttattggtttgttgtagagtgagaatggggaaggttcggttttttggtgtttagagagattatttttcgagttatatagtttaggaagtcgggtagatagatatttagggttatagttggaggttttgggggtataaacgttttgtttgcgaagttttgtaagtttaagtttgtttttttttgtttttttgttttcgttttttaaggttcggagttaggatcgagttcgggtttgagtcggggttggagagaaggagtttttgttaaaagtacgatgtagattattgaaggttttttaaagtttgagttttttttttattttatagatgaagtcgtttaggcgtagagaggggagaggttggtttgattttagttgtggtaaaatttaatttaatacggtgtttttggaagaagattattataaggatgggggcgggggaggtagaggtaaaagaagttgtatttttttgtaggttttatagtttggagaggggatggcgagtttatggggatatttagttttggaggtagtaggtgtgaggggaggagttgtgggtcggttttttgtagttttatatttaaatttaggttttattttttatcgtttttcgtcgttattttgttgggttttggtttttttttttagaaaataggtatgttaatgtttatttatagggttgttggtgagaattaggtgataagttttataaaatatcgagtagcgttgagtgtgttggaagtaggtattgatttaggagatagttttgtttcggattttttagagttaaattggttttaagatttagagttgaattggttttaagtaaggttgaattatgtattttttgtgagattagataaattattttatttttttgtattgtagatttagtagttgtaatatgagagagtgtttagtatttagtaaatgtgggatattatttttattttttaagttattatcgatgttattttttatttttttttttaatagatttttttgggtatcgtgtatatttgaaatcgaatgatttaatattggatgattcgaggtatggaatttattgaatgatttgaggtatgtaattttttggagttttattttttttttttttgtaaaatgggaataattatttattttttgggaaggaagtagattggtagatttatttagtgagaggtggagattaagggaagaagaaattttaggtttagataaatagtagggagtattttttgttttttaatttttgggtatagttttttggtttttttttaatttttgtttgattggaggaaagttgttacgagtagggtcgaggttgatttgtttgtagagaa

SEQ ID NO: 1267 - DNA, 17419 bp, Artificial Sequence
  chemically treated genomic DNA (Homo sapiens)
tataggggttggttattacgtttagttaatttttgtatttttagtagagatggggtttcgttatgttagttaggttggttttgaatttttgattttagttgatttattagtttcggttttttaaagtgttgggattataggcgtgaattattgtatttagtttatatatttttttttatatgtaaatattattttaagataaatttttaaattgggagaggtggtttacgtttgtaattttaacgttttggaaggttaaggtgggaggatggtttgaggttaggagttggagattagtttgggtaatatagtaagattatttttataggaaaattttttaattaattaggggtggtggtatgtgtttatagttttaattatttagaaggattattttagtttaggagtttagggttgtagtgagttgattgtgttattgtattttagtttgggtgatagagtaaaattttgtttaaaaaaaaaaaattttggaagtggaattataatgttaaagaaaatataaatttaaaattttcgggttaggtatggtggtttatatttgtattaattttagtattttgggaggttaaggaaggtagattacgaggttaagattgagattattttggttaatatggtgaaatttcgtttttattaaaaatataaaaattagttgggtgtggtggcgtttatttgtagttttagttatttgggaggttgaggtagaagaattgtttgaatttgggaggcggaggttttagtgagtcgagattatgttattgtattttagtttggtgatagagcgatttaaaaaaaaaaatattttttttttcgtagatattattatattaaattatttttgaaaaaggttgtaaaaacggggtttttgtaaaaagtaaatattttttttagtaattgtttttataagtatttaaataaaaatattttttttttttatttgttgtgaaaggttgatttttattttttatttgattaatttgtaatatttgatagaattaattatttttttttttatgaaatatattttttatttgttttgtttttttttttgtttgtttatttgtttgtttttgagatagagttttattttgttgttaggttggagtgtagtggtttatttcggtttattgtaaattttgttttttgagtttaagtagtttttttgttttagtttttttattatttgggattaaaagtgggagcgagtatatttggataatttttttatttttatagagacggaggtttcgttatgtttgttaggttggtttagaaattttgattttaagtgatttatttattttggttttttaaagtgttgggattataggtatgagatattatgttaggtttttttatttgtattttaaggtgggatgtttttggggttttttttagaatatattggatttttttttttttttaagagatagggttttgttttgttgtttaggttggagtgtagtgtgatgattatagtttattgaagtttttaatttttaggtttataggatttttttattttagttttttgagtaattgggattataggtatatgttattacgtttagttaattttttaaatttttatttatttatttattttgagatggagtttcgttttgttttttaggttggagtgtagtggcgtgatttcggtttattgtaatttttgttttttaggtttaagggatttttttgtttcggtttttcgagtagttgggattataggtgttagttattacgtttagttaatttttgtatttttagtagagacggggttttattgtgttggttaagttggttttaaatttttgattttagttgatttatttatttcggtttttaaaatgttcggattataggtaaattttttaatttttatttttgtagagatagggttttgttatgttgttaaggttgttttataaatttttggatttaagtgatttttttgtatttggttttttaaagtgttgggattagtaaaggtgtagttatagtttttagttggatttttttttttaatttttttttttggttttttttgtttttttgtattttgaatattgaaaggttttaggtgttagtttttggttttttttttatttataatatttttggttggattttatttaattttatggatttaaatattttttttttatttggatgtttaagagaaatttaaaaatgtttaaagtcgaatttataattttaattttaaaatttagttttatattttattttattttaatttagcgaatggtaattttatttttttagttgtttagagtaaatttttgtttttttttttttatattttaagtttttttttttattaaggtttttgttgaagttagatgtttaaagaaattttttattatatttttgagataaaatttttttattttttagtattattgtttatttttttagtttgtttatttttaaaatatagtatgttataatttttaaaattagtttatgtatttttttaatttgatcgttgttttttttattagaatatgagttgagagtagaaattttgttggtttattagggtatttttagtatttatagtagtgttgttggtatagtggttatttaataattatttgttttatgaatgaacgatttatgtaatttatatatagataattgttaaaaattaggttgttgagatggtaaaggtagtagatttagagaagaaatattaggtttggggtttatattagttatagttatgtagttttgggtattattttttaaagtttatttttttgtaaaacgggatttttgttattttttttaataaataagaaagttggaatagttaatatttatttgatagtataagataaaagatttattatttgtaatttattagaaatattttttttaattttttttttaattttatttgtttaggtataatataatatgagataatgtgttttagggttattattataatgatattatattattaagtttgtgtttttaatatattatttgtgtaaattttaagaatagtaattttaaggttacgtacggtggtttatgtttattattttagtattttgggaggttaagggagattaattttttgagatttagattagtttggttaatatagtgaaattttaattttattaaaaatagaaaaattagtcggcgtggtggtatgtatttgtggtttaagttattcggggggttgaggtgggaggattatttgaattcgggaggtagaggttataaagagcggagattatgttattgtattttattttgagcgatatagcgagatttcgttttaaaaataaaaaaatatatattagaaataattattagaaatagaaaattataagagattatttaatttcgtatatggggttattataaataattttagaatttagaaataagaaaaaaatattaaaagttttaaaattaataaaaaattagttttaggttaggtgcggtggtttacgtttgtaattttagtattttgggaggtcgaggcgggtggattacgaggttaggagtttaagattagtttagttaagatggtgaaatttcgtttttattaaaaatataaaaattagtcgggcgtggtggcgggttaattaggtggtgtttgtaattttagttattcgggaggttgaggtagagaattgtttgaattcgggaagcggaggttgtagtgagttaaaatcgtgttattgtattttagtttgggcgatagaatgagatttcgttttaaataaataaataaaaaaagttttagatgagttttgttagtagtaaacggtttgtaaaagaaattcggtatttggttaagttttaagtgatttgaattacgtatttttaggattttattgggatgattgtaatttgaacgcggtttttagagtagagtaagtatattttttggatttagtaatataaggggttagttttttttagtattttagttgttatcgttttgttaggttttttaggtaattgtttattttattttttttttagcgtggacgtttaaggggagggagtattttttttcgagggttaattggtatgtagtttacgaagatcgcgtgagttttttaattttagatttgttgcggggcggggacgtgggggtgataaaatttagattacgattttttatgagttttggtaatttcggggtgattttaatatcgatgaggttacgcgcgttttagttttgatattttttttagatcggcggggtttgaaatagcgggttaagttttatttacggttgagcgttagatttagttgaggagattttaaaagcgttatgttgggtttagatttaggttttttagagtagaacgcggaggggttcgattttagtttggtggcgtaggtgtgtgataaagtatgagggcgcgttaagttttttagttttatatttgttgtcgagtttagcgtttgttacgttttcgtgcggggattcgtttaaaattttttggaagttaggcgatttagatttcgttatcgcgtttttagagattgggcggaaatcggagattcgtttttcgaattcgcgaaattatttttcgcgagattgtttcgttttaatttcgtttcgtaattttattttttgattggttggaattacggtcggatttcggagttttttttagtttttttttcggtcgggtttttcgtcgaatataaaggcgtattgtgaattggtttttttttttcgttaattattttcgttagttatttattatcgattttttttatttttttttttttttttcgtttcgtagttttcgatttgttagttttcggttagttaagggattcgggttttttcgaattgcgtatgcgttatcgcgtttgtagggggagaagcgggtaggggcgtaggcgtagtagtgtgattttttggttagtttttaagtacgtgggttgggttgttttgtttggttgcggagggagtggaatttcgatattggtggtgtttatcgtgggtagcggattaataaaggttatggcgttagtagaaattttgaacgggaaggagattttcgcgtaagtatttgatattgttgttgagtgtggggttgtggacgagggttttgagggtgtgtaggtttttcggatttattttttgcgggagggatatttgtagcggaagagttaggtttataatatttgaagatttgtagttaaagaaagagaattcgggtataatttgcgtttgtaagtggattgtttagtggttgtagtcgttggtttttgtgtttcggggaaaagttttgtgtcgattatgtttttaaacgcgtagttgttggtgattttttgtcgggagagtgggtagttgcggttttttggagtttttttagttagaatttagaaatttaatttatttaattttcgttaatttggaggtgagtagatggagattagtgaggtgataaggtttgataagattataaggttgataatgatagagggtttttttagtttatagttttttttattatattatagttttattatacgttaagtgaaatttaatatattttttttttttttttaatttcgtgtttttttttaatagttatttttttgttttggttttagagttatttgaaacgtaatttggtttttgagttttgagaatattttgtattttatttgatttttgtttgttttatttttgcgggatatttgaatgtttaattagtgggtatcgttgttagttttatttttaggaagtaatattggttgttttttgtttgggaggtgattggtgaggaaaaatgagagtagaaggaagagggaaaaatatattttttttagtagatgaaggagggaaagatatattttgtgtgattttattgagtttgtttttgggattttttatattattcgttatgtaagttattgttgttagttatagtagttattaaattgtaattgttttgtaatttttaattttgtaataggtttttgagtgaattataaagttatcggtggtgaaaagttcgggtttagtggtttatgtttgtaattttagtattttgggaggtcgaggtgggtggattatttgaggtttggagtttaagattagtttatttaaaatggtgaaattttatttttattaaaaatataaaaaattagtcgagtgtggtggtaggtatttgtaattttagttatttgggaggttgaggtaggagaattatttgaatttggggggtagaggttgtagtgagttgagatgcgttattgtattttagtttgggtaataagagcgaaatttcgtttaagaaaaaaaaaaaaagaaattataatatttattgtttagtgttttttaatatgtggtttgttaaattgtatttttgttttattttttgtttttgtttgtttgtatttaaatttatttttttttttagtggttttttgttttaatataaaaattttttttttagaaagattgattgtgaagagataatttagtgtataataatagtgtagataatttagtataataataatgtatttgggttagtattgagaataggtgtttattgaatatattttcgttaattggagagtaaattaaatatgtttattaattttataagggtaaatatatgtattgttttatttttgtttatattttaaatatttggaaattttgttttttgttttattatttgtgtggttttaagtaaattaattaatttttttgtgttaaagtttttttaaatgttaagtaaaagtaatgtttaggttattgggatgttagtagaattaaatgggtttttaatagatgattatttataattttttttggtatataataagtattcgatatatgttgtattaataattagtaattagttaatgtatatatgaatgatttattatttttttttttttttatatggtagttgttgttttgagatttatttttttttttgagatgaagttttgttgtgtttaattttggtttattgtaatttttgttttttgtatataagtaatttttttatattagttttttgagtatttgggattataggtgttcgttattacgtttagttaatttttttttttgagatggagttttattcgtcgtttagattggagtataatggcgtgatttcggtttattgtaatttttgttttttgggtttaagcgatttttttgttttagttttttaagtagttgggattataggcgttcgttattatgtttagttagtttgtttgtttgtttgagatagagttttatttttgttgtttaggttggagtgtaatggtatgattttggtttattgtaatttttattttttaggtttaagcgatttttttgttttagtttttcgagtagttgagattataggtgtgtgttatttcgttcggttaatttttgtatttttagtagagacgggtttttattatgttggttaggttggtttgtaatttttgattttatgtgatttatttatttcggttttttaaagtgttgggattataggtatgagttattgtatcggttttagaattttttaaaaatttagtttattttttatattttattttgcggattaggaaattatttgaggttagaaaagtgatgtgatttgtttaagggtgaatggtaatggtttaattaaaattaaggtttttatttagtatatgatgttttttattttaattagtatttattatttgttaaaaggaatttcgtaagttttttttttttttttttttttttttttttttttattttttagataaggttttgttttgttgtttaggttggagtgtaatggtacgatgttgttttattgtaatttttattttttgggtttaaacgatttttttgttttagttttttaggtagttgggattacgggtatgtattattatgttcggttaatttttgaatttttagtagagatggggtttcgttatgttggttaagttggttttgaatttttgattttaagtgatttgtttatttttattttttaaagtgttaggattataggtgtgagttattgcgttttcgttggcgttttgttttttttttatagttttttttttattagtatgttttttattttgttgagaatgttatttttgattcgtttttttttattattattttttttttatgtttttttgggagttcggatattaataaagtttagtattttagattttttttttatttgttttattttgtgggaaattgggtatttatatgatggatttagttgttaaattatttttttttggaagtaatagtttttttttttttttacggggaattttaagtttgtagtttgaatttgataatcgggggaaggtttgagagttagagataagtatttgttttttgtgggtatttatttatttatttaataagtagttgtatgtgttttttaagttaggtaatttttaaagttttgagagtttaatagtgaataaaatagtttaaatttttatttttatgaaatttgtatattgatgggtagagatagatatttaaataggtgaaatatattgtgagttggtgggaagtataaagagaatattagagtagaaaagagggataggagtttttgtggtatggtggttgtaattttaaatatgggagttatagtttttgtaaaagtgatttacgggtaaagatttgaaggaggtggagttttaagtttgttaatgttgtgagggaaatagtttttgattaaaaatatagtttgtgttatagatttttgtttttattagttattaatttattgttttggggggttaatggtaatggttttgtgagaagttgatcgagtggaggtttttgagtagaggaatttgattttgttttgggtagaagggtggtgttttttaaaagattatgtaaagtgggagaaggatgtgtattagtgttggaagatttattttgttttgtaggtaagaaagtatagttgttttataagtgggttttttaaaggggggtttattatatttatatgatttgtttggttttttttttttttagtttgttataattaagtttgttttttttattggtggtattttttttgattaagttttttttttaaagagattggttgtgaagaggtagatggtttgagtaggtgttgcgagtgtttgttggttaagtgtagggtaagttgggtatatttgtaagttcgttgtggatggtagttttagagtttaagtacggtgttgttttttttgtgtattattgggttatgtaatttatttttgtgttttagtttttgtatattggggtagtaatgttatttaatttataaggttgttagaattaaatgagtttaatatttataaagtatttagagaagttgttggtatatggtaagttttaataaataggtatttagaaagtatttattgaataaaaaagtgatgtttgtgtttatttaggttgtatttttgggagttggtttataattttgagatttaaaattagaatttattttagtgattaaagataaaagtttggaattttggttgtatatttagttatagggttagaagaattgtttttgtgaaaataatttgtttattatagtgaagggtaggtttttttggttattaagttaatatggataagatttttattttgttttgtagattaaatatatgtaggtttttttgtgtttaaaaagatttgtttgggtagggcgtggtggtttatgtttgtaattttaggattttgggaggtttaggtaggaggattatttgagattaggagttggagattagtttgattaatatggtgaaattttatttttattaaaaatataaaattagttgggtatggtggtttatgtttgtaattttagttattttagaggttgagataggagaatggtttgaatttgggaggaggaggttgtagtgagttagtgagttaagatggcgttattgtattttagtttgggtaataagagtaaaattttattttagaaagaaaaaaaaaaaaaatttgtttgtaatgaattttaaagtgtaggttgtttaaaagttatatggaaatttgattgttatagttggattgattttggaagtttgtgtaggagaggtcggagttttagagaggttgggatttttagttaggattttagttaggttgttgggtaggttgtagcgatagtgtagtagagtttagagttggtagttaattattatggttatggtatttgattggggatgtggtttgtaaataagtgtttgtttttgtttattaggggagttgggattaggtagtttgggatttgggtagtggggttttgagtagaggtttgtggttttttgttatattttttatttgtatgaagaattttttagaaggaaagttggtttagtatagaggagggtttttggagtggaagtaaatggttttttttttttttaattgatttagtagaggttggtagaatagaggttaaggggtagggatgtttgtgtggttttggaaaagttagttttatttttttttttgtgtagtagggatgatgagaattgtttattttttgacgttgttttaaggattaaaagaatgtaagatttttaaaataagtttttttgacgttttatttatagtgtagaaggtttttattatttttgtattgtgcggttggtttttttttgtattttttaattgattaaaaagtagtttttgttattttgtaaatttttgattttgaagaagtgggtggttaaaggtgttatagttaagattttttagttattcggttattatttttatttttaattttgtagtttatgatattttagttagaagttaagtgatttgtttaggtgttttaaggtaggtggtagaggttcgatggtgtatttttttttttattatgggtttgttattggtttgttagaaggaattgtaaatttttattttttagtaggagatattttgggtttggttttttttgaggtttttttattgtgaggaaattattttatttattagtttggttgggaagtatttaaatagattttttttaaaaagttatttttgaagttatagtttaattttgattggttagagataggttagatttatttattttgttggttaagttttttttttttttttgttttttattataagtttggacgggagacgtattgtttggtatttggtgtttgagaggttttaggagataagggagtatttttgtgaaaggttttgttagagtttgttaggaatttaattttgattgtaatgaatgatttaatattataagtgatttttgggtttaggtgtttaaatattagtttttttttagtaagtagttttttagatttaattttttttatttaaggttttgtttagtttttttgaaaagtaggaaggttaggtttttgtgaggttttttttattataagtttttggtaggtttttttttttaagtggagaatttttattttttttattttttttatttttttttttgatgatttagagggttgtaagggatttagagttgtttattggagttttagttagttttagcggttagatttatggttaggtaattttttaatagtgagattaatttttagtgttagaattaggggtttgtttgtttttattagtagatttattggtattaatttttttttgttgatatatagttaagtatcgttttttatagatttttatatttagagttaattttgttttgttttataatttttgttattggtagaaggtgataaaattgtggtttagaggttaaatgttttttgtttggtttatagaattagattattttttaatatatttattattttataatattagattattttttaatatatttatgtttgtagttatatataaaaatttggatgtttgattttttgaaagatgtgaatagtttagtaatattgtattgtttatttttatgttattaatttgttggatttgagtagatgttgtttatttttttatttttgagtgggtgggggtgggggaggtgggattttattgtttaggaattttattatatttggttgtttgtattaggatttcgaaggtttttttttttttgagatttttttttgaatgaatttatggtttatttttaaaattttaaattttataaagttttaattagtttaatttagttcgtttattgtattagattagaggttgttaaatggggtagtttttttttttttttattttagggtattgggtatgtttggagttttttgggttgttatatggggaaggggtatgttattggtatttagtagtagaggttaggattggtgtcgagtattttgtagtgtataggatagtttttataataaaggatgatttggtttaaatgttagtggtgttgagatcgaaaaattttgattaagaagtttaatgtgagttattgtgttattgtgtgtgtggattaatgatggattttatttttattaagaattataggatttattaaaattttatattattttgatttatttttatgttataaatattaagtagtttatttttgtttttttagggttttgagttagagataattggatggaagaattttatattataaatttttaatgaagtataaaatagtttttttatattaagtttttaaatacgtatttgaggtaattgttaaatttggtaaatgtttgggttaaattataataatttttttagtaaatatttttatgtaataatagtattattgttagttgattgttttgtatattgatatagtttttgttatattagtgataggtgaaaattagtttttttttaataagaaggtaatttagtgttttaatttgatttaaatgattagtaatttgaaatatatgtattttttggaatattaggtggttttataattataattatttttataaggaattatatattaagtttttaaaaattttttgaaggtttttttttttttttttttgagatggagttttatttttgttgtttaggttggagtgtaatggcgcgatttcggtttatcgtaatttttgtttttcgggtttaagcgattttcgtgttttagtttttcgagtagttgggattataggtatgcgttatcgtttttagttaattttttttttttttttttgtatttttagtagagacggggttttatcgtttaggttgtgttaaattttttagtttaggtgatttatttattttagttttttaaagtgttgggattataggcgtgagttatcgtgtttagtcgaagtattttttagtagtataaaaattgttaatgaataaatgaaataaattaataaatgaataaaatgggaataaaatatattaaataaaatatttgtgttttgtattttaaaaattttataatagttgggcgtcgtggtttatttttgtaattttagtattttgggaggtcgaggagggtagattacgaggttaggagatcgagattattttggttaatacggtgaaatttcgtttttattaaaaaatataaaaaattagttgggcgtggtggcgggcgtttgtagttttagttatttgggaggttgaggtaggagaatggtttgaattcgggaggcggagtttgtagtgagtcgagatcgcgttattgtattttagtttgggagacggagggagattgcgttttaaaaaaaaaaaaaaaaaaaaaaaaaaaaaaaaaaatatatatatatatatatatatatatatatatatatatatatatatatatataaaaaatagtaatttattggggtaggggataaattgtgtttttgtttagaagaagatttttttttttttagaagaagttttgttgtttttgttgttgttatttgtttgtttgtttgttttgagacggagttttagtgggtcgtttaggttggagtgtagtggcgcgatttttgtttattgtaatttttgtttttcgggtttaagcgatttttttgttttagttttttgagtagttgagattataggcgcgtgttattacgtttggttgatttttcgtattttttagtggagacggggttttattatattggttaggttggtttcgaatttttgatttcgtgatttgtttgttttggttttttaaagtgttgggattgtaggcgtgagttattatgttcggttcgaagttttgtattttgaaggtgaatgtttttgttttttttttgattagttattaaaagtgttttttttgtgttatttgagaattatttgagaattattttaagtttatggtatattttagtatttttgttgtttaaaggtagttgtattttaattatgtaaattttatgttgttttttttgtttattatatagtttttgttgaaatgtttatgttatattttattttatttatttatttttttatatttataataagagttaaaggttatattttagtaatgtgtttttttttttgttataatatgttaaatattttaaatttagttatgatgttaaatagagtgaattggaatttttaacggatttcggtaggaatgattatataagatttagggttaaagagagtttgggtgattgtgtaggggtattaggttatgtttagtattatatttggttgttatttaggggagtagttagggttggaattgttggggagtgtaaattgtagtattttttgtttttttgttttagagtagaattgtggtttttatttaggtttaattttagttaaaaaaaaaaattttaatggtttattttttttttgagttatattattgtagagaatattgatttgaaaaaataaagttattaattagaaataaaatttgaattgggtgtagtggtttataattgtaattttagtatttttgggaggttaaggtgggaggattatttgagtttaggagtttaagattagtttgggtaatatggtaaaattttatttttataaaaaatataaaaattagttgaagtgtggtggtgtgtatttgtagttttagttatttgggaggttgaagtgggaggatggtttgagtttaggaggtggaggttgtagtgagttgtgattgtattattgtattttagtttgggtgatagagttagattttgttttaaaaaataaaataaataaataaaaattaaaataaataaaatttgaaaattttgggtatgattttttttttgtattatttaatatttttgatgtttattaggttagtttaaataatttattttttgtgtgtttgtttatgttagttttttgtgacgtgtggagaagtggaattgggagtaattaaattagaatgaaggaagagttgtttgtgaatgtttatatgataaatgataaaattggttttttaagagggatagagtatgtttaagttgaatattgtattatatattataattgggtaaggttgagttatttagatatgtatttatggatgtaattttatttatttgatattttagtgtattgttgagaagttgtatgttggtaaattgattattttagttttgtaagaggttatatttttttttattttaataaggagattgtaggaggttatatttttagttttgtgttaaattttttgtaaagaaaatttttttgtgaattagaatataatttgtaagtttatattgaatttggagtgggatttattgatttattatttaattttatgtggatacgttgtggttattttattagtgtaggttgagtaaaaggtgtgtgtttgagtttgtttttgtaaaattttttatgatagtatttggagagtggaaatgtgaaaaaagatgagtattagtattttttagaagtgttggtttaagtttttatttatttattatatgattttgaatgttattaattaatatatttttaattatttttgaattttgtggtttagttagtgttagtgggagtaagaaaagatttacgtgttcgggaatagtggtttacgtttgtaattttagtattttgggaggttgagatgggtggattacgaagttaggagttcgagattagtttgattaatatggtgaaattttatttttattaaaaatataaaaattagtcgggcgtggtggtacgtgtttgtaattttagttatttaggagattgaggtagtagaatcgtttgaatttaggaggtggaggttgtagtgagtagatatcgtattattgtattttagtttgggtaaaagcgagtttttattttaaaaaaaaaaaaaaaaaaaagaaaaaagaaaaagatttatatttatttgaggtttggaaaattgttgggaagtttttgtatatattaaattagataatgtttatttagtggtgtttttattttattttattttattttggagatagttttgttttatcgtttaggttggagtgtaatggtattattatagtttattgtagttttaattttttgggttttagttatttttttgtcgtagttttttgagtagttgggattataggggtttgttattatttttaattaattttttattttttgtagagatggggttttattatgttgtttaggatagttttaaatttttgttttaaagtaatttttttgttttaggtttttaaagtattgagattataggtatgaattattgtttgtttttggttagtgtttttgatttaaaagagaaatataggtcgggtgtagtggtttacgtttgtaattttagtattttgggaagttgaggtggggggattatttgaggtcgggagttcgagattagtttgattaatatagagaatttttacgtttattagaaatataaaattagttaggtttggtggcgtatgtttgtaattttagttattcgggaggttgaggtaggagaatcgattgaatttgggaggtggaggttgtggtaagttgagatcgtattattgtattttagtttgggtaatgagagtaaaatttggttttaaaaaaaaagagaaatataggtcgggtgtagtggtttacgtttgtaattttagtattttgggaggtcgaggttttagatcgtttgagtttaggaatttaagattagtttgggtaatggtgaaatttatttttattaaaagtataaaaattagttaggtgtggtggtatagatttgtaaagttttagttatttaggaggttggggcgaaaggatcgtttgagtttaggaggtcgaggttgtagtgagttttgattgtgttattgtatttttagtttgggtgatagagcgagattttgtgttaataaataaataaataaataaaagagaaatatatttaataatttgtattatttatttgtgtttgaaatatttagtgttaattttatttttttttttttttttagg

SEQ ID NO: 1268 - DNA, 17419 bp, Artificial Sequence
  chemically treated genomic DNA (Homo sapiens)
tttagagaaaaaggaaagggtggggttaatattgaatgttttaagtataaataagtgatgtagattattagatgtattttttttttatttgtttgtttgtttattaatatagggtttcgttttgttatttaggttgggagtatagtggtataattaaagtttattgtagtttcgattttttgggtttaagcgattttttcgttttagttttttgagtagttgggattttataggtttgtgttattatatttggttaatttttgtatttttggtagagatgggttttattattgtttaagttggttttgaatttttgggtttaagcgatttaggatttcggttttttaaagtgttgggattataggcgtgagttattgtattcggtttgtatttttttttttttttgagattaagttttgtttttattgtttaggttggagtgtaatggtgcgattttagtttattataatttttattttttaggtttaatcgatttttttgttttagtttttcgagtagttaggattataggtatgcgttattaagtttggttaattttgtatttttagtaaacgtggagattttttatgttggttaggttggtttcgaattttcgattttaggtgatttttttattttagttttttaaagtgttgggattataggcgtgagttattgtattcggtttgtattttttttttaaattaaaaatattggttaggagtaggtaatggtttatgtttgtaattttagtattttgggaatttaaggtaagaggattgttttagaataggagtttaagattattttgggtaatatagtgagattttatttttataaagaataaaaaattagttgggagtggtggtaggtttttgtagttttagttatttaggaggttgcggtaggaggatggttggagtttaggaggttgaggttgtagtgagttatgatggtgttattgtattttagtttggacgatagagtaagattgtttttaaaataaaataaaataaaataaaaatattattgaatggatattatttggtttaatatgtataggaattttttaataattttttaggttttaagtagatgtgaatttttttttttttttttttttttttttttttttttgagatggggattcgtttttgtttaggttggagtgtaatggtgcgatatttgtttattgtaatttttattttttgggtttaagcgattttgttgttttagttttttgagtagttgagattataggtacgtgttattacgttcggttaatttttgtatttttagtagagatggggttttattatgttggttaggttggtttcgaatttttgatttcgtgatttatttattttaattttttaaagtgttgggattataggcgtgagttattgttttcggatacgtggatttttttttatttttattgatattaattgagttatagggtttagggataattgaaaatgtattagttgatggtatttaaaattatatagtaaataaatgaaaatttagattaatatttttagaaagtgttgatgtttatttttttttatatttttattttttaggtgttgttatgaaaaattttataggaataaatttaagtatatattttttgtttaatttgtattagtaagatgattatagcgtatttatataaggttgaatgataaattaatgaattttattttaaatttagtataaatttataaattatattttaatttataaaagaattttttttataaagaatttaatataaggttaaaagtataattttttgtagtttttttattagagtgaaagaaagtataattttttgtaaaattaagatgattaatttattaatatataattttttaataatatattaggatgttaagtaaatgaaattatatttataaatatatatttgaatagtttaattttgtttagttatgatatatgatataatgtttaatttgaatatgttttgttttttttggaaaattagttttgttatttgttatatggatatttataaatagttttttttttattttgatttggttatttttagttttatttttttatacgttataaaaaattgatataaataggtatataagaaatagattatttggattggtttagtaaatattaagaatgttgaatggtataagaaagaagttatatttaagatttttaaattttatttattttgatttttatttatttattttattttttgagatagggtttggttttattatttaggttggagtgtagtgatgtaattatagtttattgtaatttttattttttgggtttaagttatttttttattttagttttttaagtagttggaattataggtgtatattattatattttagttaatttttgtattttttgtagagatgggattttgttatgttgtttaggttgattttgaatttttgagtttaagtgatttttttattttggttttttaaaagtgttgggattatagttataagttattgtatttagtttaaattttatttttagttagtgattttgtttttttaagttagtattttttataataatatagtttaaaagaagaatagattattggaatttttttttttaattgggattggatttggatagaggttataattttgttttgagataagggaatagggaatattgtagtttgtattttttagtagttttagttttagttgtttttttgaatgataattagatgtggtgttgggtatagtttaatatttttatatagttatttaggttttttttggttttaagttttatataattatttttgtcgaaattcgttagaaattttaatttattttgtttaatattatggttgaatttaaaatatttaatatgttatgatagagaaaaaaatatattgttaaaatataatttttaatttttattatggatatagaaaaatgagtaaataaaataaaatataatatggatattttaatagaagttatatggtaggtaaaggaggtagtatgaaatttatatgattaaaatatagttgtttttagataataaaaatgttgaaatgtgttataagtttagagtagtttttaaataatttttaaatggtatagggaaaatatttttagtaattgattagagaagaagtaaaaatatttatttttaaaatatagggtttcgggtcgggtatgatggtttacgtttgtaattttagtattttgggaggttaaggtaggtagattacgaggttaggagttcgagattagtttggttaatatggtgaaatttcgtttttattaaaaaatacgaaaaattagttaggcgtggtggtacgcgtttgtagttttagttatttaggaggttgaggtaggagaatcgtttgaattcgggaggtagaggttgtagtgagtagagatcgcgttattgtattttagtttgggcgatttattgagatttcgttttaaaataaataaataaataaataataataataaaaataatagggttttttttaaaaaaaaaaaagtttttttttaaataaggatataatttattttttgttttaatagattattgttttttatatatatatatatatatatatatatatatatatatatatatatatatatatttttttttttttttttttttttttttttttttttgagacgtagttttttttcgttttttaggttggagtgtagtggcgcgatttcggtttattgtaagtttcgtttttcgggtttaagttatttttttgttttagttttttaagtagttgggattataggcgttcgttattacgtttagttaattttttgtattttttagtagagacggggttttatcgtgttagttaagatggtttcgattttttgatttcgtgatttgtttttttcggttttttaaagtgttgggattataggagtgagttacggcgtttagttattataagatttttaaaatgtagaatataaatgttttatttaatatgttttatttttattttgtttatttgttgatttattttatttgtttattaataatttttatattattaaaaaatatttcggttgggtacggtggtttacgtttataattttagtattttgggaggttgaggtgggtggattatttgagttggggggtttgatatagtttgagcggtgaaatttcgtttttattaaaaatataaaaaaaaaaaaaaaaaattaattgggagcggtggcgtatgtttgtaattttagttattcgggaggttgaggtacgggaatcgtttgaattcgggaggtagaggttgcggtgagtcgagatcgcgttattgtattttagtttaggtaataagagtgaaattttattttaaaaaaaaaaaaaaaaaaatttttaaaaaatttttaaaaatttaatatgtagttttttgtaaaaataattgtgattgtaaggttatttagtgttttaagaaatatatatattttaaattgttagttatttaagttaaattaaaatattaaattatttttttgttgaaagaaaattgatttttatttattattaatatagtaaaagttatattagtatataagatagttaattgataatagtattattattatataagaatatttattaaaaaaattattataatttaatttagatatttattaaatttgatagttattttaaatacgtatttgaaagtttaatgtgaggaagttattttatgttttattgaaagtttataatgtaaagtttttttatttaattgtttttaatttaaagttttaagaaagtaaaggtaaattgtttgatatttatgatatgaaaataagttagaatagtgtaaaattttaatgaattttataatttttagtgagggtaaagtttattattaatttatatatataatgatataataatttatattaagttttttgattagggtttttcgattttagtattattgatatttggattagattattttttgttatggggattattttgtgtattgtaggatgttcggtattagttttggtttttattgttagatgttaatagtatattttttttttatatgataatttaaaagattttaggtatgtttaatgttttgaggtagagggaggaaaaaattgttttatttgataatttttgatttaatgtaataaacggattaggttggattggttaaggttttataaaatttaggattttaaaagtggattataagtttatttagaaaaaggttttaaagaggaaagaattttcggagttttggtataggtaattaagtgtggtaggatttttgaataatgaggttttattttttttatttttatttatttaaggatgagggggtaggtagtatttatttagatttaataaattgatggtatgaagatagatagtatagtattgttaaattgtttatattttttaaaaagttaagtatttagatttttatgtgtaattataggtataagtgtgttaagaagtaatttaatgttgtaaagtaataaatgtgttgagaagtaatttaattttgtaagttaaataaaaaatatttggtttttaggttataattttattattttttgttagtagtaagagttatgagataagataaggttggttttgagtatgaggatttgtaagaagcggtgtttaattatatgttaataaaggagagttgatgttagtgggtttgttggtgagaataggtagatttttaattttaatattgagaattagttttattattggaggattatttaattatagatttggtcgttagagttgattagggttttaatgaatagttttaggttttttgtagttttttggattattagaggggaaggtagaaagaatggggaaggtaagggttttttatttggagggaagaatttgttaagagtttgtaatgagaaaagttttataaggatttggtttttttgttttttaaaaagattgaataaaattttaggtagaaaaggttaggtttaaaaggttgtttattaaggagggattggtatttgggtatttaaatttaaagattatttataatgttaagttatttattgtagttaagattaagtttttgataggttttggtaaaattttttatagaaatgtttttttattttttgggattttttaagtattagatattaagtagtacgtttttcgtttaggtttgtggtgaggggtaaagaaaaaaaaaaagtttagttagtaaagtaagtaggtttgatttgtttttaattagttaaaattggattataattttaaaaatgattttttgaagagaatttgtttgggtgttttttaattagattgatgggtggaatgatttttttataatggaaaggttttagggagaattaaatttagggtgttttttgttggagggtagaagtttgtaattttttttagtaagttaatgataagtttatggtagggaaagaaatgtattatcgagtttttgttatttattttggaatatttgggtaagttatttagtttttggttaaagtgttataaattgtaaaattgagggtaagggtagtagtcgagtggttgaggaattttgattgtggtatttttagttatttatttttttaaggttaaggatttatagggtgatagaagttgttttttggttaattaaggggtgtaaaggagagttaatcgtatagtgtaggggtaatgggggttttttgtattgtggatgggacgttaaagaagtttgttttgagagttttatatttttttaatttttggggtaacgttaggaagtagatagtttttattatttttattgtatagaaaggaaagtgaagttaatttttttaaggttatataagtatttttgttttttaatttttattttattaatttttattgagttaattagaggagaagggagttatttgtttttattttaaggatttttttttgtattaggttagttttttttttagaagattttttatgtaaataggggatgtaatagggaattatagatttttgtttaaaattttattatttaaattttaaattgtttgattttaatttttttgatggataaggatagatatttatttgtaaattatatttttaattaggtgttatgattatagtagttggttgttagttttgggttttgttgtattatcgttgtaatttgtttaatagtttggttggggttttagttgaaggttttagtttttttggaatttcgattttttttgtataggtttttagaattaatttagttatgatagttaagtttttatgtaatttttgagtaatttgtattttggagtttattataggtaaattttttttttttttttttttgagatgaagttttgtttttgttgtttaggttggagtgtaatggcgttattttggtttattggtttattgtaattttttttttttaggtttaagttatttttttgttttagtttttggagtagttgggattataggtatgggttattatgtttagttaattttgtatttttagtagagatggggttttattatgttagttaggttggtttttaatttttgattttaggtgatttttttgtttgggttttttaaagttttaggattataggtatgagttattacgttttgtttagataaatttttttaagtataaaagggtttatatgtatttaatttataggataaagtaaaagttttatttatgttaatttagtaattaagaagatttgttttttattatggtaagtaaattatttttataaaaatagtttttttagttttgtagttaaatgtatagttaaggttttaaatttttatttttgattattaggataaattttaattttaagttttaagattataagttagtttttaaaggtatagtttggataaatataaatattatttttttatttaatgagtattttttaagtatttatttattaaaatttattatgtattaataatttttttaaatgttttataggtattaaatttatttaattttaataattttatgagttaggtgatattattattttaatatatagaagttaaggtatagaggtaaattgtatgatttagtgatgtatagaggaggtagtatcgtgtttaggttttggagttattatttatagcgagtttataaatatatttaatttgttttgtatttggttagtaaatattcgtagtatttatttaaattatttgtttttttataattagtttttttagaaaggagatttaattaagaaaaatgttattaatggagagagtaggtttaattatagtaaattaagggaaggaaaaattaaataaattatataaatgtagtaagtttttttttgaaaggtttatttatagaataattatgtttttttgtttataaagtaaggtgggttttttaatattaatgtatattttttttttattttgtataattttttaaaagatattatttttttgtttagggtagggttaggtttttttatttaggagtttttattcggttagttttttatagggttattgttattgattttttaaagtagtaagttagtaattggtgaggataaaggtttatggtataggttgtgtttttggttaggagttattttttttataatattggtaggtttaaggttttattttttttaagtttttgttcgtaagttatttttataaagattatgatttttatatttaaaattgtagttattatattatagaaatttttgttttttttttttgttttggtgttttttttgtgttttttattagtttataatgtgttttatttatttaaatgtttgtttttatttattagtatgtaagttttatgagggtagggatttgggttgttttgtttattattagatttttagagttttgaagattgtttggtttaggggatatatatagttatttgttgagtaagtgaataaatatttataaagaatagatatttgtttttaatttttagattttttttcggttgttaaatttaggttgtaaatttagaatttttcgtgagggagaaaaggggttgttatttttaaagaaagataatttggtaattaaatttattatgtaagtatttagttttttatagagtagagtaggtagagaaggaatttggaatgttgaattttgttgatgttcgagtttttaggaaggtataaaaggagaataataatagaagaggacgagttagggatagtatttttagtagggtgggaaatatgttaatgagaggaagattgtaaagaaaaagtaaagcgttagcgggggcgtagtggtttatatttgtaattttagtattttaggaggtggaggtggatagattatttgaggttaggagtttaagattagtttgattaatatggcgaaattttatttttattaaaaatttaaaaattagtcgggtatagtagtgtatgttcgtagttttagttatttgggaggttgaggtaggagaatcgtttgaatttaggaagtggaggttatagtgagataatatcgtgttattgtattttagtttgagtaatagagtaagattttgtttgaaaaataaaaagaaagaaagaaagaaaagaaaaagaaaagtttacgaaattttttttagtaagtagtaagtgttggttagaatgaaaaatattatatattgggtgaagattttagttttagttgagttattgttatttatttttggataaattatattatttttttggttttaaatgattttttaattcgtaggatggaatgtgggaagtgggttggatttttaagaaattttaggatcggtgtagtggtttatgtttgtaattttagtattttgggaggtcgaggtgggtggattatatggggttaggagttatagattagtttgattaatatggtgaaagttcgtttttattaaaaatataaaaattagtcggacggggtggtatatatttgtagttttagttattcgggaggttgaggtaggagaatcgtttgaatttgggaggtggaggttgtagtgagttaagattatgttattgtattttagtttgggtaataagagtgaaattttgttttaaataaataaataaattagttggatatggtggcggacgtttgtaattttagttatttgggaggttgaggtaggagaatcgtttgaatttaggaggtagaggttgtagtgagtcgagattacgttattgtattttagtttgggcgacgagtgaaattttattttaaaaaaaaaaattagttaggcgtgatggcgggtatttgtaattttaggtatttaggaggttgatatgagagaattgtttgtatgtaggaggtagaggttgtagtgagttaagattggatatagtaagattttattttaaaaaaaaaaatagattttaaggtagtagttattatgtaaaaaaaaaaaaagataatgaattatttatatatatattaattaattattgattattaatataatatatatcgaatatttattatgtgttaggaagaattataaatgattatttgttaggaatttatttaattttattaatattttaatgatttagatattatttttatttaatatttgaggaaattttggtatagaaaggttaattaatttgtttaaaattatataagtagtaaggtaggaaatagggtttttaggtgtttaggatatagataaaaataagataatatatgtatttgtttttatggagttgataaatatatttaatttgttttttaattaacgaaagtatatttagtgagtatttatttttagtattggtttagatgtattattattgtattaaattatttgtattattattatgtattaaattatttttttataattagtttttttaaaaggaagatttttatattaaaataaaaagttattggaaaaggaagtaagtttgaatataagtaaataaaaatagaaagtaaagtagaaatatagtttagtaagttatatgttgaaaagtattaagtagtaagtattgtgattttttttttttttttttttagacggagtttcgtttttgttgtttaggttggagtgtaatggcgtattttagtttattgtaatttttgttttttaggtttaagtgatttttttgttttagttttttaagtagttgggattatagatgtttgttattatattcggttaattttttgtatttttagtagagatggggttttattattttggataggttggttttgaattttagattttaggtgatttatttatttcggttttttaaagtgttgggattataggtatgagttattgggttcggattttttattatcgatgattttgtaatttatttaaaaatttattataaagttaggagttataggataattataatttagtaattgttgtggttggtaatagtaatttatataacgggtgatgtgaaaggttttaagagtaaatttagtaaggttatatagaatatattttttttttttttatttattagagggaatatattttttttttttttttttatttttatttttttttattagttattttttagataaaaagtagttagtgttattttttgggagtaaagttggtaacgatatttattaattaagtatttagatgtttcgtaagggtagaataggtagaggttaagtggaatgtagaatatttttaggatttaggagttaaattacgttttaagtaattttaggattagggtagagagatggttgttagagagaagtacgagattgaagagaaaggaaaaatgtattagattttatttagcgtatgataagattatggtatagtgggaaaagttatgagttggaaggattttttgttattattagttttgtagttttgttaagttttgttattttattagtttttatttatttatttttaaattaacgggaattaagtagattggatttttgagttttgattaggggggttttaggaagtcgtaattatttattttttcggtagaaagttattagtagttgcgcgtttgggagtatagtcggtataggattttttttcgaagtataggagttagcggttatagttattaggtagtttatttgtaaacgtaggttgtgttcgggttttttttttttggttgtaggtttttaggtgttatgggtttaattttttcgttataagtgtttttttcgtaaaaaatgggttcgggggatttgtatatttttagagttttcgtttatagttttatatttaataataatgttaggtgtttacgcggagatttttttttcgtttaggatttttgttggcgttatggtttttattagttcgttgtttacgatggatattattaatatcgaggttttatttttttcgtagttaagtaggataatttaatttacgtgtttagggattggttaggggattatattattgcgtttgcgtttttgttcgtttttttttttgtagacgcggtggcgtatgcgtagttcggaaggattcgagttttttaattaatcgagagttaataggtcggggattgcgggacggaagagggaggggaagatgaagaaaatcggtgatgaatggttggcggaaatgattggcggaaagaaagagttagtttatagtgcgtttttgtattcggcgggaaattcggtcgaagagggagttggaaaggatttcggaattcggtcgtaattttagttaattagggagtagagttgcggggcggggttggggcggggtagtttcgcgggagatagtttcgcgggttcgggaggcgagttttcggttttcgtttagtttttggggacgcggtggcggggtttgaatcgtttggtttttagggagttttgggcgggttttcgtacgggagcgtggtaggcgttggattcgatagtagatgtggaattggagagtttggcgcgtttttatattttgttatatatttacgttattagattggggtcgggttttttcgcgttttgttttggagggtttgggtttgggtttagtatagcgtttttagaatttttttagttgaatttgacgtttagtcgtaggtgaagtttagttcgttgttttaggtttcgtcgatttggaaggagtgttagagttggagcgcgcgtggttttatcggtgttggggttatttcggggttgttagggtttatggagggtcgtagtttggattttgttatttttacgttttcgtttcgtagtaagtttggggttggagaatttacgcggttttcgtaagttatatgttagttgattttcgaggagggatgttttttttttttaagcgtttacgttggagaaggagtaagatggataattgtttggggagtttgatagggcggtggtagttgggatgttggagaggattggttttttgtgttattgagtttaaggaatatgtttgttttgttttaggaatcgcgtttaggttatagttattttagtagagttttgaagatgcgtggtttaggttatttaggatttgattagatatcgggttttttttataagtcgtttattattggtagagtttatttaaaattttttttgtttgtttgtttgagacggagttttattttgtcgtttaggttggagtgtagtggtacgattttggtttattgtaattttcgtttttcgggtttaagtagttttttgttttagtttttcgagtagttgggattataggtattatttaattagttcgttattacgttcggttaatttttgtatttttagtagagacggggttttattattttggttaggttggttttgaatttttgatttcgtgatttattcgtttcggttttttagagtgttgggattataggcgtgagttatcgtatttggtttaaaattgattttttattaattttggggtttttaatattttttttttatttttaaattttgaggttatttatagtagttttatatacgggattagataattttttgtgattttttatttttggtaattatttttaatatatgtttttttgtttttgagacggagtttcgttatgtcgtttagggtggagtgtagtggtatgattttcgttttttgtagtttttgtttttcgggtttaaatgatttttttattttagtttttcgagtagtttggattataggtgtatgttattacgtcggttaatttttttatttttggtagagttggggttttattatgttgattagattggtttagattttaagggattagttttttttggttttttaaaatgttgggataatgggtatgagttatcgtgcgtggttttaaagttattatttttaaagtttgtataagtgatatgttaaaggtatagatttagtaatataatgttattataataataattttaaaatatattgttttatattgtgttgtatttaaataagtgaaattaagaagaaaattgaaggaaatgtttttggtaaattgtagatagtgaattttttgttttatattattaaataggtattgattattttagtttttttatttgttgaggaagatggtagaaatttcgttttatagagggatagattttgaaggataatatttaaagttgtatagttgtggttggtataggttttaaatttgatgttttttttttaaatttattgtttttgttattttaatagtttggtttttgatagttatttatgtatgagttgtataaatcgtttatttatggagtaaataattattgagtggttattatgttaatagtattgttatagatgttagagatattttagtgaattagtaaagtttttgtttttagtttatattttggtggaggagataacgattaagttaaagaaatatataggttaattttagagattatgatatgttatattttaaaaataggtaagttaagaggataggtagtgatgttgggaggtgggaaagttttgttttagaaatgtggtaagagatttttttgggtatttgattttagtagaaattttaatgaagagaggaatttggaatgtaaaagaaagaaagtagggatttgttttgagtaattggaaagatggaattgttattcgttgagttgaaataaagtaaaatgtaggattaggttttggggttaagattatgaattcggttttagatatttttagattttttttagatatttaaatggagagaagatatttaaatttatgggattgaatgagatttaattaagggtattgtaggtagagagaggattaaagattgatatttagaattttttagtgtttagaatgtaaggagataggaggaattaagagggaagattgaaaaggagagtttagttgggagttgtggttatatttttattaattttagtattttgggagattaaatataggaagattatttgaatttaggagtttgtagaatagttttagtaatatagtaagattttgtttttataaaaataaaaattaaaaaatttgtttgtaattcgagtattttggaggtcgaggtgggtggattagttgaggttaggagtttgagattaatttggttaatatagtgaaatttcgtttttattaaaaatataaaaattagttgggcgtgatggttggtatttgtaattttagttattcgggaggtcgaggtaggagaattttttgaatttaggaggtagaggttgtagtgagtcgagattacgttattgtattttagtttgggagatagagcgagattttattttaaaataaataaataaataaaaatttaaaaagttagttgggcgtggtggtatgtatttgtagttttagttatttagaaggttgaggtgggaggattttgtgagtttaggagttggaaattttagtaagttataattattatattgtattttaatttaggtaatagagtaagattttgttttttaaaaggaaaggagagtttagtgtgttttaaggaaaattttaagagtattttattttagaatataagtgaggaggtttggtatggtgttttatgtttgtaattttagtattttgggaggttaaggtgggtggattatttgaggttaggatttttagattagtttgataaatatggcgaaattttcgtttttataaaaataaaaaaattatttaggtgtgttcgtttttatttttaattttagataatagggaggttgaggtaggagaattgtttgaatttagggggtagagtttgtagtgagtcgagataggttattgtattttagtttggtaatagagtgagattttgttttaaaaataaataagtaaataaataaaaaaaaaaataagataagtgaagaatgtgttttatggaaaaagaggtaattaattttgttaagtgttgtaaattggttaaataaagaatgaaaattaattttttatagtaaatagaaggaaaaaatatttttatttaaatgtttataaaggtagttgttagaaaaaatgtttattttttgtagaggtttcgtttttataattttttttaggggtaatttgatatgataatatttacgggaaaaaaaatgtttttttttttgagtcgttttgttattaggttggagtgtagtggtatgatttcggtttattgaaattttcgttttttaggtttaagtaatttttttgttttagttttttaagtagttgggattataggtgggcgttattatatttagttaatttttgtatttttagtagagacggggttttattatgttggttaggatggttttaattttgatttcgtgatttgttttttttggttttttaaagtgttgggattggtataggtgtgaattattatatttggttcgaaaattttaaatttgtattttttttgatattgtaattttatttttaggattttttttttttggataggattttattttgttatttaggttggagtgtagtaatataattagtttattgtaattttgaatttttgggttaaagtgatttttttgagtagttgggattataggtatatgttattatttttgattaattaaaaaatttttttgtagagatagttttgttatgttgtttagattggtttttagtttttggttttaaattatttttttattttgattttttaaaacgttgggattataggcgtgagttattttttttagtttaggaatttattttaaagtaatatttatatataaagaaagatgtataggttgggtgtagtggtttacgtttgtaattttagtattttggaaggtcgaggttggtggattaattgaggttaggagtttaagattaatttggttaatatggcgaaattttatttttattaaaaatataaaaattagttgggcgtggtggttagtttttgta

SEQ ID NO: 1269 - DNA, 6727 bp, Artificial Sequence
  chemically treated genomic DNA (Homo sapiens)
aagttgtgtgatgaggataaggggttttaatagattattttgtttttgtatatagttgaaattttttataataaaagttaaataaaaaagtgttataaattttaacgttgatattaaattttatagtatgaagaatttatggaagagtgagattttgttaaaaaaaagaaaaggttgtggaaaattatttaatgatataaaaagtataataaagggggtgagtgggataggttaaaatagatgatttagtggaattttatttttgttatttaaaaaaagtatgtattatgtatataaaagtatgggtaaggatgtagaaagatatttagtaaggtgttaatagttattttttaatgaatggagttataggtttttttttattttttttattacgtttaagaatttaatgataaaaagttacgtatgttgttttattttagtagtgttggttttattaaaaatatatattttaagatttttatatatgaaagttggaatttaattaagaatatgttagagagaagttgtttgagtaagaaaatatttgaaaagtaagtttttttagaagagaagtaaggtttttttaatagtttataagtatatatttgttaggggtatatattgtttgttagtgttttttattttaagtttttttgtaagttgtaaaagtaaatagtttaatggtaaatatatattttatttaggttaaggtgttatagatttataaacgtgtaaaaatattagattttgttttggggttaaggtgagaaaagggtttgttaaatagttttttttttagaaggaagtttttttatttatttattttttgggatagaaggttaaagagtatttttggttggaattataatgtttcggtttgaagtgattaggttatttattattttagttgtttaagtagtattaaaggagtttattttatagtttttttttggaagaattttatttttttttttttgtgtttttttaaggatggtttagaaaaatagattcgtagagggagttttttttagtggttaggagtggaaggaggtagaagtatttattgaaattagtggttagtttttaaattatttggagttattattaaataggaattagtttttaaaaaaaattttttaggggtgagggattatgtgggtgaggatttatagttattagttgagttttttatttttattgatagtttttaaataattatttttttttttaggatattttaaagatgtttaacgttagttgaaaaggggggtaaaaatgtaggttttatttgatagtgtgacgtatttgaaattagaaaggatttgttaattttgggaatataatttaagtttttttaggatgttttgtagggggaagttggattgttagtgatttagaaagggtgagggatagagtgagaaaggattggagaagttaaaatagtagtatgataagtataaagttttgtgaggaagtttattttgaaaacgtttgttttattttaaattttttttagatggaaataaaaggaaatatgggtgggatttattggagttggtttggatttttttttagattttaggaggggttatgagaaaagattttagatttaggtacgtgaagtagggtagacgtttcgagagttttggttgcggtttttaggttttattcgttgttatttgcgggtttagattggttcggttttattttcggtaacgttttttttagttttttagtaatcgttttttttttaggtcgatttcgtcggttttttattagtttttcgggggtgcgggttttacgtttatcgtagtagtagtattatttgtagtagtagtatagagattttttgtatttcgttattttttttttttattgttattttggatttttttattaatttttttttagttaggatttgcgttttacgtgattggtttcgggacggttacgtggttttttcgagttttgggattgagattaggagtggttgtagacgggtggggcgaggattcgcgttatatgacgataaaggtacggtttttaacgagatttgtgggtacggttatgttgggggcggggttttcggttattcgcgtcggtggttttcgttttgtaggttcgtttttttagtaatttgatatttgcgtcgcgtttttttattgcgtttttcgtttttgtagcggttatagtggtgcggtcggcggtcgagcgttttgagttattcgggattggagggtgagtgacggcgaggtcggggtcgtcgggagggagattttggagtcggtaaataatttttcgggggtaaggacgtgtttgtgggcggggagcgttggaggtcggtttgtttttttttttggggggggttgtcgttttttttgcgtatttttcgcgggattagtgtaatttttaatggttattatttttagcgatcgttaatttttaagcgaagattgattttggttttttgtttggacggaggggtttttgagttaggggtgacgatttcgtttttttgatcggtttaggttcgtgttttcgtttttatcggtgatttagtgatttggtgattggattttcggttatttgggcgtcgagacggttttcggtttttgttttttaaatttgttttttcggcgattatttggagaagagcgttgggttcggggtattgcggtttttggcgtttattgcgtttcgttgcgtacgggggttcgtcgggatttttttgggagtcgtaggtttagtattttagtgtttggcgtagattagttgtttagtaagtggtagaggtttattttgagagagtggtagtatttggttttttggcgtttagtgaatgttggttattatcgtgtgttaaattttggggatattttaggtaggatatcggttttgttttagggaattggggaaagagaaaggagataggtttttttatttatagttataatttagggtgttatgggagtttagttgataacggataaatcgtgggagttggtttataaatatggtatatgcgtggtatatattaggaatgtaataagtttttgaaaattagagggtttataggtggtttagtttttttttattttaggttttgttttagtaagtaattaacgaggtgcgtttttaaacgttggaggaaagttaattggttgtttttgttgttatttttttttttcgttttcgttttttattttttatagttatttttattgagaatttggagtttgaggttagaatgaaagagagtagttttagagggagaaagttttggtttagggtttttagtttggaattaattttttgtttttggatgtattttcgtgtagtttgtgtatttgtgtgtgtattttaggggaagggagtagtgtatttaattagattgttaaaagagtttaagattttaaatggttaggtatatagggttagtggtggatagtttgaaagaaatgaattttatttgggtttttttttgttgtgttatgttattatatatttatttattattgtgtgtttgtttattgttgtgtaagtgttttgtttgtttttaagtgtttgttttatttttttaattagattgttagatgattttatgttttttgttggtttgtttgtgttttggtggttttgattatttgtttttgttttttgtttttgtttttttttttgagatggagttttgtttttgtcgtttaggttggagtgttatggtataattttggtttattgtaatttttgtttttcgggtttaagcgatttttttgttttagtttttagagtagttgggattataggcgttcgttattaaatttggttaatttttatatttttagtagagtcgggattttattatgttggttaggttggttttaaatttttggttttaggtgatttatttatttcggttttttaaagtgttgggattataggtgtgttttttgtttttttaagagatggagtttcgttatgttgtttaggttggttttgaatttttgggtttaggtaatttttttgttttagtttttttagtagttgggttattgtgatgatttgaattgaattttgtgatgtgtaagaagagtagtttgtaaggtaagtatagatggggtagtttttgttttgagaaattcgtgtttttattgaatttgggtttggttatttttggaatatggttagtattaagttttaatttataatacggtttttttggagtagtatgaatttaggagaaatttggttgtatagttaagtttttattttttttattttgtgtacgaattgttttaagtaatagatgttttaggtagagttagttagagtgagttgttttttttttggagggtgatttggtatttttgaacgtttgttggttttatttttattaatttttgtagtttttgtttttgagtttttttttttttattcgtttttttttattagagttttagtttttttttttcgtttggaagttttgttttcgtttttttgtgttggttggagtttaagtttttttttttgtcgtagtttcgtttagttgaatatattcgttggggaaggtgtttttgttttttttttacgtattttgggtttgagttgatagagatggattatcgaaaagttagggtttttttagttgggtattattgtttttcgttaggaatatgggtttcgtaggtcggtagcgtgaggttttttgtgttattttttattaggtagttgttatcgaggagtatgttgtagtgtcgggtgggggttgttttgtatgtaaggagtttggtagtagcggagggtaaggttttgagtgaggcggttcggatagttatagttgaggagtatggagttattgggagggggtagtgttattttttttggttttttttttgtgtggaaatatagcgttttcggtttgaatttgttatttaggtgttttgatgtgtcgggggtgtggttgtttgttttttgatgttttttgttttattttgtgtagtaggaatttagttatggtgaacgaagttagaggaaatagtagttttaatttttgtttggagggtagtgttagtagtggtagtgagagttttaaagatagttcgagatgttttatttcgggtttggatttcgagcggtatgagagatttcgggagaagatgaggcggcgattggaatttggtgataagtggttttttttggaattttttttttttcgaattgttgagggagttgttaattttattttaaggtaaatttatgtaaggttaaggtgggaggcgggagtggtggtgtttggggagtaaattgttagttttgaggttgggttgttttttaattcggtagaaaaaagtagtcggagggggtaggaaggagaaggtagagtgggttatttgatttgtaatttttttgttgtttgtaaaagtttttttatagtgttaaggtattttagatatattttttaatgggttaaaaatgttgatttttatattgtattttttgagggaatttgggggttggattacgagtgtagtttaggaagttataaagtagtgagattgtttttagtaagttagaaatttggattatgttttttgaattttagaaatgttaattgaattatattagtattttatgaattgtagttttttttttaagtttatgttttttattgtatgtacgttttacgtgttatttttaagtttttgaagtttaaatgtataaggatgtttaaatatatcgttgatagtttgtaatataagtattcgtgtatatttaggtttttttttgagtttcgtttcggaatttggttttggtttgtataattgtaagttgttgtatagggtttggggggtggtatgaaagaaagtgagtttgttgattttttttttaattgtttttatagcgaggttgtgtttgttatagttaggatttttttaatttttaattatgatgttttaatttatttgagataataaataggtaagcgttgtgaaaagtttgaagtgttgtttttatataaaatgatagcgttgttgttgtgttttatttttgtaatagtgattataacggtattttatatatattgagtattcggtttgtatattaggtattgttttaagttttgtggaattagttgtcgttatatttttttagtgttatggttttttgttgttgttgttgtttttttttttttttttttttttttgagatagagttttattttgtggtttaggttggagtgtagtggtgtgattttggtttattgtaatttttgttttttggtttaagtaatttttttgttttagttttttaagtagttgggattataggtgtttattattatatttagttaatttttgtatttttagtagagatgaggttttattatgttggttaggcggtttggaatttttgattttaagtgatttatttattttagttttttgaagtgttgggattataggcgtgagttattacgtttagtattttagtgttattatgaagtgggtattattatttgtcgtgttttataaataaggaaatagaatttatagagattaagtaatgtatttaagattatatagttataagtagtaaagttaggatatgaacgttgattggtttgtttttaatttttattgatgtttttttaattttcgggttttatgggaaggtagtgacggatggtattttttttggaatttttttttagaaataaattttttatagg

SEQ ID NO: 1270 - DNA, 6727 bp, Artificial Sequence
  chemically treated genomic DNA (Homo sapiens)
tttgtagggggtttgtttttgaagagaggttttaggagaaatattattcgttattgtttttttatggggttcgggagttagagaagtattaatgaaggttggagatagattaattagcgtttatattttggttttgttatttatagttgtgtgattttgggtatattatttaatttttgtgagttttgtttttttatttataagatacggtagatagtagtatttattttataataatattaggatgttgggcgtggtggtttacgtttgtaattttagtattttaggaggttgaagtgagtggattatttgaggttaggagttttagatcgtttggttaatatagtgaaattttatttttattaaaaatataaaaattagttgggtgtggtggtgggtatttgtaattttagttatttgagaggttgaggtaggagaattgtttgagttaggaggtagaggttgtaatgagttaagattatattattgtattttagtttgggttatagaatgagattttgttttaaaaaaaaaaaaaaaaaaaaaaaagtaataataataataaaaaattataatattaggagaatatgacggtagttggttttatagaatttagaatagtgtttggtgtataaatcgaatatttagtatatgtgaggtgtcgttataattattattatagaggtaagatataataatagcgttattattttgtgtgagagtagtattttagattttttatagcgtttgtttgtttattattttaggtgagttaagatattatgattgagagttaggggaattttaattgtggtaagtatagtttcgttgtaggaatagttagaaagagggttagtagatttatttttttttatgttattttttaagttttgtgtagtagtttatagttatgtagattaaggttaagtttcgaaacgagatttaaaaaaaagtttggatgtgtacgagtatttgtgttataagttattaacggtgtatttaaatatttttgtgtatttaaattttaaaaatttgggagtgatacgtgagacgtgtatatagtaaaaggtataaatttaaaaaaaaaattgtaatttatgaagtgttaatgtaatttagttggtatttttagagtttaagaagtataatttaaatttttaatttgttgaaaataattttattgttttgtgattttttaaattgtattcgtgatttagtttttaagtttttttaaagaatatagtgtgagaattaatatttttaatttattgaagagtgtgtttaaaatattttgatattgtggagggatttttataggtaatagagaagttgtagattagatgatttattttgtttttttttttttgtttttttcggttgtttttttttgtcgggttaaagggtagtttagttttagggttgatagtttgttttttaggtattattattttcgttttttattttaattttgtatgagtttattttgagatgagattgatagtttttttagtagttcgaggagggaagaattttagggagaattatttgttattagattttaatcgtcgttttattttttttcggagttttttatgtcgttcggggtttaggttcggggtggaatatttcgaattatttttggagtttttattgttattgttggtattgttttttaagtaggggttgaggttgttgttttttttggtttcgtttattatggttgggtttttattgtatagggtggggtagggagtattagggggtaggtagttatattttcgatatattaagatatttgagtggtaggtttaagtcggaggcgttgtatttttatataggaagaaggttaaaaaaggtgatattgtttttttttagtggttttatgttttttagttatggttgttcgggtcgttttatttaaagttttgtttttcgttgttgttaggttttttgtatgtaaggtagtttttattcggtattgtaatatgtttttcggtgatagttatttgatggaaggtggtatagaggattttacgttgtcgatttgcgaggtttatatttttagcgaggggtagtagtgtttagttgggaggattttggtttttcgatggtttatttttgttagtttaggtttagagtgcgtggggagggaatagaggtattttttttagcgggtgtgtttaattgggcggagttgcgataaaggaagaggtttgagttttagttagtataagggggcgggggtaaggtttttaggcgaggagggagggttgaggttttagtaaggggaggcggatggaaggagggggatttaggggtagagattgtaggggttggtggagatgaggttaataggcgtttagggatattagattattttttagagaaggaatagtttattttggttggttttgtttggaatatttgttatttgaaatagttcgtgtataggatggaaggggtgagggtttgattatgtagttagattttttttgaatttatgttattttaaaaagatcgtgttgtgggttagaatttgatgttggttatgttttaaaaatagttagatttaagtttagtaagggtacgaattttttagaataaaagttgttttatttgtgtttgttttgtaggttgttttttttatatattatagaatttaatttaaattattatagtgatttagttattgggaaggttgaggtagaaggattgtttgagtttaggagtttaaggttagtttgggtaatatagcgagattttattttttaaaaaaataaaaaatatatttgtaattttagtattttgggaggtcgaggtgggtggattatttgaggttaggagtttgagattagtttggttaatatggtgaaatttcgattttattaaaaatataaaaattagttaggtttggtggcgggcgtttgtaattttagttattttggaggttgaggtaggagaatcgtttgaattcggaaggtagaggttgtagtgaattaagattgtgttatagtattttagtttgggcgataaaagtaaaattttattttaaaaaaaaaaataaaaataaaaaatagaaataagtaattagagttattagggtatagataggttaatagagggtatagggttatttggtagtttggttaagaaaataagataaatatttaaaaataaataaaatatttgtatagtaatgggtaaatatatagtagtgaatgggtgtgtggtgatatggtataatagaggaaagtttaggtgaggtttattttttttagattgtttattattaattttgtgtatttaattatttggggttttagatttttttgataatttgattaaatgtattgttttttttttttgaaatatatatataggtgtatagattatacggggatatatttaaagataaggagttgattttagattaagaattttgggttaaagttttttttttttagggttgtttttttttattttgattttaaattttagatttttagtggggatggttgtggggagtgaggaacgggggcgggggggaggagtaatagtaagagtagttagttggtttttttttagcgtttaagggcgtatttcgttaattgtttgttggaatagaatttagagtaggaggaagttgaattatttgtaaattttttgatttttaaagatttattgtatttttagtatatgttacgtatgtgttatatttgtaagttaatttttacgatttattcgttattagttggatttttatagtattttgggttgtaattgtgggtgaaaaggtttgttttttttttttttttttagttttttgagataggatcggtgttttgtttggggtatttttagagtttggtatacggtgatagttaatatttattgagcgttaaagggttaggtgttgttatttttttaaaataagtttttgttatttattgaataattagtttgcgttaagtattgggatattaagtttacgatttttagaaaggtttcggcggattttcgtgcgtagcgggacgtagtgggcgttagggatcgtagtgtttcgggtttagcgtttttttttaggtgatcgtcggggaggtaggtttaaaaggtaggagtcggaagtcgtttcggcgtttaggtggtcgagaatttagttattaggttattgagttatcgatgggggcgaggatacgggtttgggtcggttagaggggcgggatcgttatttttggtttaggggttttttcgtttaggtagggagttaaagttagttttcgtttgagggttggcggtcgttggaagtggtagttattgggagttatattaatttcgcgaagggtgcgtaagggaggcggtagttttttttaagaagagaggtaggtcggtttttagcgtttttcgtttataagtacgtttttgttttcgggaggttgtttgtcggttttaggatttttttttcggcgatttcggtttcgtcgttatttattttttagtttcgggtgatttagaacgttcggtcgtcggtcgtattattgtggtcgttgtaggggcggggaacgtagtgaaggggcgcggcgtaggtgttaggttgttggagaggcgggtttatagggcggaaattatcggcgcgggtgatcggaagtttcgtttttaatatggtcgtgtttataggtttcgttggaggtcgtgtttttatcgttatgtgacgcgagttttcgttttattcgtttgtagttatttttggttttagttttagagttcgagagggttacgtgatcgtttcggggttagttacgtgaggcgtagattttggttgggagggggttggtagaggggtttagagtggtagtaaaggaggaagatggcggggtgtagggggtttttgtgttgttgttgtaggtggtgttgttgttgcggtgagcgtgagattcgtattttcgaggagttggtaagaagtcggcggagtcggtttggggagggggcggttgttaagggattgagagaggcgttgtcgggggtggggtcgggttaatttgggttcgtaggtggtagcgggtggggtttggggatcgtagttagggttttcgaagcgtttattttgttttacgtgtttaagtttggggtttttttttataattttttttggaatttgagggagaatttaggttagttttagtaaattttatttatgtttttttttatttttatttgaaaagagtttggaatgaaataagcgtttttagaatgagtttttttataggattttgtgtttattatgttgttgttttagtttttttagtttttttttattttattttttattttttttgggttattgatagtttagtttttttttgtaaagtattttgggaaaatttgagttgtgtttttagagttgataagttttttttgattttagatacgttatattgttaaatggaatttgtatttttatttttttttttagttggcgttggatatttttgaggtgttttgaagaggagggtggttatttggagattattagtggaaatgaagagtttagttgatggttgtagatttttatttatatggttttttatttttgaaaggttttttttgagggttggtttttatttgataatggttttagatgatttagaagttagttattgattttagtaaatatttttgtttttttttatttttaattattaaaaaaggttttttttgcggatttgtttttttagattatttttggagaaatataggaggaggaggatgagatttttttaaggaaagattatgaggtgagtttttttgatattgtttgggtaattaaagtagtgagtggtttggttattttaggtcgaagtattatgattttaattagagatgttttttgattttttgttttagggagtgagtgggtaagagaatttttttttaggaaagagattgtttagtaagttttttttttattttaattttaaaataaggtttggtgtttttatacgtttataaatttgtggtattttaatttggatagagtatgtatttgttattaaattgtttgtttttatagtttatagagagatttagagtgaaaggtattggtaggtagtatgtgtttttaataggtgtgtgtttataaattgttaaggaggttttgttttttttttaggagagtttgttttttagatatttttttgtttaagtagtttttttttgatatgtttttgattaagttttaatttttatgtatgggaattttagagtatgtgtttttagtaaagttaatattgttggggtgaaataatatgcgtgattttttattattaaatttttaaacgtaataaagaaggtagagaaaagtttataattttatttattaaaagatgattgttaatattttattaagtatttttttatatttttatttatgtttttatatatatgatatatgttttttttaagtaataaaaatgagattttattaaattatttattttaatttgttttatttattttttttattatattttttgtattattaggtaattttttataatttttttttttttttgatagagttttatttttttataaattttttatgttgtagaatttagtgttagcgttaggatttgtagtatttttttgtttaatttttattatgaaggattttaattatatgtaaaaatagaataatttgttgaaattttttgtttttattatatagttt

SEQ ID NO: 1271 - DNA, 12025 bp, Artificial Sequence
  chemically treated genomic DNA (Homo sapiens)
tattatatttataagtttatatatttatatatattaaattatataaaatatatatttttatagtattattttaaaatggttttatggaattttgttgaattgatacgttataatttattgaattatttttgttattaattaaatatggtatttaaatttttattatattataaagttttttgtgatattatttttaatgttttttttttgtgtattttatgtttaattttataagatattgttattaagagttagtgtgtttttttattatattttttttgttttttatttttttttgtattttagattttatttggggttaatttttttttaattgaagtagatttttaaagatgttatttggaggagttttttattggtaaatttttagttttagtttttttggaaaatttttattttaagtttatatttaaaagatatttttatagaatatatatagaatatttaatttataagtatttttttttagtatattgaagataatattttaatgttttttaatttttattgatattgttaataatttagtagttgtttgtttttttttttttttgaaaataatttgttttttttatttagtttttttaaatattttttttttttttttgatattttgtagtttaattatgatgtatttatttgtgtgtatgtgtgttttaaaaattattttgtttaagatttattgagtttcgtgaatttgtggattggtatttgtgataggtagataatggttttttaaagattttaaatgttttaatttttagaatttgtgatagtttaagttaaggttgtagatgaaattaaagttattaatttatagattttagggtaaaaagattattttggattatttaggtaggtttagtataattataaggatttataaaacggaagagggagatagaagagatggttagagtgatatgaagtaaaaaggatttagtttatttttgttggatttgtaaatgtaggaagggattacgagttaaggaatgtaggtagtttttagaagttagaaaaggtaagaaataaatttttttttaaagtttttagaaagggatatatttgttaatatttttattttatttttgtgagattagtgttagatttttgatttttaagagtataagataataaatttgttgttttaagttattaagttttgtggtaatttgttatggtagttatggagaattgatatagtgttttttaatagtttttggaaattttttaaatatattttttaaatattgtttttgtattatttattttattttttatattttttgatttttttttaatattttttatttttttattttggtaattatttaaaataattggttttttgttttattttaaataaatttatatttttatatttatatattaagaattagtttataaatgtaattgttgtatcgtatatattttaaaaggaaaattgtatttatatttggatattattatattttaggttttgaaatttttttttttaaatgtttgataaatttattttgattaaaattaaaattttattgtatttatagtagtttattaaaagagtttatattaatttttttttttaaatgttagtaatttagttttgtgtggttaaagataatttagaatttttttatggtaattgatatgatataaaggatttttttggttgttgttaaatttgtatgtgcgtatatatgtatagggggtagaaaatttggttagtgattttattttggaaaaatgaatgttttttttggagttttagatttttagtgttttaaattaagtttgtttttgataaggaatttagtgaatttttattttttcgtagagaatttttaaataatattttttaaaatattgtatgtatttttatataattttgttttggaataaaaaaagttattatattaagaatatttttaatttaagaaatttttttaagatttttttaaaatgttaatttttttattgatttgaaaatatttttagagtttaaattattatgattatgtagggataatttaaagtgtttttttaaattttttttttattaatgttatgtttttttttaagaataaagtgttttaatgttataaatagattgtttttttatatagtttttatatattttgattttttatatttagtagggtaatatatttttttttaatttttagtggggtgaagtttatttgttttttaatttaagaaaatacgttaatttttgataatttttgatatttaatagaaatataattgtattttggaattaattatttatttttattttatagtttttttatttattaatgtaaatggaagtatagtaaatattttatagtgttatgtattatttaaggaattttattgtaatagtattgttttgaaatgtattatttgattttgatttaattattatagattagttttatttttgtatgtttagtttgaatgtttaattataattttataaaaattaagggttttgttagtttttatataaaattgtgatgatttattatgaagatagttttaattaataattgtatgttatttgtaagaaattaattttttttttattttttatttgtaattttttttaagtaaagaagaatatttgggtttaggttttaaggtttatttttttgtagttttaatattattttagtaaattaatttgagatttatttttttaatatgttaaatgattgttgtaaggattattataaaaacgtaaggtgattaataaagtatgtaattgttttatagatggtagtttttgtttttttattgtgttttgtttttgttttgttttatatattatgtaaaatagttggtgagttttaggaggtagtgtttatatgtttgtatagtgtttgttgtggacgattaatagtaatagaagagtatattttttcgatatatagagtttattgaatttggaaaggttttggtatttttatgttatttgtaatgaaataatttttagaagttttttttaaaatgtttttgtaaaaagaaaaaagttatgtttatattttataaaaggatgatgttatttataattagtagaagtagttttatttgaatattttatgttgaaattgttatttaatatagtgatttataggagttttttagtggaaattaaatgtttaaatgaaatagaatttagtttgttaggtaatagtgatatgttttttattggttggattttggaaaatatttgataacgaatagtattttattcgaagggtacgtattatgtattatatagtttaattataaatattaaaggttttgtaattgtgagttttaaatgaaaatatataaggatagtttttatataattaaatataatataaattagtttttaatttaaataaatatgtaagtaaagtttaagtgattataatgattttatatttttatgtatgtattatagaaattgtggtaaattgtagaaatttatttaaatggaaagtaataaagtatttttatattgttttgtatttaaaatttttattttttataaaaatttatatttttttaataaagttatttttttgtttaattttcggaaaatttcgtatttataatttaagggggtttttttaattaaataatttatttttgttaggtattatagttatattttttatataaaatttgtgatagtaaatgaaattttaattttaatagaagaataaataatttttatgtttcgatttttatatatataatttaagaggaaatatgtttaattttgtagatttttatattttaaattgtattgtgtttgtattaagtttattattttttatttagattgtttggaagatttaagtttaaggttacggtttgagaaaagggttttgagagtgattaggatagatttaagaatttattttatattaaaatatggttataaatatttttaaatatatttaaatagttttttgttggtatatttttttttttttttgttaaaatatttttataggcggtttaagttattttattttataggtttagtaggtttagtaggttttatgtgttttagtagggttagtaggttttgtttatattaggttttttttatgggagtttttagggataaggattgttttagttagtatggttttagttatattagggtatttgttttaattttatagaagttttttaattaatattttgtagtaaaagaattaagatttggaatttttttttttaatttttttttagaaatgagatttagaaaggataggattgtatttagtttgtttgggaatttagataaatgtgtgttgttatagatataaatagaggtttattatgaaataattggtttgatagtgtgttaatgatagataatgttgatttgttttaattttatatagttttatatataaggataattatttatgttttatgaaagttttatttattttaatattattttgaagtgattggtggtggtatgaattaatagtttaaatttaaattttaaaatttagtgtgaattttttataatagtataaaaatttaaagatgtttatataagaaaaattaaaatttggttaggtttagtagagtttgagaatttttattatttttttatatagtattgtaatgtgaatataggtagttattattataggtataatgatgattatgtattaagtagaaagaagtattattattagtttttttttttgaatgttttttagtatttttgtatttataggatggtagattggtttggtttagtttttaaaagtgaaaatatttaaagtttttttattgggtgaaaaaaattaaaaagagtgagagattgaaaattgtagtttatttacgtttaattattaatagtgagttttttagtgaatttaggttttgattttggagtttggagtttgatttttttttaaagataaatatgattgttgtaggttttgaagagggttatttttttattggttgttattgaaagagtttattttttagtgatttttagttgggtattggatgtagttgaggattgttggttaatatgattttttttgttgtgttttttttttgttttatttttttatatttagtttttgttaaaggtaagtttgtgttgttttttgttaaattttaatttttatttttggagttggaggtagatacgtgcgtgtgtgtgtgtttgtgtgagtgaatagtgaaagagtttttgattaaattatttttaaaattatgtaattttggaatgtttgtgaaagtatggttgagttgaaatgaaaattaaatttaaatttttataaatattaagaaaatagatattttttttagttttagttttttagattagtgtgtttttgttttaattttttatttatggtttgtttttaaaagaaggaaaaaagatatttattattgttatttgttgttgttggttatattgaatgtagtttttttatttgaattgtaaatgaggattttttttaaaaatcgagtttttaaatttttttttagttgtttagtaatgtgattttaagaagaattagatttaatgaaaaaggtatttgatttgttaaagaattatgaatgaaatggtataatatatatttaatttcgttataattaaaaaatgatagaatttatagtgaattaaagaaaattaaattttttgatatagatttaagaaataagatattatttttggaaaaataatgttgttatttatagtttttattttaagatgaaattaattttaaaaatatatatgaattaatattattgaaaaggtaagtgaaaaaatattttatgaggaatggttttataaaattgttgtgaagtgtattaatatagaattatgttttagattagttatattataaatatcggttttttaaatgttgtattgtgtaaaatgattattttttagttttttaggaagatatattgttaaaaattaattgatataataatatagcgttatagggattaattttaaaattatgtattttaagtaattgatagaaaataatttatttataaatttataaaatttgttagggataaatgtggtttttgatattaaagtaaagtttgttttaggattttttgtgtagaaaatttttatatgaggaaaaaaatttaatttttattattggagtaatagagggttaaatttaaattaatttattttagtaaattatattgtaggtttttgaattaaagaaaatatttttattaatttttaaatatttattatttaaatatatagtttttatttggataaaagaaattttttaatgagaagaagatttataaattatatttgattgagagtgttatatagaggatttattattttatttgttaaataaattgttgagtagttaaaatatgtgtgatttaaatattatagtattaaatttaatattataagtattttgagaaaaataattgagatatggtatttattatgagttttttttgtttttttattttataaattagaatattgggtgattttatgtttttaaatatatttataaaaaatttaaggtcgggcgtggtggtttacgtttgtaattttagtattttgggaggtcgaggcgggcggattacgaggttaggagatcgagattatttcggttaaaacggtgaaatttcgtttttattaaaaatataaaaaattagtcgggcgtagtggcgggcgtttgtagttttagttatttgggaggttgcggtaggagaatggcgtgaattcgggaggcggagtttgtagtgagtcgagatttcgttattgtattttagtttgggcgatagagcgagatttcgttttaaaaaaaaaaaaaaaaaaaaaaaatttaaatatatatatatattagataatggtataattgggaaatggtataaatgagaaaatgtggtttagaatattataggtagttatagtttattgtaaataagtttagtagtaaatttagatttttaaagtttgaaatatatataatttaggggttatttttgagaaaagattataaaaatattttattattgtaaaggttattgaaaaagatatggtatgtggatatattgttagggtttatttttggagtttttggaaggattttgggtaagagagtttaagttttattagtattatggtacgttgtttatgttgatattataaattaaaagtgtataatttgagagtttttttatttagatggaataattttttgtattatggtattatgatttaattatagattttttgtttttgtaataattgatattaattagtaaataatttgtgaagagtttattttaaaattagtttatttaaaatttggggattttatgttttattgttttaaaatttatttttaaattattaatgtaattgtttggtaaatttttagatttgggtggatgttgaagggtaggttagaatttaaagaaaattgaggttgggtgtggtggtttatgtttgtaattttagcgttttgggaggttaaggtgggtagattatttgaggttgggagttcgagattagtttgattaacgtggagaaattttatttttgttaaaaatataaaattagttaggtatggtagcgtatgtttgtaattttagttatttaggaggttgaggtaggagaattgcgtgaaattgggaggtggaggttgtattaaaaaaaaaaaaaaaaagaaagaaaagaaagaaaggaaggaagaaaagaaaaaggaaaattgaatggtagattggaatttgaagagggtattaggattaggataaaagagtatatttatatgatttgttgtgtgaattttttaaagatttaagttttttttatttttttttaattatattttgttatggttggattatttttagcgttttttttgtgttttttttatatagtatttttattttttatttaattttgttatttttaaatttgtatattttttttatttttagttttttttttaattttttattttatttttattttttagttaatttttattaattattttttagtttttttttttttttattttttatttttttttttaatttttgattttttagttttttgttgggtttataaatgttattatttattatttttattattattgtatgtttttttaaattttattaataatttagttttgttttgtttttttgattaagttagttattagtgattgtatttatataaatttgataaaggagtatttaaaaaatattttttgaagatttaaaattaatagttttgttgtttttaagttatttaaaaattttaaatgtatttgaagggtaaatgaaagagattttgatttttttggttaatattattttttgttttggttttatttaataatagttattaaaaaatattattatatatattttgaagagtattattttataaaaggaattaagttaataatataaatgggatatgttttaatgtttagtgttgttagatttttgtaaagtataaatagagaaatatttattaaaaaggaaagtataagaggatgatattttagtatagtttattttatttgaatcgttttaggttttattttttgttgaaagaggtaggaaatagtttggaggaataaagggtttatttttttttgtgttttaatattttttatttatagttaaaaattgatttattatatggttagtaaagtagaggtaagaaaagaagtgaataatataatagtttggaaagttttggaatttaagaaaggttatttttttataaatgtttcgtagttattttaattagaggatattttaatatagtttatagaatttggattttggtaaatttaaatattaaatttgtattatatttgttatgttgggttgaatttggggttagtttttatttgttgttatataatgtttattttttagaattgttttgaggattagataagataatatgtattttttttatgttttatgtggaatttgataggtgttataaaaagaaggttttttgatcgaaatattttttttgattagaaagttagtatttgaattcgttatagagtttttaattataatgtagaagatatagagataagagggaattttagtttttattttttttaaggttttttttgattttttttgttttttgtgttttatattttagtttttgtttgatttggtgtttggatatagtttggttttgtgtatatatatagatttttttatattttttttttttggttttttttgatttttatgaaaatgtttgttttttttttttgaaggttcgatagattatgtgattttattatttaaaattttatggtagcgttttattttatttaaattttttaaatttttttgttatttataggtattttttttattttgttttttttattgtgttttttatttatttatttttagtttttttggtttttttgttttttttttattatatttgtaggagtttttttcggggtttttgtatttgttgttttttttgtgaggggaaggggtagaaagggtaggagttgggggagggggatgttttttttatagatatttatgtagtttatcgaaaatttttgtttaaaatgttatttttttatagaggttttttttttagtatttttatttttttttttgttttagttttttttatgagtatttttattatattatataatttgtttatgtatttatttttttattgtttttttttatcgtatttaaatgtattttttaatttatatttataaagggtagaaaatttataaagggtattaaatttataaaaggtagaaattttgtttgttggttgggtgcggtggtttatatttgtaattttagtattttgggagggtgaggtgggtggattgtttgagtttaggagtttaggattagtttggttaataaggtaaaattttatttttataaaaatataaaaattaattgggtttagtggcgtgagtgtgtggttttaattatttagaaggttgaggtgggaggattatttgagtttggagatgaaggttgtagtgagtcgagatcgtatgattgtattttagtttgggtgatagagtgagattttgttttaaaaaaaaaaaaaaaaaaaaagtaaagaaagaagaagaaattttttttgtttttttttgtttgttaattggtgtagttttagagttttaaaaagtatttattatttaataggtatttattatattttagttgaatgaatgaataaatttttagtttattgtttaggaatggaaaataatttaatttatagttttagagatatatagtatagataagagtattatttttagagatagatagtttggattaaaattatatttttagttagacgtggtagtttatatttataattattttgggaggtcgaggtgggtggattatttgaggttaggagtttaagattagtttggttaatatggtgaaatttcgtttttattaaaaatataaaaattagttaggcgtggtggtatatatttgtattattagttatttaggaggttgaggtaggagaattgtttgagtttgggagatggaggttgtagtgaattgaaatcgtgttattgtattttagtttggtcgatagagtgagattttgttttaaaaaaaaaaaaaaaaaaaaaaaaaagaattatgtttttatgatgaattatttgggtgattttaggtaaattatatagtttttgtgtttttttagtttttttatttataaaatgagattaataatagtgtttattttattagatttttgtgaggattaaataagttaatatatgtaatatgtagatgatggatttttgattattattttttttgggtaagtacgtgttgttatatgtagaggagatagtgaatagattgttattgtgtaggtgggtaaggtttttttaggtattgtaaagtaatttttgttattattttttttagttgttttgttttttgtttagttattttaaattttttttttgtttttttttttatatgtatattttttgagagaaaaaaagattatggttgcgtgttatagtaaattgggtaatgtaattttattagtattgaggaataaggtaaattgaagttttttttaattattttttgagagttatatatagaaaatatataaaagaaaaaagatttatgtgattatatattttaagttatttttgggaaagatttgttttttggtatttttttgggttaggtaaattgaattggatattgtgtgaatttatttatatattagtttttttggtttatagtatagatttgtatattatttgatttttttaaattattttatgttaattttaagtttgtattaagattttatatagtaaaatattattttattcgggtatagttaatttaaagttatatatgtgtaacgttgaaatgtatttttgtattaaaagtttgataattatattaatagagtaaattatattgaagagatgttttttaaatattaaaaatgtttaaattaaagaatttttttttaattattaaaattattttggtattgatttgtttgtatttaaataatacgttaattacgaatggtttatattaaatttattaattaatttttggtgggttttttatttgaaattatgtttatataattaagagaaatataatggtatttaaataaaaaaaaatttaaaatatttatagtttaattatggtattatcggataagtgattaggaatataaattaaggttttttgaaatgggagtttatttgtttgttttttgtttgtttatttatgttttttaagttaatgattttagtagatgaagtagtattatgttttaattagcgaatatttattaagttttttgagttttattgtggtagagagatgtattgatggtgagatagtatgtttttttataatgaaaattggatatgtgttattatttttatgtagg

SEQ ID NO: 1272 - DNA, 12025 bp, Artificial Sequence
  chemically treated genomic DNA (Homo sapiens)
tttgtataaagataatgatatatatttagtttttattgtaagggaatatgttgttttattattagtgtatttttttattatagtggggtttaggaagtttggtaaatattcgttgattgaaatatggtgttattttatttgttgaaattattgatttgaaaaatatagataaataaataaaaaataaataaataaatttttattttagagaattttagtttgtatttttaattatttattcgatagtgttatggttgaattatagatattttgggtttttttttgtttaaatgttattgtattttttttaattatatgaatatgattttaagtagaggatttattaggaattggttgataaatttaatatgagttattcgtaattaacgtattatttaaatgtaagtagattaatgttaaggtagttttagtggttagaaggaagttttttaatttggatatttttgatatttaagaaatatttttttagtgtaatttattttattaatgtaattattaaatttttagtataaaggtatattttagcgttgtatatatgtaattttaaattagttgtgttcgaataaaataatgttttattatatgaaattttagtataggtttaaagttggtatggggtaatttaaaaagattaaatagtatataaatttgtattgtgagttaagaaaattgatgtatgaatgagtttatatagtatttaatttagtttatttagtttaaagaaatgttaaggagtaagttttttttagagatgatttaaaatgtatggttatataaatttttttttttttgtatattttttatgtatggtttttaggagatagttaaaaaagattttagtttattttattttttaatgttaatggggttgtattgtttagtttattatgatacgtaattataattttttttttttttaggaaatatatatatggggagagggatagaaaaggggtttggggtgattagataagaagtaaagtagttgagaaaggtgatagtaaaaattattttgtaatgtttgaaaaggttttatttatttatatagtaataatttgtttattgttttttttatatatgatagtacgtatttgtttagaggaaatggtggttaaaaatttattatttgtatgttatatgtattaatttatttaatttttataaaaatttaatgaggtaggtattattattagttttattttatagatgaagagattgaggggatatagaaattatataatttatttaaggttatttaggtaatttattatagagatatgatttttttttttttttttttttttttttttgagatagagttttattttgtcggttaggttggagtgtagtgatacgattttagtttattgtaatttttattttttaggtttaagtaatttttttgttttagttttttgagtagttagtaatataggtgtgtgttattacgtttggttaatttttgtatttttagtagagacggggttttattatgttagttaggttggttttgaatttttaattttaggtaatttatttatttcggttttttaaagtgattatagatgtgagttattacgtttggttggagatatgattttaatttaggttgtttgtttttaaagatgatgtttttatttatattatatatttttaaaattataggttgaattattttttatttttaggtagtgagttagaaatttatttatttatttaattagaatatagtgagtatttgttgaatagtaagtattttttaaggttttgggattatattagttaataagtagagaaaggtagagaaagtttttttttttttttttattttttttttttttttttttttgagatagggttttattttgttatttaggttggagtgtagttatgcgatttcggtttattgtaatttttatttttaggtttaagtgatttttttattttagttttttgagtagttgggattatatatttacgttattaagtttagttaatttttatatttttgtagagatagggttttgttttgttggttaggttggttttgaatttttgagtttaagtaatttatttattttatttttttaaagtgttgggattataggtgtgagttatcgtatttaattagtagataaagtttttattttttgtaaatttaatattttttgtaaattttttattttttgtaaatgtaaattggaaggtatatttaaatgcgatggagaagggtaataaaaaaatgagtatataagtaagttatatagtatgatagaagtgtttataaagaaaattgaagtaggaaagggaatggagatgttgagagaaaaatttttgtggaaaggtgatattttggataaaggttttcggtgagttatatggatatttgtgggaagggtattttttttttttaatttttattttttttattttttttttttatagaggaaatagtaagtgtaaaggtttcgaggagggtttttgtaggtgtaatggaggaagagtagggagattaaagaggttggaaataaataagtaaaagatatagtgaaggagataaggtaaaggaggtatttatgggtggtaggaagatttggggagtttgagtgagatgggacgttgttatagaattttgggtagtgaagttatataatttgtcgaatttttaaagaaaagggataagtatttttataggaattaagaagagttaggagaaggaagtatgaaaggatttatgtgtatatataaaattaagttgtgtttaagtattaagttaggtagaaattgaggtgtgagatatagaaggtaaagagagttaggaaaaattttgaaggggatgaagattgggatttttttttatttttatgttttttgtattgtaattggggattttatagcgggtttaaatattggttttttggttaggaaaaatatttcggttaggaggttttttttttatgatatttattaaattttatatagggtataaaggaaatatatgttgttttatttaatttttagagtaattttgaaaagtaagtattgtgtgatagtagatagaagttgattttaagtttaatttaatatagtaaatataatgtagatttgatgtttaaatttattaaaatttaagttttgtggattatattaaggtgttttttggttaaaataattacgaaatatttgtaggaaggtaattttttttaaattttaaagttttttaaattattatgttatttatttttttttttatttttattttattggttatataataaattaatttttgattatgagtaggaaatgttaaagtatagaaaagaatgggttttttatttttttaaattgttttttattttttttaataggagataaagtttaaaacggtttaaataaggtggattgtgttagagtgttatttttttatatttttttttttgataagtatttttttgtttatgttttgtagagatttggtaatattgggtattggggtatgttttatttatattgttgatttaattttttttgtaggatagtgttttttagagtatgtatagtaatattttttgataattgttgttagataaaattaaaatagaaagtaatattagttaaaaaagttagaattttttttatttgttttttaagtgtatttagaatttttaagtgatttaaaagtaataaaattgttagttttgaatttttaagaaatattttttaaatatttttttgttagatttatatgagtataattattgataattggtttagttaagaagataaagtagagttgagttattggtgaggtttgaagagatatgtagtgatgataagggtgataggtaatggtatttatgaatttaatagaaaattaaagggttagaagttaaaaaagaagatgaagggtaagaagaaaaaagaattggaagatgattaataaaaattgattaaaaagtaagggtggggtgagggattgagagaaagattggaaatgaaggaagtgtataggtttaaaggtgataaaattaaatagaaggtaaaaatattatataaggaaaatatagagaaggcgttgaaaatagtttaattatgataaagtataattaagaaaaagtagggaaaatttgagtttttagaaagtttatatagtaaattatatagatgtgtttttttattttaattttaatattttttttagattttaatttgttatttaatttttttttttttttttttttttttttttttttttttttttttttttttttttttttttgatgtaatttttattttttagttttacgtaatttttttgttttagttttttgagtagttgggattataggtatgcgttattatgtttggttaattttgtgtttttagtagagatggggtttttttacgttggttagattggtttcgaatttttaattttaagtgatttatttattttggttttttaaagcgttgggattataggtatgagttattatatttagttttaattttttttagattttaatttgttttttaatatttatttagatttgaggatttattaaatagttgtattggtaatttagagatgagttttgaggtaatgaggtatgggatttttaaattttaaatggattgattttaaggtaaattttttataagttgtttgttaattaatgttagttgttataagggtaaagaatttataattaaattatggtattataatgtaaaaagttattttatttaggtaaagaagtttttaagttgtatatttttaatttatgatattagtataagtaacgtattatgatgttgatgaagtttaagtttttttgtttaggatttttttaaagattttagaagtggattttagtaatgtatttatatgttatattttttttagtaatttttgtaatagtaagatatttttgtaatttttttttaaaagtggtttttaaattatatatgttttaagttttaaaaatttagatttattattaagtttgtttataataaattgtagttatttataatattttaaattatatttttttatttatgttattttttaattatgttattgtttagtgtatgtgtatatttaaattttttttttttttttttttttttgagacggagtttcgttttgtcgtttaggttggagtgtagtggcgggatttcggtttattgtaagtttcgtttttcgggtttacgttatttttttgtcgtagttttttaagtagttgggattataggcgttcgttattacgttcggttaattttttgtatttttagtagagacggggttttatcgttttagtcgggatggtttcgattttttgatttcgtgattcgttcgtttcggttttttaaagtgttgggattataggcgtgagttattacgttcggttttaaattttttataagtatatttgaaaatatgaggttatttaatgttttagtttataaaatgggaaaataggagaagtttatgataagtattatgttttaattattttttttaaaatatttatggtattaggtttgatattatggtatttaaattatatatattttgattatttaatagtttatttggtagatgaaatagtaagttttttatataatatttttagttagatataatttataaattttttttttattaaaaaattttttttgtttaagtaagaattgtatgtttaaatagtaaatatttagaaattggtgaaaatattttttttagtttaagaatttatagtgtgatttgttgaggtgaattggtttaaatttaattttttattgttttaataatgaagattaggtttttttttttatgtggaaattttttatataaaaaattttgaggtaaattttattttaatattaaaagttatatttatttttaataggttttataagtttataagtgaattgttttttattaattatttagagtatatggttttaaaattggtttttataacgttatgttgttatattaattggtttttaatagtgtgtttttttaagaaattaaaaagtgattattttatataatgtagtatttggaaaatcgatgtttataatgtagttgatttgaaatatgattttatattaatatattttataatagttttatgaaattattttttataaaatgtttttttatttgtttttttaatggtattaatttatatgtatttttaaaattaattttattttaaaatagaaattgtaagtagtaatattatttttttaaagataatgttttattttttaaatttgtattaggaaatttaattttttttaatttattatgaattttattattttttaattgtaacggaattaaatatatgttgtgttattttatttataattttttggtaaattaaatgttttttttattgggtttaattttttttgaggttatattgttaagtaattaaaagaaaatttaagaattcggtttttaaaaaaaatttttatttataatttaaatgaaggagttgtatttaatgtgattaataatagtaggtaataatagtgggtatttttttttttttttttaaaaatagattatgaatgagaaattgaagtaagaatatattggtttgaggaattgaaattaaaagaaatatttgtttttttaatgtttgtagggatttgaatttggtttttattttaatttagttatgtttttataaatattttaaagttatatggttttgaagatagtttagttagaaatttttttattatttatttatataaatatatatatacgtacgtatttgtttttaattttaaagatggaaattaaagtttagtaaaaggtaatataaatttatttttaatagaagttgaatatgaggaaatgaagtagagaaaaagtatagtaagaagaattatattgattagtaatttttaattgtatttagtgtttagttaggagttattgagaagtggatttttttaatggtagttagtgagggagtgattttttttagaatttgtaataattatgtttatttttggggaaaggttagattttaaattttaaaattaggatttaagtttattgaagggtttattattaatgattaaacgtaggtgggttgtagtttttagttttttattttttttaattttttttatttaatgaggaaattttaaatgtttttatttttgagagttaaattaaattagtttattattttataaatgtagaagtattgaggggtatttaaagaaaaaaattggtggtgatatttttttttgtttaatatataattattattatgtttgtaatagtaattgtttatatttatattataatattatgtgggagggtagtaaggatttttaaattttgttaaatttaattaaattttaattttttttgtatggatatttttgaatttttatgttattataaaaaatttatattgaattttaggatttaaatttaaattgttaatttatattattattaattattttaaaataatgttaaagtagatagaatttttatgaaatatagatgattgtttttatgtgtgaaattgtatgaggttggagtaaattagtattgtttgttattagtatattattaagttaattattttatagtagatttttatttgtgtttgtgataatatatatttgtttgagtttttaaataggttggatgtagttttgttttttttgaattttatttttaggaagagattaagagggggaattttagattttagtttttttgttatagaatattaattagaaaatttttgtagaattaaagtaaatattttagtatggttaaggttatattaattgaagtaatttttgtttttggaaatttttatgagagagatttgatatgaataaaatttattaattttattagagtatataaagtttgttaaatttattaaatttataaaatgaggtgatttaggtcgtttgtgggaatgttttggtaaagaagggaaaaaatgtgttagtaaagggttatttgaatgtatttaaaaatatttatggttatattttagtataaaatgaatttttaaatttattttggttatttttaaaattttttttttaaatcgtaattttgagtttaaattttttagataatttaggtaaaagatagtagatttgatatagatataatgtaatttaaaatgtaaaaatttataaagttaagtatatttttttttgaattatatatatgaagatcgaaatatgaaaattgtttgtttttttattgggattagaattttatttgttgttataaattttgtataaaaaatatagttatagtatttagtaaaaataaattgtttggttggagaaatttttttaagttataaatacgaagtttttcgggagttaaatagaaaagtagttttgttaaagaaatataagtttttatgaagagtagggattttgaatataaggtaatgtgaaagtgttttgttattttttatttgaatagatttttatagtttgttataatttttgtgatatatatatagggatataaaattattatagttatttgaattttatttatatatttatttaaattaaaagttagtttgtattgtatttgattgtatgagagttgtttttatgtatttttatttgaggtttatagttataagatttttaatgtttgtggttaggttatgtggtgtatgatacgtgtttttcgggtaaagtattattcgttgttaagtgttttttagagtttaattaataaaagatatattattattgtttaataaattaaattttattttatttgagtatttgatttttattagaaagtttttatgagttattgtattaagtagtaattttaatataagatgtttaaataaggttgtttttgttggttataaataatattatttttttataaaatataaatataatttttttttttttataaggatattttagaaaagatttttggagattgttttattatagatgatataagaatgttaaagtttttttaaatttagtaaattttgtgtatcgaagaagtatgtttttttgttattgttgatcgtttatagtaaatattgtgtaaatatgtgagtattattttttaaaatttattagttattttatataatatgtgaagtagggtagaagtaaagtatagtaaaaaaataagagttgttatttatggaataattatatattttgttaattattttacgtttttataataatttttataatagttatttgatatattagaaaaatgagttttagattaatttattgaagtgatattaggattatagaaaaataaattttgaaatttagatttaagtatttttttttgtttaaaaaaaattataggtggggagtgagaaaaaaattgattttttatagatgatatgtaattgttaattgggattgtttttataataagttattataattttgtatgaaaattaatagagtttttgatttttgtgaaattgtggttagatatttaggttgaatatataggggtaaaattgatttatgatagttagattaaaattaaatgatatattttaaaataatgttattgtaatgaaattttttaggtagtatatgatattgtgaaatatttgttatatttttatttgtattgataaataaggagattatgaaataaagatggatgattaattttaaagtatagttgtgtttttgttgagtgttagaggttgttaggagttaacgtatttttttagattagaagataaatgaattttattttattaaaggttggaaggaaatgtattattttattagatatagaaagttaggatgtatgaaagttatgtgaaaaaatagtttgtttataatattgaaatattttgtttttagaaagaagtatgatattaatgaaaaaaaaatttagaaggatattttaagttatttttatatggttataatagtttaaattttaaaagtatttttaaattaatgagggagttagtattttgaaagaattttgaaaaaattttttaagttaaaaatatttttaatgtgatgattttttttattttaaggtaaaattatataggaatatatataatattttgaaaggtattgtttaaaaattttttacgagaaaataaagatttattgaattttttattaaaagtaaatttggtttgaaatattgggaatttaaaattttaaaaagaatatttatttttttaaaatagagttattaattaaattttttattttttatatatatatacgtatatataaatttgataataattaaaaaaattttttgtattatattagttattataaaaggattttaaattatttttgattatataaaattgaattgttagtatttaaaggagagaattgatgtaaatttttttagtagattattgtaaatataataagattttaattttgattagaataaatttattagatatttaaaaaaagaaattttaaaatttaaaatataataatatttaagtataaatgtaattttttttttaaagtatatacgatataataattatatttatgaattaatttttaatatgtagatataaaaatatgaatttatttgaagtggaataagaagttaattgttttaaataattattaaaataagaaaataaaaaatgttaaagagaggttaagagatatagaggatagagtgagtggtgtaaaggtaatatttggggaatatatttgaagaatttttaagaattattgaaaggtattgtattagttttttatagttattataataaattattataaaatttagtggtttaaaatagtagatttattgttttatatttttggaggttagaagtttaatattggttttatagggataaaatgaaagtattggtaggtgtatttttttttggaggttttaggggagaatttgttttttattttttttagtttttagaagttatttgtattttttgattcgtggtttttttttgtatttataaatttagtaagagtaagttgaattttttttattttatattattttgattattttttttgtttttttttttcgttttatgaatttttgtgattatattgggtttgtttaaataatttaggataatttttttattttgaggtttgtggattggtaattttaattttatttataattttaatttagattattataggttttggagattaagatatttaagatttttggggagttattgtttgtttattatagatattaatttatagatttacgaggtttaataagttttaagtaggataatttttaaaatatatatatatataagtagatatattataattaaattgtagaatattagagagagagagaagatatttaaaggaattagatagagaggatagattatttttaagaagaaagagaagtagataattattaaattattaatagtattaatgaaaattaggagatattagaatgttgtttttaatgtgttgagagaaaatatttgtgaattaagtattttatatatattttgtaaagatgttttttaagtataaatttgaaatagagattttttagaaaaattaaaattgaaaatttattagtaaaggatttttttaaatgatatttttaaaaatttgttttaattagaaaaaaattgattttagataaaatttgagatgtaagaagggatgaagagtaaagaaagtatggtggagaaatatattggtttttaataatagtgttttgtggagttaggtataaagtgtataaaaaaaaaatattaaaaatggtgttataaggaattttgtggtatagtgaaaatttggatattatgtttggttaatgataaaaatagtttaataaattatggcgtattaatttaatagaattttatgaagttattttaaaataatattataaaagtgtgtattttgtatagtttggtatatgtaaatatgtaaatttgtaaatatagta

SEQ ID NO: 1273 - DNA, 6220 bp, Artificial Sequence
  chemically treated genomic DNA (Homo sapiens)
  unsure 920, 1012: n is a or g or c or t
tgtttattcgttttttttaggagattgttcggagttttatttagattataggagttttggaagattagatgaattagttgaagtagtatgagtataatattattaattataagaataatatcgataagttggagggagattattagtttatttaggaggtttttgtttttgataataagtatacgaattatacgatggaggtacggtagttagataggcgtgtgtcgtttattttttacggggattatgttatttttttagggtgttttttttatgtatttgtttttttttgtttttgttaagatttataagtatgaaagttagggatttttaagtttttttagttattatttgtggaaatgtttcgtgagttatatcgaggattatatggtattattaatagtgatattattattattattattattattataaatttattatatttttttaaggtgagtgttagaaattggattgttgtatttttgttagttaggtttaaattgatttttttgggagttagtaggtataatttagggtttattttgttatttggtaaatgggaaaatatttttagtgataaataagagtatatattgtagagtgttcgttgttattgttagaattttgataatatattgtagagtatttattgttatcgttttatcggtggtaattgattttatattgtagagggttcgttgttattgttagaattttggttatagagtatatattgtagagtgttcgttgttattgttagaattttggtaatagagtatatattgtagagtgttcgttgttattgttagaattttggtaatagagtatatattgtagattgttcgttgttattgttagaattttggttatagagtatatattgtagagtgttcgttgttattgttataatttggtanatagagtatatattgtagagtgtttgttgttattgttagaattttggtaatagagtatatattgtagagggttcgttgttatcgttagaatnttggttatagagtatatattatagagtgttcgttgttattgttagaattttggtaatagagtatatattgtagagtgttcgttgttatcgttagaattttggttatagagtatatattgtagagtgttcgttgttattgttagaattttggtgggtgtttgtgagtattttttattatagaattttgtaatagatgataaagtagaatttttttttaagtgtggggaaggttattatgagttttgtttagtaagttttttgagtcggttgtattgttatgaaagtaaagaggtagagttgatatgttggagagatttagaattgattttttttttttttttttaatagtatattcgtgttggatgggagttgttgttgataattatcgttagaattattaatgaggtggagatttacgtatttagacgagagatgcgaagggtattatttaggagtagatgaatgagtttagagttttttttaattattttgatagggtattattttttatttatttgaagggtaatattggggatattaaataatgtatttgaaataatatgtatgttttcgttttaagttttaaggttttataatatttatagggaaataggatagttaattttaaaagaaaatagtttttaaaattaagtgttttaagttttgatgttgtttaaggtgatataaagtttaggtttgtgtgttgttttatatagattatttaatagaatgtatttgtagttgatattaaagttgatttgttttaagttaaagtgtttgtttataaaatgtgattgttggttttaggtttttcgtaaagatttaaataaaatttttatatattttttaagtattgaatgataaagatttggttataatttaatttttttttaatatataaagtttagttttttgttttaattataaatagtgtatatttttttaaggttattataataaaatgggattttttaggagttcgtaataaagtaaaaaggtttaggaatttttaaaaatatttttttataattaaattaatttgtaataaatttatttttaaatagggttattttggttatattttttttttttttttttttttttttgagtttgagtttttttttgttgtttaggttggagtgtagtggtttaatttttatttattgtaatttttattttgttaggtttaagcgatttttttatttttgtttttatttgttgggaggataggtatgtgttattatattcggttaatttttgcggtttttttttttttttttttttttttttttttttttttgagacggagttttatttttgttgtttaggttggagtgtaatggtataatttcggtttattgtaatttttttttttcgggtttaagtgatttttttgtttcggtttttcgaatagttggattataggtatgtattattatattcggttaattttgtatttttagtagagacggcgtttttttatgttgggtaggttggtttcgaatattcgattttaggtgattcgtttattttagttttttaaagtgttgggattatagatgtgagttattacgtttggttaatttttgtatttttagtagagatggggttttattatattgtttaggttggtttcgaatttttggttttaagcgatttattagtttcggttttttaaagtgttgggattgcgggtgtgagttattgtattcggtttaaatagggttatattttgaagtattggaagttagggttttaatatatttttgagggggatatattgtaatttatatagtatttttggaattgtaaatcgcgtttttgtattagaaatttattgtttttttaggtattatgtatttttttaattttatttgttatttttttacgattttaagaaatatagaatttggttagttttagttgagagagtaaattttgatgatttgtattaaatagggattggtatataatttttggaatttttagtaagagaatgtgaatgggggatagttgtcgattaggtgtttgaaagattattttttaagaaatacgttaataaattttgagggatatatgataattaaaaaattagttttaattcgggaggcggaggttgtagtgagttgagttaagatcgtgttagtgcgttttagattgtgcgatagagtgagatttcgttttaaataaataaataattagtttttataattttttttttttttttttagataggtgtatttttatatagttaaattttattatttttttttttgtagataaaaatttaggagttgagaaatgaataaatataataataaatatgagaaaattattatgatttattaagtttggataaataatttaataagtttagtatagaagattttgttttttttttttttttttttttttttttttttttttttaatttatttattttaataggtttttggggagtaggtggtgtttggttatatgaataagttttttagtggtgatttgagagtttggtgtatttattatttaggtagtggatattgtatttaatgtgtagtcgtttattttttatttatttttattttagtttttataattttaagatttttggttatttagggttattttattttttttttttttttttgttgtatttttttttatttattttattttttttattttttaagtaagattatttttggtaagatggttttggtaagaatgtgatacgtattataataattttttaaatttttaaaattgaggtataattatatataataaaatgagaatggtatgtaaatttgtgttttttttaaagtttagtaaatgttataatttggttatagtttttatttttttggatgtatttgtttttttttatatttattatgtttagttttatagagatttttttagatgaatttgtttttttttatatttattatgttcggttttatagagttgttttttattttagaattttttaaagtgttgtgttgtatatagggagttttttttgattggaataattttatttggtattattttttttttaggatttagatttttttttgaaatttttttttggtttttttgaatattttagtttttttaaaatgtatgtggtttttttttttttgtttaattattaatttaattaggttgtgagttttttttttaaggacgtgagggtgcgatgtagtttgtttgattttgtattttaagtgtgtgttttaatgtttgatatatagtaggtgtttaatatatgtttattgttaataagttataattaatatttttatatggtaatttagagtttttatagcgcggttaaacgattttatttaacgtttattataattttaaaaaattttaattattattattttattatttttgtttgtagagtgtggagattgagaggttaattgttttgtttagcgtaagttaatagtaaaacggaattaaaattttaggttcgatattatatagcgtgtcgagattagtacgaatttggcgttgtgatttttttttagaggggttatttaggtttatattttcggattttgggtatatagagacgcgaaaagttttcgcgggaaattggggagcgggattatattttttagagagtttcggggttaaatagtaggtgattggttgatattgatagttaatgcggttgcgaggagttcgggtagattaattataggtcggaaggggcgggattttttacgtcgaggatagattgagcgtagaattaatcgcgttttgaaaggttttaaatgtttgcggggtttagagtcggatgttacgtcgtttttttttgtcggtttttttttgggttttttttcgtgtcgtttcgcgatttcgtttttggtcgcgcgtgtttggttgttaggtcgatattaaggattggtcgggtattcgggaagaaagtacgtgttttagtagttgtcgcgtttagtttcgagagaggttttagggcgttgcgggttttcggggttcgtagttttttcgcgacgcgagttaacgggaggcgttaaaagattcgggttttgtgtggtaggttcgtttggcgttggttggcgtggtttttggtcgtcgttatttgtggagagtacgttttttttgtcgcgttttttgcgtaaggaggagattcgataatatgttattcgcgttttaagatttgtcgtaattcggtaacgttgcgatttcgtttgcgtggttgggttgtgttttttaattcgtgttgtggttttttaatttttggggcgatttttttttgcggcgggagacgttcggcggtgttttttcgcgtgtgggcggtatttttagaatttagcgtaggagttcggagggttacgtgttttgttttattttttgttcgatttttatttttttttttttaggtaagttattaaaatttgtaaaaagcgtttttttttcgttttcgaaatatatttttaacgttatagtaattaaattttttagttttacgtagtataaattagttgggttttttggaagtttttttttttgtatggtgtgacgtttattcgtaaatatgtattgcgtatttattgcgaaagaaagtttaggcgcggagagatagacgaggaaatttagagaattatttaaaattattatatggaattttttattttttgtttttacgtacgttgttgtaaaattgtaatatgtatagatttattatgttaaaatagatgagtagattttatttttagatatcgaaatgggaggtagtaattttaagcgattttgatgttggtggttttgggattaatagtgagaaaaagttagtttagtacgagaattgaacgtaatgttagttttataacgagttttagatttttaaggttatgtttgattataatttgaggataaatatattcgtaaaaacgggtgaggagatgtagaaacgagaattagtgataagtataaaatagtaaatattttattatatagtggggatgtttagttttaggaagagggggaatattaaattcgtaacgtataaggaaatttattagaggttaatcggtgatttttttgatttttgggttttgataacgggattgatataattgtttttgaaattagtggaattgtggttgagaaatatattattgttgttattaaataagatataaatttttttatgagaggtttatatgttat

SEQ ID NO: 1274 - DNA, 6220 bp, Artificial Sequence
  chemically treated genomic DNA (Homo sapiens)
  unsure 5209, 5301: n is a or g or c or t
ataatatataaattttttatagggaggtttatattttatttaataatagtagtgatgtgttttttagttatagttttattagttttaagaataattatattagtttcgttattagaatttaagaattaagagagttatcggttaatttttgataaatttttttgtgcgttacgaatttagtattttttttttttttgaagttaaatatttttattatgtgataggatatttattgttttgtatttattattaattttcgtttttatatttttttattcgtttttacgggtgtatttgtttttaaattataattaggtatgattttagagatttagagttcgttataaagttaatattacgtttagttttcgtgttaaattagtttttttttattgttgattttagggttattaatattagaatcgtttgaaattattattttttatttcggtatttggaggtggggtttgtttatttattttaatatagtgagtttatgtatattgtagttttgtagtagcgtgcgtagaagtagaaaataaaaagttttatgtagtagttttaaatagttttttgagttttttcgtttgttttttcgcgtttgaattttttttcgtagtaggtgcgtaatatatatttacgaataagcgttatattatgtaaaaaaaaaaatttttagagggtttagttggtttatgttgcgtggaattggaaagtttagttattgtgacgttaagaatgtgtttcgggggcgaggggaggacgttttttgtaggttttgatggtttgtttggggagaaagaggtgaaggtcggataaagagtggagtaaaatacgtagtttttcgggtttttgcgttaagttttaaaggtgtcgtttatacgcggggaaatatcgtcgggcgtttttcgtcgtagaagggaatcgttttagggattaggaggttatagtacgagttaagaaatataatttaattacgtagacggggtcgtagcgttatcgggttgcgataggttttggagcgcgggtgatatgttgtcgagttttttttttgcgtagagggcgcggtagagaagacgtgttttttataggtgacgacggttaagggttacgttagttagcgttaggcgagtttgttatataaggttcgggttttttgacgtttttcgttggttcgcgtcgcggggggattgcggatttcgaaagttcgtagcgttttagggtttttttcggggttgggcgcggtaattgttggagtacgtgtttttttttcgggtattcggttagtttttggtgtcggtttagtagttagatacgcgcggttagaggcggagtcgcgggacggtacggaaaaggatttaagagaaaatcggtagaggaggacgacgtgatattcggttttgagtttcgtagatatttagaattttttagagcgcggttagttttgcgtttaatttattttcggcgtgggaggtttcgtttttttcggtttgtgattggtttgttcgagtttttcgtagtcgtattggttgttaatattaattaattatttgttgtttagtttcggggttttttgggagatgtagtttcgttttttagtttttcgcgggagtttttcgcgtttttgtgtgtttaggattcggaagtgtaagtttaagtggtttttttaaggaaaagttatagcgttaagttcgtgttgatttcgatacgttgtgtggtgtcgagtttgaaattttagtttcgttttgttgttgatttgcgttgggtaagatagttaattttttagtttttatattttataaataagaatgataggatggtagtaattagaattttttagggttgtagtaggcgttaaatgagatcgtttgatcgcgttatgaaaattttgaattattatatgggggtgttaattgtaatttattgatagtaaatatatattgagtatttattatgtgttaggtattggggtatatatttggaatgtaaaattagataagttatatcgtatttttacgtttttggaggaggaatttataatttagttagattaataattgaatagggaaaaaagaattatatatattttaaaagagttagagtatttaaaggggttagggaaaggttttaaagaagaatttgggttttgaaggaagagtggtattaggtaaggttgttttagttaggagaagttttttgtgtataatatagtattttagggaattttaaaataaagggtagttttgtaaggtcgagtatggtagatgtgagaaaaagtaaatttatttagaaaaatttttgtaaggttgagtatggtagatgtaaggaaaagtaaatgtatttagaaaaataaaaattataattaaattatgatatttattaagttttaaaaaaggtataaatttgtatgttatttttattttattgtatgtaattatattttaattttgaagatttgaaaaattattataatgcgtattatatttttattaagattattttattaaagatggttttatttggaaggtggggggaatggagtaggtgagagagaatgtaataaagaagggagggaggaatgagatggttttaaatagttaaaaattttaagattataagggttagggtgagagtaggtgagggataaacgattatatattgggtgtagtgtttattgtttaggtgatgggtgtattaaatttttaaattattattaaagaatttatttatgtaattaaatattatttgttttttaaaaatttattgaaataaataagttaaaaaaaaagaagaagaaaaggaggaaagaaaaaaaagtaaggttttttatgttgaatttattaaattatttatttaggtttgataaattatgatggtttttttatatttattattatgtttatttattttttaatttttgagtttttatttgtaaaaaaagaagtagtgaaatttaattgtgtaaagatgtatttgtttaaaaaaaaaaaaaaaagattataagggttagttgtttgtttgtttgagacggagttttattttgtcgtatagtttggagcgtattggtacgattttggtttagtttattgtaattttcgtttttcgggttgaagttagttttttaattattatgtattttttaaagtttgttgacgtgttttttgaaaaatgattttttaggtatttagtcggtaattgttttttatttatatttttttattggaaattttaggagttgtgtgttagtttttgtttgatgtaagttattaaagtttatttttttagttaaaattgattaaattttgtattttttaaagtcgtaaaagagtaataaataagattagaggaatatatagtgtttaaaggggtagtgaatttttagtataaaaacgcgatttatagttttaagaatattgtatgggttgtaatgtgttttttttaaagatatgttgaagttttaatttttagtgttttagaatatgattttatttgggtcgggtgtagtggtttatattcgtaattttagtattttgggaggtcgagattggtggatcgtttgaggttaggagttcgagattagtttgggtaatatggtgaaattttatttttgttaaaaatataaaaattaattaggcgtggtggtttatatttgtaattttagtattttgggaggttgaggtgggcggattatttgaggtcgggtgttcgagattagtttgtttaatatggagaaacgtcgtttttattaaaaatataaaattagtcgggtgtggtggtgtatgtttgtaatttagttattcgagaggtcgaggtaggagaattatttgaattcgggagggggaggttgtagtgaatcgagattgtgttattgtattttagtttgggtaataagagtgaaatttcgttttaaaaaaaaagaaagaaaaaaagaaaagaaaaagaaaatcgtaaaaattagtcgagtgtggtggtatatgtttgtttttttaataaatggaggtagaggtgggagaatcgtttgaatttggtagggtgaaggttgtagtgagtggagattgagttattatattttagtttgggtaatagaaaaaaatttagatttaaaaaaaaaaaaaaaaaaaaaaagaatatgattaaaatgattttatttggaaataggtttgttgtaggttagtttagttatgagggggtgtttttagaaatttttaagtttttttattttattgcgggtttttgaagaattttattttattgtggtggttttaaaagaatatgtattatttgtaattaaaatagaaaattgagttttatatgttgaagaagggttaaattatgattagatttttgttatttagtgtttagaaagtgtatggaggttttatttaagtttttacgaaagatttaaagttaataattatattttgtgaataaatattttgatttagaataaattagttttgatgttaattataaatgtattttattaagtgatttgtatgaaatagtatataaatttggattttgtgttattttgagtaatattaaagtttaggatatttagttttgggggttatttttttttgggattaattattttgtttttttgtaaatgttgtggagttttaagatttaaaacgagagtatgtatattattttagatatattgtttaatgtttttagtattgttttttaaataagtagagagtggtattttgttaaagtggttgaaggaggttttgaatttatttatttgtttttgggtgatgtttttcgtatttttcgtttggatgcgtgagtttttattttattgatggttttggcgatggttgttagtagtagtttttatttaatacgaatgtgttattgagggaaaaggggaaagattagttttaagtttttttagtatgttaattttgtttttttatttttataatagtatagtcgatttaaagggtttattaagtagggtttatgatagttttttttatatttgaaaaaaaattttattttgttatttgttgtaagattttgtagtgagaagtatttataagtatttattagggttttaatagtggtagcgggtattttgtagtatatattttataattagggttttaacggtggtagcgggtattttgtagtatatattttattattagggttttaatagtggtagcgggtattttgtagtatatattttataattagngttttaacggtggtagcgggttttttgtagtatatattttattattagggttttaatagtggtagtaggtattttgtagtatatattttatntattaggttataatagtggtagcgggtattttgtagtatatattttataattaaggttttaatagtaatagcgggtaatttatagtatatattttattattagggttttaatagtggtagcgggtattttgtagtatatattttattattagggttttaatagtggtagcgggtattttgtagtatatattttataattaaagttttaatagtggtagcgggttttttgtagtataaaattaattattatcgataaaacggtggtagtgggtattttgtagtatattattaggattttaatagtggtagcgggtattttgtagtatatatttttgtttgttattaaaaatatttttttatttattaagtagtaggatgagttttgagttatatttgttggtttttagggagattaatttgggtttaattggtagaaatgtaatagtttagtttttggtatttattttgaagaagtgtagtgaatttatggtggtgataataataatgataatgttattgttggtaatattatatagttttcgatatagtttacgaagtatttttataaatagtgattggaaaggtttaaagatttttaatttttatatttgtaggttttaataggaataaagaaagataagtgtatgaagaaagtattttgaggaggtggtatggttttcgtgagaagtgagcggtatacgtttgtttggttgtcgtatttttatcgtgtagttcgtgtgtttgttgttaaagataagggttttttggatgagttgatggtttttttttagtttgtcgatgttgtttttatagttgatgatgttgtgtttatattgttttagttggtttatttggttttttagggtttttgtgatttggatggagtttcgggtaattttttgaggggggcgagtgagta

SEQ ID NO: 1275 - DNA, 6609 bp, Artificial Sequence
  chemically treated genomic DNA (Homo sapiens)
taaatatttttattataaaataaaatgatagatatggaggtaatatatatgttaattggtttgatttagttattttataatgtatatatattttaaaataatatgaatataataagtatatataatttttgttaattagaatatataaataaaaatttaattttatttttagattaaagatttaaataaaatttaaaagatattatttttaaaaatgtaaaatatttatgtttttgagataggaatttcggaagttataaaagatagattcgattatagaatatttaaaaatatattataagtaatattaaaaagtaataaaagagtataaatcgggaaaatatgtataatatttataatagttaatatttgttttataatgagtttttaaagataaattatttaatagaaataaattaaggtgtagaaaggtaatttaaaagaaatgtaaatggttaatatatatttgaaaatatgttaaattttattaatgtttattaaaatgtaatttaaatatatgatatgatatttttttttatgtagttgagtaatataaattaaagagattattaatatattgtaatagaagtggaggagatatggttatttttatttattgttggggaaatgtgatatttgtaattattagggaaaaaaaatttgttagtatttattaaaaattaatttattaattatatttttgggaatttagtttatatatgaaaaaaattaaaaaggttttagtatgataggatttgtaagaatgtttattatagtattttcgatagagataaaagttgtaaaaatttttaagtgtattaatagtagaataaatattatgaaatattatgtttttttaaaaagaatgtatgtgatttgtatgtattggtttcgagggatggttatgatatattgcgtataaaagtaaattgtattttgattagtgagttttattttttgaaaagagaaaaaaaatagatagtgtttatgtatttgtatatatttgggcgtagaaattgtttttaatattgtttttttagaaatggtaagagatcggggttaattattatttatttttatataatttagtattgtttaagttgttttaaaaaaggggtatttttttatttttattattttattttaaaaattagatattttaaattatgatttagagttaagtagagagaagtagagagagaatgttatagtttggtgtgttatttttgattttatataaggaatgtgataggtaataggataaatttttataggtttttatgggaagagcgaattttagataaattaaattttattagataaaagtgaaatttttggtttggtttaaaaatatattgtatttgtaaataatttaggtatttgtttagtttagatatttatattttgataataaatagttatgggaaatttagtagtaaatttagtattaaaattttgtaaaatttttagagagaatggagaaatattgtaatttatatgtttgtagtatttgataaaattttttaagaaattttaaatagtaggaaattgtttttttaagaataagaatataaaaatggggtttatttattaaagaaaagtttatttggtggtaattgattttaagtaaatgaaattttgtttttttaggttattgagatagattagaagtaaaggaatttaaaaggaaattgtatttatggggaaataaagttatatatagtttatgtttttattttatagaaagggtattttaggattgaggttaagaaaagttgggttagttgtgttcgatttaatgtgtttaaatgagattttttatttgaaatagaaagtattttagttatagttacgtttgaattgaggtatgtatgagagaatattatgaatatttaatattaatttatatattttagatagaagtattttatttttaaatgatattatgaaatgaatttgttagaattaattatgttttttttttgttattaatgaaattgatttttaagaatttaagtttttagttatagaatataattaaaagagataaaatatgtttatagaattagtggaaattttttttaattatggagtttcggaaatttgatatatttgggtggttttgaattaagatgaataatattatttttttaaaaaaaaaaaaaaagatatagttgtttatttattaaaagttttaatatgttaatgtggttatttttattgttattattatattttttaagaatgttgtaattttttagataaggtaaaagttagtttatttgagatagtttttttttttttatatgattttttagtatgttttaattgtgtttatgttagtatttgttaattttaggttttattttcggattattatggaagaaaaattaaaggtaatatattgtttttatatgtgatttgaaattattgttagtttaaaggttatttttttttaattgttagaatttataattaatttattttgtagtcgttgaaggaaaagaggtttgaatatttttgttagaaagttgattggatggtatttattaagtgaatatgaatgaagaagttttaataatgatttgggtggaaaataattgaaatgagtgaatagtacgttttttagttttttaaataaagtagaggtatttggtggtaaataattgagttttttaaatggttttattaaggtagaaatttgacgaggtgaaaatttttttgtttggtaaataaaagtttttgttattgtattgaggatgggttttgaaagaattagttttttattgtagtattttatgattttgtagataattttaggatttaacgtgaggtatatcgtagttatacgatgttttagggtttttgtaaaaaatgtgttatggtgtttaaaatatatgaacgtttttaagatttttttaagtttttcgttagtgaaatgtgggatatgttttacgatatatttgtttaattttataattagaggaaatgtttgattttgattaagaattattagggtagtgagtatttggttaattaatttaggatttaggttggaaattattgatagggaaaagttgtttattttatttaaaaatgtttggtgtttatttatttttttagtatatgtttgtaagattttataaagggttataatatttttcggggtaaatgtttttaattttttattttgaagttgatttataatgagttttagtgttatataatttgaattgtgtagtgtaattagattttttttaagaatataaagattgcgaatttttatgttattttttttgagacgattttggtattttgttattaggtttagtaataggttattttgaggatttatatgtaatagaattagagtttgtaaagtagttattaaattagtgtttgatagttgtgagggtttttttttaaattgaaagtataaagtttgaaagatgttattttttagtattttttttggtagtttttgattattattttttttttttattttataaattcgttgtaaagtttttgttgttatagtgttaggtagggtttttatcgtgtttataaaatttagtattttttttgatgaagttaagttgtttagttttttgtaaaatatttgattttttttatttttaatattttgtttaagtttgtcgtagttagatatttgagagaatattggtttatcgagtggatgaaggttatttttatttttcgaatgaaattttttataatgggtatgatggaatttgatttcgaaaggtttaggttgtcgtgaatataattaagggtatagacgttttttgattattttgtgaatatgatttagaggtttattttttaaagtagttagagttttatgtatttgaaaattagataaacgataaaggtttttttttaaggtgattaatgttatattattagatttttaatttgataattaaattaaaaaatttaaaaatatatggttaaatatattgagaatatgattgatttaatattaatgtttatgaaattataaacgagtatttggaaaaaaaaaaaaaaaaaaaaaaaggatggttaatatataaatattagaggggtaaagtttttgtattttagagttagaagagtggttgatattgaataataataatcgttattatttgttaaatattgttgtaggtattttattaatttatatagatttagtatttttattattattttatacgaggaagaagttgaagtataaagttattttgtttagtttatgtaggtggttaagtggtagagttagggtttaaatttaggtaatgtagtttttaagggtggtttttaaatgttggttgaaggaagaaattgtatttggatagaaattaaagaataggtaaagtgggtaaaattaggcgaggttagagtaaggtaagggtaaaaacgcgttggaaaggttttaagttgttggttttttttcggtgtcgggagaaggttagtgttgaaggaaagggtttattttgttaatggaaataaggtaggaaaagaaaaagtaaaatatagattaatgaagggagaaggtggggcggttagtttagatttaaagacggtgcggggggatttggtaatacgtgtgtgtaagatagatagacgggaggtttcgcggcgcgtttttttaggaatgaaagggattcgcggggcgagtatttttaaattcggcgtttcggggatttgcgttgagatacgggtcgggcggcgtagtttgaggagaaagtcggttaggtttttgatatttagtcggattaattgcgcggagatttcgcgttgatatttatcgcgttttgtcgggtaattatttcgggtggtcgcggaagcgtttgggcgtcgtgggttttcgtagtaaacgcggggcgggagtacgatttagggcggcgtaatgtgattggtttaggtttttttcggagttttttattggttttgggtatcgagtatgggcgttgcgttagtgcgcgttggcgtaaggttggtggaagtcgcgttgtgtaggttcgtgttcggttggcgcggcgtgggtaagttgtttgtcggttacggttttcggatttcggtcgttcgttttgtattaattttttgggagaggcggttcggggcgggggtgggtagtcggtttgcgttcgtggtttttacgtttttcggttttcgggggtcgtcgcgggcgcgggttggggttcggatttggtttttggtttttggttttggtgttttcgggagcgtgtttttgggttcggcgtcggtttttgtcgcgggaggtttttgggcggcgtggggtttttttttatgttttgtttttggttttaggcgttttttaggtttagggaaatcgtattcggggacgcggggaattggggaatatgtcgggttggggcggcgcgtttcggggaattcgggacgtttcgagcgtttattcggcgggacgcggtcgtgagttttgttcgcggtcgtgagttttgtttatcgttttcgcgtcgttttcggggttgttggggttcgggttttcgttgagagtcgtgggaaggtggtgtcggattgtggggtagtagtagggatgaggggttgattgattttgggaagtttttaggatgtgtgttttatgggaagtgatagaaattttagttgtagtaaggtttttattatcgtttttatcgttttttgtgagttgttaatgtgtagtgtttttatattgtttatttatttatttagataatttatcgagtattagttttatgttaggtgtcgttttgggcggtttatttatcgaaagttaagtttttggtttgggttttagtttaaatttgtttttgtaaattgatagtttattaattttagtcgttagatgagtatggaaaaaaatttgtgagtgtcgtttgttttattattgtttattttttgcggaaaaacgtgttagtaaaatgtttaagtggattggaaatattttttcgttatatgtattcgtttgtatatatgtttatatatttatatatttttgatttgtattaaataatgaaggagagtatgtgttttagttatttttagtattatgattagtttgtttagcgttaggattaaataagaattaagaattttattattttaatatagtttttatttttatttttttttaaaaagaggaaattaaaagttatttaagattgttgtgaatgatattgtggtttaagttttgtttaggtttttggtttgtgttatatcgttttttaggtaggtggtaatatttttatttttaggataaaggagttgtggtacggattatttggggagtttgtttatagggttgtatttaggaaatatagatttaagtttaagtagtttcgagtcgattatttgatttttgagttatggaattagagttttattcgtatattttttttaatttgatgaatttttatttaggtttatttgagattagtgttgaaaataaatttagaaaaggttattttatattatgtgtgggtattgttgtattgttttttaaagattgagggagaattaatatttttaggttgttattgttttattaaaaagaggatttttttttttttattttttagt

SEQ ID NO: 1276 - DNA, 6609 bp, Artificial Sequence
  chemically treated genomic DNA (Homo sapiens)
attgaaaaatgggggaaaaaagattttttttttaatgaagtagtaataatttaaagatattaatttttttttaatttttaagaaataatgtaataatatttatatataatatgaaatggttttttttaaatttgtttttagtattaattttaaatgagtttaaataagaatttattaaattaaggagagtgtacgaatgaaattttaattttatggtttagaaattagatgatcggttcgaaattatttgggtttgaatttgtgttttttaagtgtaattttgtagataagttttttaaatgattcgtattatagtttttttattttaaaaatgagagtattattatttatttgaaaaacgatgtggtataagttaagaatttgaataaaatttgagttatagtattatttataatagttttaaatagtttttggttttttttttttaaaaaaagataaaagtaaaaattatattaaaatgataggatttttggtttttatttgattttaacgttaaataaattaattatagtattaaaggtaattgaagtatatatttttttttattatttaatgtaaattaaaaatatgtgagtgtatgggtatatatataaacgggtgtatataacgaaaaaatatttttaatttatttaaatattttattaatacgttttttcgtaagagataagtagtagtaaaataaacgatatttatagatttttttttatatttatttaacggttaaaattggtgggttgttaatttgtagagatagatttaaattgaaatttaaattaaaagtttggttttcggtgaatgaatcgtttagaacggtatttggtatgaaattggtattcgataagttatttgaatgagtgaataaataatatgaaaatattatatattgatagtttatagaaaacggtggaaacgataatgaaaattttattatagttaaaatttttattattttttatgaaatatatattttgagggttttttaggattaattaattttttatttttgttattgttttataattcggtattatttttttacgatttttagcggaggttcgggttttagtagtttcggaagcggcgcggaggcggtgggtagagtttacggtcgcgggtagaatttacggtcgcgtttcgtcgggtgggcgttcggaacgtttcgggtttttcggagcgcgtcgttttaattcggtatgttttttagtttttcgcgttttcgagtgcggtttttttaggtttggaaagcgtttagaattaaaggtagaatatgaggagagattttacgtcgtttaggggtttttcgcggtagaggtcgacgtcgagtttaaggatacgttttcggggatattaaagttaaaggttaaaggttaagttcgagttttagttcgcgttcgcggcgattttcggaggtcgaagggcgtgggaattacgggcgtaagtcggttgtttattttcgtttcgggtcgttttttttaggagattagtgtagggcgagcggtcggaattcgggaatcgtagtcgataggtagtttatttacgtcgcgttagtcgggtacgaatttgtataacgcgatttttattaattttgcgttagcgcgtattgacgtagcgtttatgttcggtatttaggattaatagaaagtttcgaaggggatttgggttaattatattgcgtcgttttgagtcgtgttttcgtttcgcgtttgttacggaggtttacgacgtttaggcgttttcgcgattattcggagtgattgttcggtagagcgcggtaggtgttaacgcggggttttcgcgtagttggttcggttgggtgttaaagatttggtcggttttttttttaggttgcgtcgttcggttcgtgttttagcgtaggttttcggggcgtcgagtttgggggtgttcgtttcgcgggttttttttatttttaggaaaacgcgtcgcggggtttttcgtttgtttgttttgtatatacgtgttgttaaattttttcgtatcgtttttagatttggattggtcgttttattttttttttttattgatttatgttttgttttttttttttttattttgtttttattgataaagtagatttttttttttaatattaattttttttcgatatcgaggggaaattaatagtttagggtttttttagcgcgtttttatttttgttttgttttaatttcgtttaattttgtttattttatttgttttttgatttttatttaaatgtaatttttttttttaattaatatttaagggttatttttaagagttatattgtttgagtttgaattttagttttgttatttaattatttgtataaattgggtaaagtaattttgtgttttaatttttttttcgtgtaaaatgatagtaaaagtattgaatttgtgtaagttaatagaatatttataatagtgtttagtaagtaatagcgattgttattgtttaatgttagttatttttttaattttaggatgtagagattttgtttttttggtgtttatatgttaattattttttttttttttttttttttttttttagatattcgtttgtagttttataaatattgatgttgggttaattatgtttttaatgtatttaattatgtgtttttaaattttttaatttagttattaaattgagaatttgatggtatggtattaattattttgaggaagaatttttatcgtttatttgatttttagatgtatagagttttggttgttttaaaaaataaatttttaaattatgtttataaggtagttaaggagcgtttgtgtttttggttgtgtttacgataatttgagtttttcggggttaaattttattatgtttattgtaaaaagttttattcgaaaaatggaaatgatttttatttattcggtggattagtgtttttttaagtatttgattgcgataggtttgaataaaatgttaaaaatgaggagagttagatgttttataggagattgagtaatttgattttattagaagaagtgttaagttttataagtacgatggaaattttgtttgatattatggtagtaggagttttataacgaatttgtgaagtggaaaaaaaggatggtgattaagggttgttaaaagaaatattggagaatagtattttttaagttttatgtttttagtttgaaaaggagtttttatagttgttaaatattagtttagtgattgttttgtaagttttgattttgttgtatgtggatttttaaagtagtttgttgttgaatttggtggtagaatgttaaaatcgttttagaaaaggtggtatggaagttcgtaatttttgtatttttggggaaagtttgattatattgtatagtttaggttgtgtgatattagaatttattataaattaattttaaggtgaaaaattggaaatatttatttcggaggatattgtggttttttatagaattttgtaggtatgtattgaaaaagtggatgaatattaaatatttttaaataagataaataatttttttttattaatagtttttaatttgagttttaaattgattagttaaatgtttattgttttggtggtttttgattaaagttaagtattttttttgattataaaattgggtaaatatgtcgtgaggtatgttttatattttattaacgaggagtttaggagagttttggaggcgtttatatattttgggtattatgatatattttttataaaagttttagagtatcgtgtagttgcggtgtgttttacgttggattttgaagttgtttgtagggttatggagtattgtagtagagaattgatttttttaaaatttatttttaatgtagtggtagaaatttttgtttgttaaatagaaaaatttttatttcgttagatttttgttttaatggaattatttgggaaatttaattatttgttattaaatgtttttgttttatttagaaagttggaaaacgtgttatttatttattttaattattttttatttaaattattattgaaatttttttatttatgtttatttaatgaatgttatttagttaattttttggtaaaaatatttaagtttttttttttttaacggttgtaaggtgagttggttataaattttgatagttggaaaaaagtaatttttgaattggtagtggttttaagttatatataaaggtaatatgttgtttttagttttttttttatagtgattcgaagatgagatttgaagttaatagatgttggtataaatatagttaaagtatgttaggaaattatgtagagggaagaaagttgttttagataaattgatttttgttttatttgagaaattgtagtatttttaggagatatggtaatggtagtggaaatagttatattaatatgttagaatttttgatgagtgagtaattgtatttttttttttttttttgagaggatggtattatttattttaatttaaggttatttaaatatgttaaattttcggaattttatagttaaaggaaatttttattaattttgtgaatatattttattttttttaattgtattttgtagttaggagtttgggtttttggaagttaattttattggtggtaagaggagggtataattaattttaataagtttattttatagtgttatttaaaaatagaatatttttgtttggagtgtgtaaattgatgttgaatgtttatgatgtttttttatatatattttaatttagacgtaattatgattgggatgttttttgttttaggtaaagaattttatttggatatattgagtcgggtataattgatttaattttttttagttttagttttggaatgttttttttataaggtaaaagtatgaattatatgtggttttatttttttatgggtgtagtttttttttaagtttttttatttttgatttgttttaataatttgaaaaagtagaattttatttatttggagttagttgttattagataggtttttttttgataaatggattttatttttgtgtttttgtttttgaaggaataattttttgttgtttaagattttttaggaggttttattaagtgttgtaggtatgtgagttatagtatttttttattttttttgaaggttttatagggttttagtattaggtttattattaggttttttatagttgtttgttattaaagtgtgaatgtttggattgaataaatatttaaattatttgtaagtatagtatatttttaagttaagttagaaattttatttttatttaatagagtttagtttatttagagttcgttttttttataaagatttataaagatttattttattatttattatattttttatgtagaattagaaatagtatattagattatgatattttttttttgtttttttttatttgattttgaattatagtttagagtatttgatttttgaaataaggtaataagaatggaaaaatattttttttttaaaatagtttagatagtattaagttatataaagataaataatagttaatttcgattttttattatttttaaaggaatagtattaaaagtagtttttacgtttaaatgtatatagatatataaatattgtttattttttttttttttttaaggaatgagatttattaattaaagtataatttgtttttatgcgtagtatattatggttatttttcgaggttagtgtatatagattatatgtattttttttagaaaggtatgatattttatggtgtttattttattattgatgtatttggaggtttttgtaatttttgtttttatcgggaatgttataataaatatttttgtaaattttgttatattagagtttttttggttttttttatatataaattagatttttaaaaatgtgattagtggattaatttttgatggatattggtagattttttttttttaatagttatagatgttatatttttttagtaatgaatgaaggtggttatgttttttttatttttattgtagtgtgttagtagtttttttaatttgtgttatttaattatatgaaagaggatattatattatatatttaagttgtattttaatgagtattaatgaagtttagtatatttttaaatatgtgttggttatttatattttttttgaattgtttttttatattttaatttatttttgttggatggtttgtttttaaggatttattgtaaaatagatattaattattatgaatgttgtatatattttttcgatttgtatttttttattattttttaatattatttatgatgtatttttaaatgttttgtagtcgaatttgttttttatgattttcgaggtttttattttaagagtatgaatattttatatttttaaaaataatattttttaaattttatttagatttttgatttaaaagtaaaattgaatttttatttatgtattttaattaataaaaattgtatatatttattatgtttatgttgttttgaaatatgtatatattgtagaatggttaaattaaattaattaatatgtgtattatttttatatttattattttattttgtggtaagaatattta

SEQ ID NO: 1277 - DNA, 6154 bp, Artificial Sequence
  chemically treated genomic DNA (Homo sapiens)
gtaaggagaagggcggaggttaggttgagtaggaggatgtggtatttggtaaggagaagggcggaggttaggttgggtaggaggatgtggtatttcgtaaggagaagggcggaggttaggttgggtaggaggatgtggtatttcgtaaggagaagggcggaggttaggttgggtaggaggatgtggtatttggtaaggagaacggcggaggttaggttgagtaggaggatgtggtattttgtaaggagaagggcggaggttaggttgagtaggaggatgtggtatttggtaaggagaagggcggaggttaggttgggcggaggatgtggtatttggtaaggagaaggaggtcgggtcgggtaggaggatgtggtatttgcgtaaggagaagggcggaggtcgggttgagtaggaggatgtggtatttgtgtaaggaaaaggaggtcgggttgggtaggaggatgtggtatttgtgtaaggagaaggaggtcgggttgggtaggaggatgtggtatttgcgtaaggagaaggaggtcgggttgggtaggaggatgtggtatttgcgtaaggagaaggaggtcgggttgggtaggaggatgtggtatttgcgtaaggagaaggaggtcgggttgggtaggaggatgtggtatttgcgtaaggagaaggaggtcgggttgggtaggaggatgtggtatttgcgtaaggagaaggaggtcgggttgggtaggaggatgtggtatttgcgtaaggagaaggaggtcgggttgggtaggaggatgtggtatttgcgtaaggagaaggaggtcgggttgggtaggaggatgtggtatttgcgtaaggagaaggaggtcgggttgggtaggaggatgtggtatttgcgtagggagaaggaggtcgggttgggtaggaggatgtggtatttgcgtaaggagaaggaggtcgggttgggtaggaggatgtggtatttgcgtaaggagaaggaggtcgggttgggtaggaggatgtggtatttgcgtaaggagaaggaggtcgggttgggtaggaggatgtggtatttgcgtaaggagaaggaggtcgggttgggtaggaggatgtggtatttgtgtaagaagaaggaggtcgggttgggtaggaggatgtggtatagttgatatagttataaagtttttgtttatggggcgttttgaggggtagattgtttgttggcggagttttgtggggtggaaatggtgaggttattgtgatgttattttgtttagttatcggttatagggttatttggagaagagtatgagtttagtataaaagtaaggtttattttgtaggggttagtagttgggagttgtttattaattattatttttgtagttggatagcgaggtttttttaaaaggtcgtttttatttgttatcgggaaaggattcggagcgaaggatgtcgtgggcggttagtttaggtgattgttttttttttgttttggagttaggtagaatagagtttaaattttagttttgggatagtgtgtggtttagaaggttgtaattgcggagttaatattttttagtttttttagatggttcgatttggtcggtgattcggggatgatgaagtttttggagttttagcgtgtttatttgagaggtagggtagcgttttgtattttatagggttatggggataggtttagggtttggtattttagtgatcggttttatgttgggttattgattagggaatttatatatttttttagtttagattgagtaggtaaattagatttaataaatatttagttttttgttcgagattagtttagttgttttaagtttgataagattgaattttatttatagtacgaggtataaatgatataaaggtaagtaattttaggggatttaaaaaattagggatttttatttgggtagtttagaaggggaattttttttggagattttggttttgttgttttaaatttagttgtttttttaagttaagtttgggagaattttatgattttatttttgttttaatttatttatattttatatttatattaagttttttttgtttttcgtggaatattaatttatatttgattttagatttttgtttttatgtagatttagtagtatgcgggtttaggaggtttttcggttataaggaattagagaagttatttattttgtttttttttatttattttattttgtttttatcggatgttttgggaggagagaaggaaggataaatgggtgtttcgtgatttaatttagatgaagatagagttatttattatagagatttagatatattttaattttggaaaatgggtatattgaggggagttggaaagtagaagggaaacgggcgtgggtagggaagaggtgaataggagtgcgtacgtttagttttttaggattttacgtttttaattaggattttataagatttaaaggggacgtaggaaagatttgggtttggaaatttattttcggattttttttgtattttggttggttttcgtttgtgtttttttttagggatgatgttcggatggaaggaggagttacgtttttttataggtgttttttataataggtgtttttataataggtgtcgtaataataggtgtttttataataggtgttttaatattttcgtagttttttagtatttataggtttatttttattttataattttttagataggtgttatttttattttataggtgaacgaggaaaatagttcgaagaggttgtgattttgtggtgacgcggtggtagagttgggattaagtttaggtttgtaacgtttttttggagtttcggtcgttatagtagttttcggagagcgttgtgtgtttttggtttttttggtatgggaaagaggttagttatttgtgttcggttaataagatgtttagcgtttagtttggttttatttggatgttttttttttttttagagatggaaaattgttgttttgaaagcgttattaaataaaatttgtggaaaggtaatggggggatttacgagtaagagttgatagaaaaatgattacgggtcgggtgtagtggtttacgtttgtaattttagtattttgggaggttaaggcgggcggattatttgagtttaggggttcgagattaatttggttaatatggtgaaatttcgtttttattaaaaatataaaaaaaattagtcgggcgtggtggtaggtgtttgtagttttagttattagggaggttgaggtaggggaatggcgtgaattcgggaggcggagtttgtagtgagttgagatggtgttattgtattttagtttgggcgatagagtaagattttattttaaaaaaaaaaaaaagtgtaaaatgattacgaaggttaagttgggttttggtgtttgcgaattttttgtagtaggttttttttgttgtttcgtttaggcgtttataggatgttttatatgattttttatttttatgatttttttatttttaggaaagaatagggttagttcgtttatttagagttggagggattgttgggggattacgttatttttttacggtattcgtattattatggcgtggtttaggttttggtttggggttatgaatagatttttagtttttagaagtaagtggttatagggttttcgtgattttcggagatagcgttatagcgtcggttgtttattttttgttggataaggttggttttgtttgggaatgtagaaattttgagtttttgttttgggttttatagtgtttgagtatcgaaggtttttgttttgggacgagttattttatagatattttatattcgggaattaagttttgaggaattagaagtagagatttatattgtggtaaagaggggagcggaggtattttcgtttttttttgtagagagttatattaattgtttttttcgtttttataattttatttggggttttttttttttttcgtttgtgtttgtgagttttaagaggtggaattggggtgagtagagtttttaggtttttaggagtagttttatttttttataggttatagtcgtttttttttatcgaggttttgtttttaatttattgtttatgttagtttttttaggttagttttttagattgtttttggttttttgtattttggttttagttttttgttttggaaagaagaagtttattatttggtgagggtttgttacgtatttggggtttgttatgcgtttgtattgaggttttgttacgagtttgtattgaggttttgttatgcgtttggagtttgttacgcgtttggggtttgttacgcgtttggagtttgttatgggtttggggtttgttatgtgtttgggatttgtcgtgcgtttggggtttgttacgtatttgtattgaggttttgttacgcgtttggggtttgttacgcgtttggggtttgttacgcgtttggggtttgttacgcgtttgtattgagtagatattttaagtatattatttttttttaaaagacggtatatagtgtatttttgtttttgttttttatttatatggtttttcgttttttaattttttggggtttgtttaagttttatttttttttttttatttatatagttttaaggtcgttttttttggggtttttttttttttattttttttagtagtttaaagttttggtgggataggggtagtttttggggagggaggagaggatttaggaattcggttaggagggtggtttatttatttttagtgtgatttgtttttatttttttatgtttttttttatttttttcgttatttagtttaggttgatgagaagtagagtaacgggtgtatcggtgtttttttttttggtggggtagtggggtggggttgaggagagaaaagggtgattagcgtggggtttcgtttttttttgttttttttttaggttttttggttttttcggagaaacgtatttggttcgggttagtcgtttgaggggacgggtttacgtttgttttttatattgtagttgttgggtcgtggagtttttttagggagttagggggatttttgtcgtagttatgaagggggtacgttggaggagggttttttgggtgtttttgagttgtttgtgtttttgttttttttcgtatgtggttttaggtaagtgatggagatagtagatgaggttggttgcggggagtatttgggggaggtgggagttgttagagaaagaggttcggggagatagagagagagagagagagaataggggaaagggagatagcgaagaggaagagaagggagagaaaaagagggagagggaaaggagaaagagatgaatgggataatatggggggaaggtggagagagatttagagagggaaagaagaggaagagaagagggagagagaaagaagagtggaggtcgtgcgcggtggtttatgtttgtaattttagtattttcggaggttaaggtaggagattatttgaggttaggagttcgagattagtttggtcgatatggtgaaatttcgtttttattaaatatataaaaattagtcggtcgtggtgggttttatttgtaattttagttatttaggagtttgaggtaggagaattatttgaatttgggaggtggaggttgtagtgagttaagatcgcgttattgtattttagtttgggagagagagcgagattttgttttaaaataaataaataaataaataaataaataaataaataaataaatataaaataaaataaaaaataagaagaggagaaaagtggggaagaggaggtatgaattggtagatacgggataagatttgaggggaaagatagagggagaatgttcgaaagagagagaaaagagaatagagggttagagagtagttcggcgatgtttggaaggatttatggtgagagtttaggtttattcgtagagagaaagataggtagagttagagtaagaggaatagagttaaggagaaagatgtatatttttgtgtatagagttgggggtagaggggatgttaggaaagttgggtgatggagacggaagaaaatttatgtaaagttgtagggtgagaggacgagataggtgagacgtagataaattgaggattttgggaatggagagaggagaagatcgggagatagt

SEQ ID NO: 1278 - DNA, 6154 bp, Artificial Sequence
  chemically treated genomic DNA (Homo sapiens)
gttgtttttcgatttttttttttttttatttttagggtttttagtttgtttgcgttttatttgtttcgtttttttattttgtagttttatatgagttttttttcgtttttattatttagtttttttggtattttttttatttttagttttgtatataagggtgtatatttttttttttgattttgttttttttgttttggttttgtttgtttttttttttgcgagtaagtttgggtttttattatggatttttttagatatcgtcgggttgttttttggttttttgtttttttttttttttttttcgagtattttttttttgtttttttttttagattttgtttcgtatttgttagtttatgtttttttttttttattttttttttttttttattttttattttattttatatttatttatttatttatttatttatttatttatttatttattttgagatagagtttcgtttttttttttaggttggagtgtagtggcgcgattttggtttattgtaatttttattttttaggtttaagtgatttttttgttttagatttttgagtagttggaattataggtggggtttattacgatcggttaatttttgtatatttagtagagacggggttttattatgtcggttaggttggtttcgaatttttgattttaggtgattttttgttttggttttcgaaagtgttgggattataggtatgagttatcgcgtacggtttttatttttttttttttttttttttttttttttttttttttttttttttgggtttttttttattttttttttatgttgttttatttattttttttttttttttttttttttttttttttttttttttttttttttttcgttgttttttttttttttattttttttttttttttttttgttttttcggatttttttttttgatagtttttattttttttaagtgtttttcgtagttagttttatttgttgtttttattatttatttgggattatatgcggaaggaggtagagatataggtagtttagggatatttaggggatttttttttagcgtgttttttttatggttgcggtaaaagtttttttggttttttggggaagttttacggtttagtagttgtagtgtgaggagtagacgtgagttcgtttttttaggcggttggttcgaattaagtgcgttttttcgaaggggttagggaatttgggaagaggataaaagagggcggggttttacgttaattatttttttttttttttagttttattttattattttattaggaaagaaaatatcgatatattcgttgttttgttttttattagtttgagttgagtggcgggagggatgggaggagatatgggggaatgggaataggttatattggaaatgggtgggttatttttttagtcgggtttttgggtttttttttttttttttaggggttgtttttgttttattagagttttgggttgttgggaagaatggggaagaaagggttttagagggagcgattttggggttgtatgaatgggggaaagagagtgagatttaagtagattttaaggaattgggaagcggggaattatgtgggtgaggggtaggaatagaaatgtattgtatgtcgttttttggaaaggggtggtgtgtttggaatatttgtttagtgtaggcgcgtggtagattttagacgcgtggtagattttagacgcgtggtagattttagacgcgtggtagaattttagtgtagatgcgtggtagattttagacgtacggtagattttagatatatggtagattttagatttatggtagattttagacgcgtggtagattttagacgcgtggtagattttagacgtatggtagaattttagtgtagattcgtggtagaattttagtgtagacgtatggtagattttagatgcgtggtagatttttattagatggtggattttttttttttagggtagggagttggagttagggtgtagggagttagggatagtttgggagattggtttgagggagttggtatgggtagtgggttgaaggtagaatttcggtaggaggaagcgattgtaatttgtgaggaggtggagttgtttttggagatttgggggttttgtttattttagttttattttttggaatttataggtataagcgaggagggaaagggattttaagtagggttgtaaagacgaagagggtagttggtgtagttttttgtaaaggaaaacggggatattttcgtttttttttttgttatagtgtgaatttttgtttttgattttttaagatttgattttcgaatgtggggtgtttgtggggtgattcgttttagagtagggattttcgatgtttagatattgtggggtttaggataaggatttagggtttttgtatttttaagtagagttagttttgtttagtaaggagtaggtaatcgacgttgtggcgttgttttcgagggttacggaggttttgtgattatttgtttttagaagttgaaagtttgtttatggttttaggttaaagtttgggttacgttataataatgcggatatcgtggggaagtggcgtggttttttaatagtttttttagttttgggtggacgagttgattttgtttttttttggaggtaagaaaattataaaggtaaagagttatgtggagtattttgtgggcgtttggacggggtagtaggagggatttattgtagggaattcgtagatattaaggtttagtttggttttcgtgattattttgtatttttttttttttttgagatggagttttgttttgtcgtttaggttggagtgtagtggtattattttagtttattgtaagtttcgtttttcgggtttacgttatttttttgttttagtttttttagtagttgggattataggtatttgttattacgttcggttaattttttttgtatttttagtagggacgaggttttattatgttggttaggttggtttcgaatttttgaatttagatgattcgttcgttttggttttttaaagtgttgggattataggcgtgagttattgtattcggttcgtggttatttttttgttagtttttgttcgtgggtttttttattatttttttataggttttgtttggtgacgtttttaggataatagttttttatttttagaggagaaaggagtatttaggtgagattaaattaagcgttggatattttgttgatcgaatataggtagttgattttttttttatgttaggaaggttagaggtatatagcgtttttcggaagttgttgtgacggtcgagattttaggagggcgttataaatttgggtttgattttagttttgttatcgcgttattataaagttatagttttttcgagttgtttttttcgtttatttgtaaaatggggataatatttatttgaaaggttgtagggtgggagtgagtttgtagatgttgaggggttgcgggagtattaggatatttgttgtgaggatatttgttgttacgatatttgttgtgaggatatttgttgtggaggatatttgtggaggaacgtggtttttttttttattcgggtattatttttggagggagatataaacgagggttagttaggatataggaggagttcggaagtgaatttttaggtttaggttttttttgcgttttttttgagttttataggattttgattaggagcgtgagattttggagaattgggcgtgcgtatttttgtttattttttttttgtttacgttcgttttttttttgttttttagttttttttaatatgtttattttttagagttaggatgtgtttgggtttttgtgataaatggttttgtttttatttgggttgggttacgggatatttatttgtttttttttttttttttttaaggtattcgatggggatagaatggggtgaatgagaggggataaaatgagtggtttttttagttttttgtggtcgaaaaattttttaggttcgtatattgttgggtttgtataggggtaggagtttgaagttaggtgtaagttaatattttacgggaggtaggaagagtttagtgtggatgtggggtgtaagtaaattggagtaaggataagattatgagatttttttagatttggtttgaagagatagttgggtttgaggtagtaaagttaggatttttaagagagattttttttttaagttatttaagtaggagtttttagttttttgggttttttaaaattgtttatttttatattatttatgtttcgtgttgtgaataaagtttaattttgttagatttaggataattaggttgatttcgagtaggaagttggatgtttattaagtttgatttatttatttagtttggattaaaaaggtgtgtggattttttagttagtgatttagtatgaagtcggttattagagtgttaggttttgagtttgtttttatggttttgtgaagtataaagcgttgttttattttttaagtgagtacgttgaggttttaggagttttattattttcgagttatcggttaggtcgggttatttagggaaattggagagtgttaatttcgtagttatagttttttgggttatatattgttttaaagttggaatttgagttttgttttgtttggttttaaagtaaaagaagggtaattatttgggttgatcgtttacgatatttttcgtttcgggttttttttcggtggtaggtggagacggttttttggaggggtttcgttgtttagttgtaaggatagtggttagtggatagtttttagttgttggtttttgtagggtgggttttgtttttatgttgagtttatgtttttttttaggtgattttgtggtcgatgattaagtaaagtggtattatagtgattttattatttttattttataagatttcgttaataggtagtttgttttttagagcgttttatgggtaggagttttgtggttgtgttagttgtgttatatttttttgtttagttcggtttttttttttttatataggtgttatatttttttgtttagttcggtttttttttttttacgtaggtgttatatttttttgtttagttcggtttttttttttttacgtaggtgttatatttttttgtttagttcggtttttttttttttacgtaggtgttatatttttttgtttagttcggtttttttttttttacgtaggtgttatatttttttgtttagttcggtttttttttttttacgtaggtgttatatttttttgtttagttcggtttttttttttttacgtaggtgttatatttttttgtttagttcggtttttttttttttacgtaggtgttatatttttttgtttagttcggtttttttttttttacgtaggtgttatatttttttgtttagttcggtttttttttttttacgtaggtgttatatttttttgtttagttcggtttttttttttttacgtaggtgttatatttttttgtttagttcggtttttttttttttacgtaggtgttatatttttttgtttagttcggtttttttttttttacgtaggtgttatatttttttgtttagttcggtttttttttttttacgtaggtgttatatttttttgtttagttcggtttttttttttttatataggtgttatatttttttgtttagttcggtttttttttttttatataggtgttatatttttttgtttagttcggttttcgtttttttttttacgtagatgttatatttttttgttcggttcggtttttttttttttattaggtgttatatttttcgtttagtttggttttcgtttttttttttattaggtgttatatttttttgtttagtttggttttcgtttttttttttataaggtgttatatttttttgtttagtttggttttcgtcgttttttttattaggtgttatatttttttgtttagtttggttttcgtttttttttttacgaggtgttatatttttttgtttagtttggttttcgtttttttttttacgaggtgttatatttttttgtttagtttggttttcgtttttttttttattaggtgttatatttttttgtttagtttggttttcgtttttttttttat

SEQ ID NO: 1279 - DNA, 6175 bp, Artificial Sequence
  chemically treated genomic DNA (Homo sapiens)
gataggagaattgtttgaattcgggaggtggaggttgtagtgagtcgagatcgtgttattgtattttagtttgggtaataagagtaattttattttaaaaataagagaatgggtgtgatgtgtgagtgtgagagtaggtgtgtgtgagtatgtatgagtgtgagttgttgtgagtggatgtgagagtagaatgtgtgtgagtatttgagtgtgtaagtaggtgtttgagtggttgtgtgtgaataggcgtgtaagtatgtaagtggatatgtatgagtagaatgtatgtgtatgcgtgagtaggtgtgaggtgtaagtgtaagtggtgtgaaatatgagtgagtaggtgttaatgaggtgtgaaagagttggtgtgagcgtgtgagtgataagtgagtagttgtgaggtgtgagtatgtatgtgagtaggtatgtgtgatgtgtgagtatatgtgtgagtatgtgtgtgtgtagatatgtgtgggtaggtgtgtgtgagtgggtgtgagatgtgagtatgtgtgtgaggtatgaggtgtgagtatgtgtgaggtgtgagtatgtgagtgggtgtgaatgtgtgaggtgttagtatgtgtgaagtgttagtatgtgtgtgagtatgagtttgtaagtataagtgtgtgtgagatttggtgtgaggtgtgtgaggaagtgtgtgtatggataggtgagtatgtgtgtgagtagacgtgagtatgtgtgagtgggtgtgtgcgtgagtgaatggtgtgaggtgtgtgagtataagtgtgtgagtaggggcgtgtgtgtgtagttgagtaatgtgagatgtgtgtgagtaggtgtgtgcgtgtggggttgagtaacgtgagatgtgtgtaagtaggtgtgtgcgtgtaagtgtgtgtgaggtgtgggtaggtgcgattatatgtgagtggatatgtgtgagtgaatggtgtggtgtaagtatgtgtgtgtgagtaggggtatgtgtgtgtaagggtgagtaatgtaaggtgtgagggtgagtagtgtaagatgtgtaagtaggtgtgtttgtgtaagtatgtgtaagtaagtataagtaggtgtgattatgagatttggtgtgaggtgtatgagtaggtgtgtgaatatgagtgtgtgaatttggtgtgaggtgtgtgtgagtaggtgtgagtgggtatatgagtgtgagaaggtgtattgggtgtgatcgtgtgtgggggtagtaagtgggtttgagtgtgtgtgtatgtgtgtgagtgggtgtattgggtgggtgtgagtgtgtatgtgagtgggtgtgaatgaggtgtgagtatgagtgggtgtgattaggtgtgtgtgagtgggttgtgaatgtgtaagtagatgtagtgtgggtttgaatatgtgggtgggtgtaagtatgtgagtgggtgtgtcgtgtgggtgttagtgtgtgggggtatgttagtgaatgagtgtgtgagtatgtgtgtgagtgtgagttggtgtattgtgtgggtgtgtgagaaagtgatagtgtgtgagggtagatgtgggtgtgaatgtgtaagtgggtgggtgtgggtgtaatttggcgtttgggtgtattgtataagtatgtgtgtgagtatgtgggtgtgagtttgtgagtacgtgtattgtgtgtgtatgtgtgtgatagtatgtgtgtgattagatatattgtacgtgtgagcgtgtgtgggtgtgagtatgagtgagtggttgtattgtgtttaagtatgagtgtgagtgggtgtgagaaggtgcgttgtgtgagtacgtgtgtgagtgggtgtgggcgtgatgtgtgagtatgtgtaaggaggtgtgggtgcgttatgtggatgtgagtatgtgtgtgtatttggtgtattgtgtgggtgcgagtgtgtgcgcgtggggggggtgagtgcgtgggtgtgagtgggtgtgtgtgaacgggtgtgtgtgcgtaagtaggtgtgtgtgtgtgagtgtgggtgcgttgtgtatgtacgttcggcgcgggttggggtagtcgtttttttgtttttttcggttatttcgttttcgggtttttgtgcgtacgtaaggcggtgggggcggtttttatgtgggtttcgggtttttttttatcgggttttttttttcgtaggtagtaagaagaagattcgtttgtattagtttttgttggatttgtttcgtagcggcgatatgaaggatagtatttggtgggtggataaggataagggtattttttagttttcgtttaagtataaggaggcgttggcgtatcgttggggtatttagaagggtaatcgtaagaagatgatttattagaagatggcgcgcgcgttgcgtaattacggtaagacgggcgaggttaagaaggtgaagaagaagtttatttattagtttagcggcgaagtgttgggtcgcgggggtttggtcgagcggcgttattcgttttattgagttcgtagttttcgtcgggtttcgttaggttttttcgttggttatagtattaagttttcgttcggttcggatatagggaggacgttttcggggtttagaggtaggattgtggcgggtcgggtttcgttttattcgttttttttttttattttaggttttttttatatttcgtttcgtttttttttaggattttatttcggttttcggacgttagttgggcgttagattttatcggggtaattttgtagaggacgattcggggtattgttttgggagttttaagttcgtatgtaaattagatttttttttttattttttttatttattaatttttttttaaaaaataagtaaagttatttttaatttatttttttgtagtatagagttttttttaaaatttgttgtgtattttttttggtttttgtgtgttgcgacgtttttttttgttatttgtttatcgggtgtttatcgaggattgtatttaatgttggattttgggaatatgaggattaatgatatagagcgtttgaataggagttagagtttggtggaaagaataagtttttaattgtgattaggagagtagattttatttaaaagttttttatttttgatagttgttgtttttaagttttgatgaggtttgaatttatgatgatgatgatgatgatgatgatgattatgattagtaataatatttgatattttggttaattagtatttgttaattttgagatgtggagtttaatattattttattttatagaatgggaaattgaggtttgtagaggttaaattatttttttaaggttatagtcgttgagtggttaagttggattatattttaggtttgtttcgatacgttaatatggagtgggaggttttgtttatttggaagaggatattttttagtatttcgaggataggaattaagttttaaagtttttgtgggtcgtaaagggtttttacgagttgtacgtttagtaggattttagatttaagtgaatttttggtgggatttttaggttttatttgttttttagtttttagttatagtaggggagaaatagattaagttgagcggagaagtttgtaagttttgtgtttttttttagacggtagtaagtagtggtagtagatagtttgggagtgagggattttttaacgttgttaaagattttagggaatttagattttggggttattatcgtagggataaatattcgttttatatttttttaattttagagggtttattgtagtttaattttgtagttttttagttttattgtagggttataagagaaggtaaaatggtgttgtgtttttatttttttatttttatttttttttttttgagatagggttttattttgttgtttaggttggagtgtagtggtacgaatatggtttattgtagttttgatttttcgggtttaagtgatttttttgttttagtttttcgagtatttgggattataggtgtgcgttatatgtttgattgatttttgtattttttgtatagatggggttttattatgttgtttaggttggtttcgaatttttgagtttaagtgatttgttcgttttagttttttaaagtgttgggattataggtgtgagttatttcgtttagtttatttttatttttttattattattttttgagatattaataataaaaaataataataaataatatttttattattattattattttgttatttaggttgtagtgtagtggtgcgattttggtttattgtagttcggaattttttggatttaagcgatttttttattttagttttttgggtagttgatattataggtttatattattatatttggttaatttgtgtgtgtgtgtgtatttattttattttttatttttttagtagagatggggttttgttatgttgtttaggttggttttaaatttttggttttaaataatttgtttgtttcggttttttaaagtgttgggattatagatgagttattatattcggtttaatatttttaaaattataaatttattttatacgtgtgataattttgtgtagtgggtgttgtttttatttatttcgttttatagatgaggaaattaggtgttttgagattaaagagatggtagtgttaggatttagagatattttggttttagggtttgtggatatgattattgtttgaattgtttgcgaggatgtttttgattcgttagttttagggttatgggtttagtatgtttttatcgtataatttgttgtaagagggatatatacggggtttggagtatttttgaggtttgttaaaggttggggaggtagaattgtgttgcggggggtgagggggaagggataggagttagttagggataatgtggttttattttttttttggagagattttagttttttggaatttatttatatttagtaggtggttggataggaggtagataagtagagtttggggaggggggaggtttttatatatagtgggaaggataggattttatttagtttttttttgggtgatttgtgtttgtttcgtgtttggtgtgacgttttttaggatgtttgagtcggggaagaagttaggtagttttaggattggggttgggtttaagtgtgggagtaggggggtgtttataattggggagtagggttaggagggagtttttgagggggttgacgaggacgtggtttttgagttttaggataggggtagttagttttttagggtttttttttgattttcggttttttttttttatttttttgatgagaggtgaaggtaaatttaaggttagggacgtagagaggggatatagttaagataggaagtattcggggttaatttattttgagaatgtaaagggattttttttttgttttattgtttttattttttatagtaaggtttttcgcggatagagtttacgtttagtatggagttgagttaggtttacggtatgtttttagattagtttttatttattatgggttttagttttttaatttggggtgtcgggggtggtggtggtattgggttggttttttttggttgtgatattatttgttttatgagtttgtacggtgtggtttttatgttgagggtgatatagttttttttttttgagagaggatagttaggagtttttgaatttaggttaagggtagggaaaattatagtttagggatttgggtttgggttgtgtttttatgaaggttgtttagggtagagatttaggtttttattttttagcgtttttttaggttagttttattttagttgttgatatttagtttgaggtttttggaggataaatttggttatattttaagtaggtagattttttcgttttttgttaagggttcgaaatggttgggggaaagggagttgggtttattacgggtgtttttaagtagggaaagtggatatatgtagaaaaagttttgttgggaggttaggattatagttttggttttttcgattgttagttgtgtgattttggaggagtcgtttagtttttttgagttttagtgtttttttttgagaaatgaatagaataattgtaattattttagagaattggtagagtattacgtgaggggatgtatagaaagtgttagtatagtatttattgagaggggttgtaggggcggggtgtacgttttaattaggggtcgttgtagtttttatttggttttttagt

SEQ ID NO: 1280 - DNA, 6175 bp, Artificial Sequence
  chemically treated genomic DNA (Homo sapiens)
attgaagggttaggtggaggttatagcggtttttggttggagcgtgtatttcgtttttgtagttttttttagtaaatattgtgttagtattttttatgtatttttttacgtaatattttattagttttttgaggtagttgtagttattttgtttattttttagaggaggatattgaggtttagagaagttaagcggtttttttaagattatatagttagtagtcgggagagttagggttgtggttttgattttttaataagattttttttgtatgtgtttattttttttgtttggagatattcgtgatgaatttagtttttttttttttaattatttcgggtttttggtagggggcggggaagtttgtttatttggaatgtggttaaatttgttttttaaggattttaggttgggtattagtaattgagataaagttggtttgggagggcgttgggggatggggatttggatttttgttttggataatttttataagggtatagtttaggtttaggtttttgggttgtgattttttttgtttttggtttgggtttaggggtttttgattgtttttttttagagaagaggggttgtgttatttttaatatgggggttatatcgtataggtttatgaagtagataatgttatagttaggaggaattaatttaatgttattattattttcggtattttaggttgggagattgagatttatagtgggtagagattggtttgaaggtatgtcgtgagtttggtttagttttatattaaacgtgggttttgttcgcggggaattttgttgtggaaggtgaaggtaatgggatagggaaggggtttttttgtatttttagaatgggttgatttcgggtgttttttgttttggttgtgttttttttttgcgtttttgattttgggtttatttttattttttattagagggatgggaaaaagaaatcgagaattaaaaaaggattttggaggattggttgtttttgttttggggtttagaggttacgttttcgttaatttttttaagaatttttttttagttttgttttttaattgtagatatttttttgtttttatatttagatttaattttagttttaaagttatttggtttttttttcggtttaggtattttgagagacgttatattaggtacgaagtaggtataggttatttaaagagggattgagtggggttttgttttttttattatatatggggattttttttttttttaggttttgtttatttgttttttgtttagttatttgttaaatatagatgaattttagagagttgaggtttttttagggagaaggtagggttatattgtttttggttggtttttgtttttttttttttatttttcgtagtataattttgtttttttaatttttggtaagttttaggggtattttaagtttcgtgtgtgttttttttatagtaaattgtacggtgggagtatgttgggtttataattttaaggttaacgggttaggagtattttcgtaggtagtttaggtagtggttatgtttatagattttggggttagggtgtttttgagttttagtattgttatttttttaattttaaagtatttggtttttttatttgtaaagcggggtgggtgaaagtagtatttattgtataggattgttatacgtatgaagtgggtttataattttaaaaatgttaggtcgggtgtggtggtttatttgtaattttagtattttgggaggtcgaggtaggtagattatttgaggttaggagtttgagattagtttgggtaatatggtaaaattttatttttattaaaaaaataaaaaataaaataaatatatatatatatataaattagttaggtgtggtggtgtggatttgtagtattagttatttaggaggttgaggtgggaggatcgtttgagtttaaggagtttcgggttgtagtgagttaaaatcgtattattgtattgtagtttgggtgatagagtgataataataataaaaatattatttattattattttttattattaatattttaaagaataataataaaaaaataaaaatgggttgggcgaagtggtttatatttgtaattttagtattttgggaggttgaggcgggtagattatttgagtttaggagttcgagattagtttgggtaatatgatgaaattttatttgtataaaaaatataaaaattagttaggtatgtgacgtatatttgtagttttagatgttcgggaggttgaggtaggagaattatttgagttcggggggttagggttgtagtgagttatgttcgtgttattgtattttagtttgggtaataaagtaagattttgttttaaaaaaaaaaaaataaaaatagaagaatgaagatataatattattttgtttttttttgtggttttgtagtaggattagggagttgtagggttgggttgtagtgagttttttggggttgaggaggtgtggggcgggtatttgtttttacgataatggttttagaatttgggttttttaaggtttttgatagcgttgggaagttttttatttttaggttgtttattgttattatttgttatcgtttggaggaaaatataggatttataggttttttcgtttagtttggtttgttttttttttgttgtggttaggagttagaaagtaaatagaatttgggggttttattagggatttatttgggtttaaagttttgttgggcgtgtagttcgtgagaattttttgcggtttataggagttttggggtttaatttttgttttcggaatgttgaagagtatttttttttagataagtaaggttttttattttatgttgacgtgtcgggatagatttggagtgtgatttaatttggttatttaacggttgtgattttggggaaataatttgatttttataagttttagttttttattttataaaatggagtgatattagattttatattttaaggttggtagatattaattgattagaatattaaatgttgttgttggttatggttattattattattattattattattatgagtttaaattttattaaggtttaaaaataataattattaggagtagagagtttttaaataggatttgtttttttaattataattgaggatttgttttttttattaaattttaatttttgtttaggcgttttgtgttattggtttttatgtttttagggtttagtattgggtatagttttcggtaaatattcgatggataaatgataaaaagagacgtcgtagtatataggggttaaaagagatatataataaattttaaaagagattttgtgttgtaagaggatggattgagaataattttatttgttttttgggaggaggttaatgggtgggaggggtgagaggggagatttgatttatatacggatttgagatttttaaggtagtatttcgggtcgttttttgtaaggttgtttcggtggggtttgacgtttagttggcgttcgggagtcggggtggagttttggagggaggcgaagcgggatgtggagggggtttggagtggggggagggggcgggtgaggcgaggttcggttcgttatagttttgtttttgggtttcgggagcgttttttttgtgttcgggtcgggcgagggtttaatgttatggttagcggggaggtttggcggggttcggcgggggttgcgggtttagtggggcgggtggcgtcgttcggttaggttttcgcggtttagtatttcgtcgttgaattggtaggtgagttttttttttatttttttgatttcgttcgttttgtcgtagttgcgtagcgcgcgcgttattttttggtaggttatttttttgcggttgtttttttggatgttttagcggtgcgttagcgtttttttgtgtttggacgagaattggaaggtgtttttgtttttgtttatttattagatgttgttttttatgtcgtcgttgcggagtaggtttaataggaattggtataggcggattttttttttgttgtttgcgggggggagggttcggtgggagggggttcggggtttatatgggagtcgtttttatcgttttgcgtacgtataggggttcggggacggggtggtcgggaagggtaggggaacggttgttttagttcgcgtcgggcgtgtatatataacgtatttatatttatatatatatatttgtttgcgtatatatattcgtttatatatatttatttatatttacgtatttattttttttacgcgtatatattcgtatttatatagtgtattaagtatatatatatgtttatatttatataacgtatttatatttttttatatatgtttatatattacgtttatatttatttatatacgtgtttatataacgtatttttttatatttatttatatttatgtttaaatataatgtaattatttatttatgtttatatttatatacgtttatacgtataatgtatttgattatatatatgttgttatatatatgtatatataatgtacgtgtttatagatttatatttatatgtttatatatatgtttgtgtaatgtatttaaacgttagattgtatttatatttatttatttgtatatttatatttatatttgtttttatatattgttatttttttatatatttatataatgtattagtttatatttatatatatgtttatatatttatttattaatatgtttttatatattggtatttatacgatatatttatttatatgtttgtatttatttatatgtttaaatttatattgtatttgtttatatatttataatttatttatatatatttggttatatttatttatgtttatattttatttatatttatttatatgtatatttatatttatttaatgtatttatttatatatatgtatatatatttagatttatttattgtttttatatacggttatatttaatgtatttttttatatttatatgtttatttatatttgtttatatatattttatattaggtttatatatttatgtttatatatttgtttatatattttatattaggttttataattatatttgtttatatttgtttatatatgtttgtataaatatatttgtttatatattttatattgtttatttttatattttatattgtttatttttgtatatatatgtttttgtttatatatatatgtttatattatattatttatttatatatatttatttatatatgatcgtatttatttatattttatatatatttgtacgtatatatttgtttatatatattttacgttatttagttttatacgtatatatttgtttatatatattttatattatttagttatatatatacgtttttgtttatatatttgtgtttatatattttatattatttatttacgtatatatttatttatatatgtttacgtttgtttatatatatgtttatttatttatatatatatttttttatatattttatattaagttttatatatatttatgtttataaatttatgtttatatatatgttaatattttatatatgttaatattttatatatttatatttatttatatgtttatattttatatatgtttatattttatattttatatatatgtttatattttatatttatttatatatatttgtttatatatatttgtatatatatatgtttatatatatgtttatatattatatatatttgtttatatatatgtttatattttatagttgtttatttattatttatacgtttatattagtttttttatattttattgatatttgtttatttatattttatattatttatatttgtattttatatttgtttacgtatgtatatatattttgtttatgtatatttatttgtatgtttatacgtttgtttatatataattatttagatatttatttgtatatttaaatgtttatatatattttgtttttatatttatttatagtagtttatatttatgtatgtttatatatatttgtttttatatttatatattatatttatttttttgtttttgagatggagttgtttttgttgtttaggttggagtgtaatggtacgatttcggtttattgtaatttttatttttcgggtttaagtaatttttttgtt

SEQ ID NO: 1281 - DNA, 6224 bp, Artificial Sequence
  chemically treated genomic DNA (Homo sapiens)
  unsure 2227: n is a or g or c or t
gtatttttatttgattatttatttgataaatgaggatagagtttatatttataaaaggtaaatgataatttggttttggttaaaaattaagttatagagaatttttgttttagttttaaaggttttgtgtatcgtggtttagtattttaaagtaggggagaggttgagtttataagagtagggagttaaggattttcgttgttttattttggtgtttaattttattttttttaatttgtatattgagttttttggggtttgggtttagtaaagtgttaaaatggttaatttatggttagaattagaaaagtttattttagaaattgggcgattcgggttatgattgtttcggttttaggttgtagtatattttttgtggataataaatttttatttagtgttaggcggtggtgttttgggtattaaagtatagttgtgaaaattagagatgaggtattttagattttttttcgggatattagtttttggtaggtttatttgtaattttggaatattagggtttggggtagggagagttagttatataatagtttgttttggttatttattagtttttgtttttgagggttttacgtttatttgtttatgtatttagtttttttaaattagtatagatgggtaggttgtttgtttttaaaagtgaaatgggagtttttgaaaatgtatatttttttaggtatttttttgtgagttttgttgttattttagagaggtggaatagtgattgtcgatttaggggtggtattcgttggataagatttttgttatattatattgttgtattttaaggtgaggggtggaatagagggttggattgaagattgtggggaaaagaaagattagattgttatcgtgtgtatgtagaaaaggaagatataagaaattttatgttgatttgtataaagaaaaattgtttttgttttgagatgttgttaatttgtaattttagttttaattttgtgtttataaaaatatgtgttatattgaattaaggtttaagggatttagggttgtgtaggatgtgttttgttaatatatgtttgtagatagtatgtttggtaaaagttatcgttattttttattttttattaattagggatatgatgtattgtggaaagtcgtagggatttttgtttaagaaagtttgggtatttgtttaaggtttttttttattgagatagtttgagatatggtttcgtgggaagggaaagattttattgttttttagttcgatatttgtaaagggtttgtgttgaggaggattagtaaaagaggaaggtttttatttttcgtatatttttgggaacggaatgtttcggtgtaaagtcgattattggttttatttattgagataggagaaaatcgttttgtggttggaagcgaaatatgttggtagtaatattgttttgttattttttgttatattgagatgtttgggtaaagagaaataaaaatttagtttatatgtatattttagtatagtatttttttttgaatttatttatgatgtagatttttttatttatatgtttttttgttgattttttttttattattattttgtttatttcgttttgtttgaagagggtttgtttttttatatttgtgggtatttttcgtaaggtggagacgagaaattgagaaaagaaatgatatagagataaagtatagaggaagaaaagtgggtttaggggattggtgtttagtaattgaggatttatattagtattggtttttgagtttttttagtatttattgattattatttttattattttggtaagagggatgtggtattatatattataattataaggtaatggtggggagggggttaataggaaaaaatgtgagtaaaggatttagtgttataagtaagtttaaggaaaggtgttgtgtttggatgtgtatataggttagatttatgtttgattttatataaatattttagtgtagtaaagagtagtattgtcgttagtatgttttatttgtagttataaggcggtttttttttattttagtaaatagaatgtatggttgggttttatatttaagatattttatttttagggataagtaggagatagatgttttttttttattttaattgtaaagaggttttttttttttattaatattttttagtatcgattttttacgggtgtttgtaaagaggttttttttttttattaatattttttagtanagattttttacgggtgtcgggttgggggattgtaaggtttttttttttttattaggttatattttagataattttagtggggggaaatttggataatatttaggtttttttgggtagaggtttttgcggtttttcgtattgtattgtgtatttggttaatcgagaatggagaatggcgatgatttttattaagtatattgtttgtaaataaatggttaataagttatattttgyatagttttaaattttttaaattttgatttaatatagtatatgtttttgtgagtatagggttggggttaaggttatagattaatagtattttaaggtagaaaaattttttttagtatagattaaaatggagttttttttgttttttttttttatatagatatagtaatagtttgattttttttttttttttttatattgtcgtattttttttgtcgagatagtgaaaatagtaattaataaatattgagggaattcggagatcgatgtcggttatttgggtttattttatattttgtttttgcgttttatttttttttttagtttttttttttatttgacgagaaatatttataggtgtgaaggggtaggatttttttaaaggttaaggttatggaggtttttttagtgaaaattcggggcggggaggtgaggagagttttggacgaacggaagaacggggaaggttagcgtagggtttgagtggttcgtttatcgatatagatgttttttagttgtttcggttttagatttacgtttttgagaatcgcggttatgattgtcgagagaagttcgtcgggggtggtgttttgtagtagaaagagtagtcgtagtgatttttatttttttatgtttattttagggagataaagcgattatagttgggtgcggagttgttttcggcgtttaggataattaaatatacgaatcggattttagttcgcgtcggcgtttttttatattcggcgtttagattttcgggttttattttgaagtcgtcgcggttcgttcggtagatggtcgtgcgtcgttcgtgtattattattacgttcgcggtcgaggtttgcggggtatcgtttaggtaaggcgcggtttgcggtatttagtcggaatcggtcggattttttaggtggtttagtattatttgtagtttttgtattgcgtaggttaattttgtagattagttattagttcgggaattgatcgcggagttaatagatagtcgttcgtatacgcgtagaattatattttagtttttaaggttttaatttcgtttatagttttgcgaatagacgcgagcgattttttaaaagtttcgtttatttttagttttagttaattataaggagagtcggtttgggaattcgttttttttcgttatcgtttattaagttttttataggagggtttataggtatcgtttagtcgagttttttatttaatgtttcgtttattttggtttatcgtagttaattagaaggtgtatttttacgaattttcgtttagaaatgtagatcggaagtttttttattttttgtagttaaattcgagatttgatttttaaatttttgttttttgttcgtagttaaacggaaggttgggtagttaggatcgtttattgtttgggggttggagatggaagtcgaggttttaatttttttatttattttttaggaggttttgttattttttcggttttagtattcgagttgggggatttaaatattttcgagacgttcgagttttgtttcgacgtggttgggtttttttattttttcgagaagatagggaatttgggttttcgggttggtcgggagaatagattttatagatatgcggggtgtgataagttttttaattggagaatgaatattttatatttttattagttttatatttaattggaatgattttattagtgtttatttttcgtgttaggttggggtttttattaaggtagagaggtattatgtattcggggagtttgcgatatttttgatatttagtagatgattaataagtatttgtcgaatgagtaaatgaatgaattagggttttttaggttaggattgtgtttttaaatttaaagggtaaggttacgtgtttttttgatttttaatagtagggttatgtttttatttgagattttggagagtagtgttgggttttttatagatattaaaggatagggtgttttgtgttttttaatttagtgttatgacgtttttaattatttcgagggtagggttacggtatgttttaggttttagaaggtagttgttcgttttttatttttatttcggggagtatagtaggggtttttttatatttttattggtaggattgcgtgttttttagagatagtggagggtagagttggtgtttttttatttgtttttttttcgttattttcgagggtaggatcgtatgaattttttagattttttcgtggaagaattgtggttttattagattttaaaaagtaaggttcgttttttataattttcgaaggagggtcgtttttatttcgtcgttaatttattagtattattattagattttcgagggcggtgtcgtggatttttttagattttaaaaggtagatttttattttttacgttttttatattattcgtttcgagattttaagggtagaggtgggtattttcgttttcgtatttttgttcggggttttagattgtagggtarggcggcgtttttcggaaagcgaaagcggcggggcghggcgggtgttaggagaaagaggaagcgttggtagataatgcgattcgatcgcgttgaggttttaggatcgttcgttatggttgtaggaggtttcggcgcggggtttgcggtttcggttttttttatattttttttttttttggttgtttttaatatgcgagtgcggcgtcgtttgtttttgtttttgaacgtgcggatataggtggcggtcgattggatcgcgttggcggaggagatggattttgagtatttggagattcggtaattggagatataagcggattttattggtaggttgttggacgtttggtagggacgttttggcgtttttgtaggtcgattgttcgagttgtttattaagttgggttgcgacgacgtgttgttggagttgggatttagtattggtgaggacgttttttttttggtttcgtatttggggggtgaggaggttgatttttcgcggttttagtattttgttttttatggagagattttattttttgtttcgggggttcgaagaagtttgtagagggagaattatgcgggtttcgtttttttttaataatcggtcgcggttattaagaaggattggagaaaggttcggataggcggagatgggaaggaagtagtttaggtagaggtttttaggtagggttaggagttagaattaggtttttgtgggggtatttgggttgttttaagtagagtaataggataggtggggcgattgatagtggattgttttagaaattttaagttttggggaaatgtagtttttttttttatttattggtatttatataatatatatgtataggcgttggatatagtcgtttatagataggtatattttgttgagttggaattattgtattataattagtgggttttttgagtttttttggtatgtttagttttttgtttatatttgttttggattttagaagaagtagatttattttggtattatttttaggatttttaggaagggatagagatataaatttgattttgatggttttttagaaagttagaatattattgatatttttttgggttagttagagttagtgggagtttaattttttagagtcgttgagtttcgcgtggtattagtgaattggggaagttttttagaataatttagttagaggaggtgggatagcggttggattttgattgtgggtaaagaggtaggtatttttagggaggttgttttattttgttttttttttataga

SEQ ID NO: 1282 - DNA, 6224 bp, Artificial Sequence
  chemically treated genomic DNA (Homo sapiens)
  unsure 3998: n is a or g or c or t
tttgtggggaagagatagagtaaagtagtttttttgggagtgtttatttttttatttatagttaggatttagtcgttgttttattttttttggttgggttgttttagagggtttttttagtttattggtgttacgcgaagtttaacggttttgagaagttgagtttttattggttttaattgatttaaagggatgttagtggtgttttggttttttggaaggttattaaagttaggtttgtatttttgtttttttttagggattttaagaatggtattaaggtaggtttgttttttttgggatttagggtagatgtgagtaaggggttgggtatgttagaaaggtttaggagatttattggttatggtgtagtgattttaatttagtaaggtgtgtttgtttgtgggcggttgtatttaacgtttatgtatgtatattatgtaagtgttagtgagtagaaagaagggttgtatttttttaggatttgaggtttttaagatagtttattgttaatcgttttatttgttttgttgttttatttgaaatagtttagatgtttttatagaagtttgattttgatttttggttttatttgaaagtttttgtttaagttgttttttttttattttcgtttattcggatttttttttagttttttttaataatcgcgatcggttattaagaaggaacgggattcgtatggttttttttttgtaggttttttcgggttttcgaggtaggaaatggggtttttttatgggagataggatgttgaggtcgcggaaagttagtttttttattttttaggtacgaggttaggaaggggacgtttttattaatgttgggttttagttttagtagtacgtcgtcgtagtttagtttggtaagtagttcgagtagtcggtttatagaggcgttagggcgtttttgttaggcgtttagtagtttgttagtggggttcgtttgtgtttttagttgtcggatttttaagtatttaaagtttatttttttcgttagcgcggtttagtcggtcgttatttgtgttcgtacgtttaagaatagagataggcggcgtcgtattcgtatgttgagagtagttaggggaagggaggatgtggaggagatcggggtcgtagatttcgcgtcgggattttttgtagttatggcgggcggttttggagttttagcgcggtcgggtcgtattgtttgttagcgtttttttttttttttggtattcgttdcgtttcgtcgttttcgtttttcgagaagcgtcgttytgttttataatttggagtttcgagtaaaagtgcggaggcgggggtgtttatttttatttttgaggtttcgaggcgggtgatgtggggggcgtaagaagtaggaatttgttttttgagatttggagaggtttacggtatcgttttcgagggtttggtgatggtgttagtaggttggcggcggagtgaggacgattttttttcgggggttgtaggaaacgggttttgttttttgggatttggtggagttatagtttttttacggaggaatttgaggggtttatacggttttgttttcgaggatggcgaggaggggataagtgggaaggtattagttttgttttttattgtttttggggaatacgtaattttgttagtaggggtatgggaagatttttgttgtgtttttcgaggtgggagtgggaaacggatagttgttttttggagtttgaggtatgtcgtggttttgttttcgaaatggttggggacgttatgatattaggttggggagtataaggtattttgttttttggtgtttgtggaaagtttagtattattttttagggttttaggtgaagatatggttttgttattgggagttaagggggtacgtggttttgttttttaggtttagggatatagttttgatttggggagttttggtttatttatttatttattcgataagtatttattgattatttattaagtgttaagggtgtcgtaggtttttcggatatatggtatttttttgttttggtggagattttagtttagtacgggaaatgggtattaataaaattattttaattgggtgtaaaattggtaaaagtgtgaaatgtttattttttagttagagagtttgttatatttcgtatgtttgtaaaatttgttttttcggttagttcggaagtttaaattttttgttttttcgaaagaatgggaaagtttaattacgtcggagtaggattcgggcgtttcggaagtatttaggttttttagttcgggtattgggatcggagggatagtagagttttttaggaagtgggtagaggaattagagtttcggtttttatttttagtttttaagtagtaagcggttttggttgtttagtttttcgtttggttgcgggtaggagatagggatttgggggttaggtttcgggtttggttataaaaggtggaaagattttcggtttgtatttttgggcggggattcgtaaagatatattttttggttggttgcggtaggttaaggtaggcggggtattgagtggaaagttcggttgggcggtgtttgtgggtttttttatagagggtttggtaggcggtggcggggaggggcgggtttttaggtcgattttttttgtggttggttgaggttggaggtggacgggatttttggagggtcgttcgcgtttgttcgtagagttgtgggcggagttgaggttttggaggttgagatgtggttttgcgcgtgtgcggacggttgtttgttaatttcgcggttagttttcggattggtggttggtttgtagggttgatttgcgtaatgtagaggttgtaggtagtgttgggttatttgaggggttcggtcgatttcggttggatgtcgtaggtcgcgttttgtttgagcggtgtttcgtaggtttcggtcgcggacgtggtggtggtgtacgggcggcgtacggttatttgtcgggcgggtcgcggcggttttaaggtgaggttcgagggtttgggcgtcgagtgtgggaagacgtcggcgcgggttggggttcggttcgtatgtttggttattttggacgtcggaggtagtttcgtatttagttgtggtcgttttgtttttttggggtgggtatgggggagtgggggttattgcggttgttttttttgttgtaggatattattttcgacgagtttttttcggtagttatgatcgcggtttttaaggacgtgaatttgaggtcggaatagttgggggatatttgtgtcggtgagcgaattatttaggttttgcgttggtttttttcgttttttcgttcgtttagagttttttttattttttcgtttcgaatttttattgggggaatttttatggttttgatttttgaaggggttttgtttttttatatttgtgggtatttttcgttagatgggaggagagattgagaaaagaaataagacgtagagataaagtgtagagtgggtttaggtgatcggtatcggttttcgagtttttttagtatttattgattattatttttattatttcggtaaggggagtgcggtagtgtgggggaaaggaagagagattagattgttattgtgtttgtgtagaaaaggaagatagaagaaattttattttgatttgtattaagaaaaatttttttgttttgagatgttgttaatttgtagttttagttttaattttgtgtttatagaaatatgtgttgtattgaattaaggtttgagggatttagggttgtrtaggatgtggtttgttaattatttgtttgtaggtagtatgtttggtaaaagttatcgttattttttattttcgattaattaggtatatagtgtaatgcgaaaggtcgtagggatttttgtttaagaaagtttgggtattgtttaggtttttttttattgagattgtttgagatatggtttagtgggaagggaaagattttatagttttttagttcgatattcgtaaagggtttntgttgaggagtattagtaaaagaggaaggtttttttgtagatattcgtaaagggtcggtgttgaggagtattagtaaaagaggaaggtttttttgtagttgagataagaggaaagtatttgttttttgtttgtttttgggaatggaatgttttgggtgtaaaatttaattatatattttatttattgagataggagaaaatcgttttatggttgtaggtgagatatgttggcggtaatattgttttttattgtattgagatgtttgtgtaaagttaaatataaatttggtttatgtgtatatttaggtatagtatttttttttaaatttatttatgatattgagttttttgtttatatttttttttgttgattttttttttattattattttatagttatggtatataatgttatattttttttgttaagatagtagagatagtgattaataaatattgagggaatttagagattagtgttggtgtaggtttttaattgttgagtattagttttttgggtttatttttttttttttatattttgtttttgtgttatttttttttttagtttttcgtttttattttgcgagaaatatttataggtgtggaggggtaggttttttttaggtaaaacggggtgaatagggtgatggtggggagaaggttagtaggaaaatatgtgagtaaaggaatttgtattataaataagtttaagggaaggtattgtgttgagatgtgtatgtaggttagatttttgtttttttttatttagatattttagtgtagtaaagagtaatagagtagtattgttgttagtatatttcgtttttagttatagggcggtttttttttattttagtaaatagaattaatagtcggttttatatcgagatatttcgtttttagggatgtgcgggaaatagaggttttttttttttattaattttttttagtatagattttttataggtgtcgggttgggggatagtaaggtttttttttttttacgaggttatattttaggttgttttagtggggggaaattttggataaatatttaggtttttttgggtagaggtttttgcggttttttatagtgtattatgtttttggttaatagagaatggagaatgacgatgatttttattaagtatattgtttgtaaatatatgttgataaggtatattttgtatagttttaaattttttaaattttgatttaatatagtatatgtttttgtgagtatagagttggggttaaagttatagattaatagtattttaaagtagaaataatttttttttgtatagattaatatggagttttttatgttttttttttttatatatatacggtaataatttgattttttttttttttataatttttagtttagttttttattttattttttattttgaaatatagtaatatgatatggtaagagttttatttagcggatgttatttttaggtcggtaattattgttttatttttttggggtgatagtagggtttataggaggatatttggggagatgtgtatttttagaaatttttattttatttttaagggtagataatttgtttatttgtgttgatttggaaaagttgggtgtatgggtaagtgagcgtgggatttttagggataggagttggtggatgattaggataagttgttgtatggttggttttttttgttttaaattttgatgttttagagttgtaagtgagtttgttaagggttagtgtttcgaagaaagatttggaatgttttatttttggtttttatagttatattttagtgtttagaatattatcgtttggtattgaatgaaagtttgttgtttataggaaatgtgttgtagtttggggtcggggtaattatggttcgaatcgtttagtttttgaggtaaatttttttagttttagttatgggttggttattttgatattttattgggtttaggttttaggaaatttagtgtgtaggttggggaggataaggttggatattagaatgaggtaacgagagtttttggttttttgtttttgtggatttaattttttttttattttgaagtgttgagttacgatatataaaatttttgggattggagtagaagttttttgtagtttgatttttagttaaagttaggttgttatttgttttttgtgagtgtggattttgtttttatttgttaggtgagtaattaagtaagaatgt

SEQ ID NO: 1283 - DNA, 6337 bp, Artificial Sequence
  chemically treated genomic DNA (Homo sapiens)
taaatattttttaaagattttatgtgatttttattgttatagatgatatgttaggttttttagtgaaatttttggtgtgtttgtaattaaaatgtttttgtttgatattaatgatgataatttttattgaggttaaagttaaaataaatagggttgtggaagtagataattaagatataataatttggtaaagataagtaatttgggattaaatttaagtttttttttagaggtaggtataaagttattaagtataaaataatgagtgattttttttattatattattatagaaataatttgtagaaaattaaatgttagtttttatattaattttaatatttggattattgaattttaagtttgaatattggaaatttttttaggtttaatagttttatttatttttttttaaatttttgtatttgttttgggagtggagggaatgttggaatttagggtttgtaattatttttgaaattagtagagaaattttgagatgttgaaagtgatttttatttttattaagattttttttttttattaaagttagaatttatttagttgtgttttttttttagtaatattttattttattttgtcgttttaaaatcgtttttttataatattatagttggaattttttttgatttttttttaagttttgaatatttaattgtttaatttaatgtattgataaattattaataatatagtatttttttaaagagttaaattattaagttatttttttgataggtttttttagttatttttttaaattattatatttataaaagatgattttttattatagaggttttattttgaaaaaagtaatttttttgtaagtttagtttagagttagtttgagatggaatggttatgttatgtgttggaataaagataatgttgtaagaattggttattttttgtatttttaaggttgttaaatgtttttatttaggtttttgattttttttggaagttttttaatttaagtagaggttaatgttttttttagttgtttttataaatttttttagtagttttggtaggtattaatgtgtttatttaggtgtgtttgatttttagagttaatagtaatttgtaattgttgagtatattgtgaagttatttataatataaaaaatattaagaataatttttttagtttaggagttgataaggatttgtaggtaggggtagaagtgaattggaatgtatgtatttttttatatgtatttggtttttttttttaagaaaagtatagagaatttttaataatgtagaaagtttagggtgggtaaaatttattagaagaagaaggtatgagtattattttgttggtgtgatttgtttattaatattagtgtgttgttataatgtttaaattaatatagattttatttaaaaaaaaagttgatgttacgtaaaggttattgtagttagaatttggttataattttaaattgtaagaaaattaaatgtatttatttttttagaatataaaatgaaataaataaataaataaatattttattagagttttagtgggtatttatttatagtatcggaggtgattgggttttttttttttttaattatttatggttagatttttttagtagatagtgttggagtgttatttttaataatttgtttatatatgaaataaatgtgcgtttttttcgtaagtaagaaatttatttttttgtagaaatagtggaaaatttatttttattttttgtgtgaggagtaaaagttaatttaattcgattttgagtataaaagggtgttttgagtagatttttttagagttatttttaaaattttttttatgtttttttggttaatttatttaaaaaaaaaaaaatgtttttttttatgttgtttatttagttttttttttttttttttttaggttttttttgggaaaagagtagggagatcgtttttgaattgggatattgtagttatttttgtggtgttggttgtttattgttttagtatattgtttttttttttttttttttttttttttttttttttttttcgtttttgatagcgttttaaaagttttgttttatttttttttattttggtattttgagattttatttttagtatttgcgttttaagggtttttaagttcggattttgtttttttgttagtaagttttattaagtcgtcgggcgtttgtgttttttcggtttttttagttttattcgttcgcggtattttggtaattttgttttgagattattttattagagatagttttaatttttgagaattatttttattgatagaggtttttgagtgacggcgtttttttaggtataggagttagggaaagatgttgagtagttagtttttgcgagtttttgttttggagttttaaggaagcgtacggagtttaaattaattgaagaagaaaataaataaaattatttttaggagtaggaattataatgataggatgtttagtttttaattttgtatgattttggggtatataatttagtttttggagttcgagtttattttttttttataatgggtttaataatagtttttatagggtggtttggagtattaattgttaagttaatttaaggaaagggttgagaatagtgcggggtaaatagaaaatttttaataattgttagttaaaaatatttcgcgttgaggggtttgagtataaattacgttaagtgtttttagaaattagttgaaagatgagtagaagcgtaatttttaatttttatttaaattttaaagattaagtttatttgtgtttaaagtataagtttgagttaatttgtggattttatagttaaaaaaataaaaaagtggttatatggttgttaatagaaattgtgggatttggttgagaatttttgggggaggatatttatttattattgtattttagaggtagtaatgtgttttgtatttgttgtgtatttgaatgtttttattagcgtggatggtattttagtttttatttgggttttttttgaatttgtttttttttatttggcgtagttttggatatcgtatttattttaaaggtatagatttgttaatagttttaaaaaaggtgtagatggattttttattggttagatgattaagtagtttattggtgtgagagggaatttgatttttaggagagattttttttttagagatgataggatagaagagaggagatagtaatggtgtggttagtaaattttagtgattgatagtgttatttttttatttttggtttttaaggtttttattttagagagatcgtattttgaaaaggttgttatttttttggtttttgaagatgttggattaatgaattagtgttgttttaagaaaatgattttgaaaaaaaagtataaagtattatttattgaaagaaataataataataataggaaggaaaattttttttttttcgtaataatttcggagttattatatttattgaattgggttattttagattgagttgagaatatttttgttttttttaacggggttataagatttagtttaaaattttaagattaattgtgtagattttaagtaattgttttttttaaatataaatagtatttttttaatttaaataatttgaaagtggattaaggttggaggaggattggtaaaagttgattaatagatttatttttatttaaatgataattttttttttttgttttttatttatcgaagttttaaagattttgttgtgattgtttttttggaaggtttttgttattgaagtgtgtgaagttatttttggtttgaggagttggaaattttatacgagttaaggattgtagtggcggtagttgggacgtatttgtaacggtgttagtttgtttgaaagtagaaaattagtaattttaaagtttagtttggttgtttagtttgtagaaatgatagggcggagtagaaagagagggagaaaggagatttatttttggaaagggagtttgtcgtcgaaaattgggttttttttgttggaaattttagagatatttttagtgtaggtttttggtttgtttaggatttagggaaggtttggtataaaggagaaggtgtttaataaatacgtatagaaggggaaaatgaaggaagtaagaacgggaggaatgtttttggttatttggtttttttgtgttttatttttttttagatgagtagatatatagggagaatttagagtaagtttagttatgggaaaaggaatttttttttttatttttaataaggtagagtttagaataaatgataatttgagtaaaattttatttatttgaagttatataaaatagatttggaaaggtaaattttgtatttattttaagattgaaaatgttattttaagtttttagtaatcgttatttaatttaattgtcggaaaaagttttcgagataattgaagtttatgaaaaagagaaataaatatttttaaattaggtgattttttacgtttaggattgggagggtaggtcggtttttggtgttagttgaaagggatttttatttattattattattttaaaatgtgtgtttaattgtaaaaagttggattgttttggttatttttgtgtgaaatattttttaagtgattttttgttttagtttatttagagagtgtaaatgagtaggttggggatttattgtcgttttagtagaaatatagtaaaattattagcgttaaaaggggtagtatatagtagattgtttgtagaggaaaggcggaggtttgtttagatagttttcgcgggggttgcggtgggatatgttaatagtgtttggttattggggtcggtttttttttcgaaagaatatataaagaattttaattttagtttgtttatttaggttaataggcgtttgtttttgttaattatcggagcgatagattagggagtttcgttcgggatttgttcgtcggcggaggcgttaggttttcgtttttttttatttttttcgttgtcgtttaggtgtatcgtttgttttttagtaggatggacgtgatggatggttgttagtttttattttttgagtatttttacgacggtttttgtatatcgtttttcgagggtgaatttggggacgagtttgtgtcgcgagtggttgttttcggagcgtataaagtagagttgtagggtttagatgaggacgagtacgtgcgagcgtttatcggttattattaggttggttattgttttatgtgggtttgtaaagtttgtaagaggaagtttattattatggatcggcggaaggtagttattatgcgcgagcggaggcgtttgaagaaggttaattaggttttcgaaatttttaagaggtgtattacgattaattttaattagaggttgtttaaggtggagatttttaggaatgttattcgttatatcgagagtttgtaggagttgttgagagagtaggtggagaattattatagtttgtcgggatagagttgttcggagtttattagttttatttttaattgttttgatggtatggtaagtaatagatttggtatttgttaggttattttaattttttttaaagtttttatattttatttaatttggtgtggtggggagagtggggtggaggtagatgttgagttgttttaaaagaagagaggggtttatatttagaaagattttttaaatcgttgttgaataagattttagtttaattttttagtaggttttaggtgtatattgtaatcgagtgttgatatggaagatgggtggttgtgaatgattatttagatgttttttttatttttgaatttatttttaaaatatgttatttgtggattatgttttacgttaatatttaaaggtatcgtttttaatttaatgaggaaatggaaagaaatatttatacggttttagtttttgttttaatgaggtttggttgaaagatgttgatgtattttttttagagggcgtttgttttaaggttgttaggttttaatgtgtttttgttttgggaaagtgttttttttttgaattagtgtggtttttttttattttaatttattttgtatggttaatttaatgtatattgttgttgaattttatttttttttttttttgttgttgttttttttttttttaagtatagagattgattttagtgttttgggaatttggagagggttagttttttttaaattaaggtagtgaaggtgattgatagtgttcggttatagagttggtgggtaagtatagttttatttttggttagaatattttttgttaagatttgaaaataaattttgttgtgtgttttgtattatagt

SEQ ID NO: 1284 - DNA, 6337 bp, Artificial Sequence
  chemically treated genomic DNA (Homo sapiens)
gttataatataagatatataataaagtttgtttttaggttttggtaaaagatgttttgattaaaggtgaggttgtgtttgtttattagttttgtaatcgaatattgttaattatttttattgttttgatttaggaagggttagttttttttaaatttttagggtattgaggttaatttttgtgtttgaagaagaggagagtagtagtaaagggaagagggggtggaatttagtagtaatgtgtattgggttaattatgtaaaatggattggagtagaagaaagttatattaatttagggaaagaatatttttttagggtaaaaatatattaaaatttggtagttttggagtaaacgttttttaaaaagaatgtattaatattttttagttaggttttattggagtaggaattggggtcgtgtgggtatttttttttatttttttattaagttagaaacggtgtttttagatattagcgtagggtatgatttatagatggtatattttgaaaataaatttaggaatggagaaaatatttgagtgattatttatagttatttattttttatgttaatattcgattatagtgtatatttagaatttgttagaaagttaaattaaaattttgtttagtagcggtttggggagtttttttaaatgtggatttttttttttttttaaagtaatttagtatttgtttttattttattttttttattatattaggttaaatgaggtgtaaggattttagaaaagattagggtagtttagtaggtattagatttattgtttattatgttattagagtagttggaggtggggttggtgggtttcgagtagttttgtttcggtaggttatagtagttttttatttgtttttttagtaatttttgtaggttttcgatgtagcggatggtatttttgaggatttttattttgggtagtttttggttggggttggtcgtggtatattttttgagggtttcgaaagtttggttgattttttttaggcgttttcgttcgcgtatagtggttgtttttcgtcgatttatggtggtggatttttttttgtaggttttgtaggtttatatgaggtagtgattagtttggtggtggtcggtaggcgttcgtacgtgttcgtttttatttgagttttgtagttttgttttgtgcgtttcgaaggtagttattcgcggtataaattcgtttttaaatttattttcgggggacggtatgtaggagtcgtcgtagaagtatttagaaggtgagaattggtagttatttattacgtttattttgttgagaggtaggcggtgtatttggacggtagcgagagggatggggagaaacgggagtttggcgttttcgtcgacgggtaaatttcgggcggagttttttagtttgtcgtttcggtaattaataagggtagacgtttgttggtttgggtagataagttggggttggggttttttatatattttttcgggagggaggtcggttttagtggttaggtattattagtatattttatcgtaattttcgcgggggttgtttggataaattttcgttttttttttatagataatttgttgtgtattgttttttttgacgttaatggttttattgtatttttgttggggcggtagtgggtttttaatttgtttatttgtattttttagataggttaaaataagggattatttaaggagtgttttatataaaagtgattaaggtagtttaattttttgtaattggatatatattttaaaatagtggtaataaatagaaattttttttagttggtattaagagtcgatttgtttttttaattttgggcgtgaggaattatttgatttgggggtgtttgttttttttttttatgaattttaattatttcgaaaatttttttcggtaattggattgaataacggttattaaaaatttgaagtggtatttttaattttggagtgaatatagggtttgtttttttaaatttattttgtatagttttagatgagtaaagttttgtttagattgttatttattttaggttttattttattgagagtagggagggaggtttttttttttatgattgggtttgttttgagttttttttgtatgtttgtttatttaaaaggaggtggggtataggagggttaggtgattaggaatatttttttcgtttttgttttttttattttttttttttgtacgtatttgttgagtatttttttttttgtgttaggttttttttagattttgagtaggttaaagatttgtattgaaagtgtttttaagatttttaatagaagaagtttagttttcgacggtaaattttttttttaggggtgagttttttttttttttttttttttgtttcgttttgttatttttatagattaaatagttaagttgggttttggggttgttaattttttgtttttaggtaaattaatatcgttatagatgcgttttagttgtcgttattgtaatttttgattcgtgtaaaatttttaattttttaaattaggagtaattttatatattttagtgataaaagttttttagaaaagtaattatagtagggtttttagaatttcgatggatagaaggtaagaggggagggttgttatttaagtgggaatgaatttattaattagtttttattaatttttttttaattttaatttatttttaggttatttgggttggggaggtgttgtttatatttaggaaaagtaattatttaaggtttatataattagttttggggttttggattaggttttgtggtttcgttgaaagaagtaggagtgtttttaatttaatttagggtaatttagtttaataaatatagtggtttcgaagttattgcgaggaggagggagtttttttttttattattattattattttttttagtgaatggtattttgtattttttttttagaattatttttttaaagtaatattggtttattgatttagtatttttaggggttagagaagtagtaatttttttagggtgcgatttttttaaagtgaagattttgaaaattagaggtgggagagtgatattgttagttattaaggtttgttagttatattattgttgtttttttttttttgttttgttatttttaagaaaaagattttttttgaaaattaggtttttttttatattaatgggttgtttaattatttgattagtgggaaatttatttgtattttttttagggttattaataagtttatgtttttgaaatgaatacggtatttagggttacgttagataaaaagaggtaagtttaagaagaatttaggtggaaattaagatgttatttacgttggtggaaatatttaaatgtatagtaaatgtaaagtatattgttatttttgaaatataatagtgggtagatatttttttttaggaatttttagttaagttttatagtttttattagtagttatatgattatttttttatttttttggttgtggagtttataaattagtttagatttgtgttttggatataaataaatttggtttttaaagtttgagtgaaagttagaggttacgtttttgtttattttttagttaatttttgaaagtatttaacgtgatttgtatttaagttttttagcgcgaaatatttttaattaataattattgagaattttttatttgtttcgtattgtttttaattttttttttagattaatttaataattaatattttaaattattttgtgggagttattattgggtttattgtagaaagaaagtaaattcgagttttagggattaggttatatgttttaaggttatataggattggaaattaggtattttgttattatagtttttatttttagaggtgattttgtttgtttttttttttaattaatttaggtttcgtgcgtttttttagggttttagagtagaaattcgtaaaagttggttatttaatatttttttttggtttttgtgtttgggaagacgtcgttatttaggagtttttgttagtaagggtagtttttagaggttagagttgtttttggtaaggtgattttaaaataaagttattagagtgtcgcgagcgagtggaattaaagaagtcgagaaaatataagcgttcggcggtttaatgggatttgttagtaggagaatagggttcggatttgagagtttttgggacgtaagtgttgaaaataggattttagagtattaaagtaaaaagaaataagataaaatttttaaaacgttgttaggggcgagagaagaaagagagagagagagagagaaaaaaaaaaggtaatatgttaagatagtaggtagttagtattataaagatggttatagtgttttaatttaggagcggtttttttgttttttttttaggggagatttggaaggggaaaaagaaagaattgggtgagtaatatagagaaaagtatttttttttttttgagtgggttggttagggaagtatgggaaaagttttaaaaatggttttgaaaagatttatttagggtatttttttgtatttaaagtcggattagattggtttttgttttttatataaagaatgaaaataagttttttattatttttgtaaagaagtggattttttgtttgcggagaaaacgtatatttattttatatgtaaataggttattagaaatgatattttaatattgtttgttaggaaagtttaattataggtagttgagggggaagaaaatttagttattttcggtgttataaatggatatttattaaggttttggtgaagtatttatttatttatttattttattttatattttgaaaaaataaatatatttgatttttttataatttagaattataattaggttttaattgtaatgatttttacgtaatattaattttttttttaagtgaaatttgtgttagtttaagtattatggtaatatattaatattgatggatagattatattagtaaaatgatgtttatattttttttttttaataaattttgtttattttaggttttttgtattattgaaaattttttatgttttttttggagggagaaattaaatatatatagaaggatatatatattttaatttatttttgtttttgtttgtagatttttattaatttttggattaagggagttgtttttgatattttttatattatagatgattttataatgtgtttaataattgtaaattgttattagttttgggaattaggtatatttaagtaaatatattagtatttgttagagttgttggaagaatttgtgaagatagttgaggaagatattggtttttgtttgaattagaggatttttaggagagattaaaggtttaagtaaggatatttagtagttttgagagtatagaaagtagttagtttttatagtattatttttgttttagtatatggtatagttattttattttagattgattttgaattaggtttgtaaaaaaattgttttttttagagtgaaatttttatgatggaggattattttttataagtgtaatagtttaagggagtgattggaggggtttgttagagaaatagtttggtggtttggttttttgagaaaatattatgttattgataatttattaatgtattggattaggtaattagatatttaaagtttaaaaaaaagttaaaaaaaattttagttatggtgttgtgggagagcgattttgaaacgataaaatgggataaaatattattagaagaaaaatataattgggtaaattttaattttagtaaaaaaaaaaagttttaataaggatagagattatttttagtattttaagatttttttgttagttttagaaatagttgtaaattttaaattttagtattttttttatttttaaaataaatgtaagagtttgaggaaaaataaatgagattgttagatttaagaggatttttagtgtttaggtttggaatttagtgatttaggtattaaaattagtatgaaagttggtatttgattttttgtaaattatttttgtagtaatataataaagaaaattatttattattttgtatttgataattttatatttgtttttggaaagaggtttgaatttaattttaaattgtttatttttattaagttattatgttttgattatttgtttttatagttttgtttattttggttttggttttagtaaagattattattattaatattaaataaaaatattttaattgtaaatatattaaggattttattggaaagtttaatatgttatttgtagtagtggaggttatatgaagtttttgggaaatatttg

SEQ ID NO: 1285 - DNA, 5858 bp, Artificial Sequence
  chemically treated genomic DNA (Homo sapiens)
gtgtcgttttgtagttagtatataattgaatatagatttttggaattaggagtgagagtaaagagtaaaaatgtgttttttgaattatttgaagagtagtttcgttggtttttttttcgtttgttttagatttatttgtttggtgttgtttttaaaagggtgttttatggtgggtttggaaatcgaagttttttttaatttaggtttagttttatttttacgtataattttttattgttatttattggagattgtagaagattcgtttttaatattttttttttttttttgtttggtttatgttttttttttaggttttttgaagtgatttagatgttttgtaggtttaagtgtaaaattatttttattatagcgtttgggaatttttgggtataaattgtttgtcgattaggtaaattataggtgtaggagtttatgttatttatttagttgttataaattgaaagtattaatttgttttttttgagttttgttttttagttagcgggttttttttttattttttattttttatggttattttttgtttttgttgggtgatttttcgttttgagggttagtttgcgttttgtttattttgttttttttttttttttttttttttcgtttttttatattttttttttttttttattttttatagttgaaagagtataattatcgtttattcggtttttagttttgttttattagttgtggttgaaattgttttttttgaatttgattatgtaattaaattttttagttattatttatataaattttttttttagtttttgatagttatttatgtttgttttttttttgagttttttttgattgttattattattttgttattttttaaaggttttttaaaaagtttgaattttgttttttagaaatgttattataatattttaggaatttttgtttttaaattattttttttttaagttttttgtttaggagtgattttattgttatatatttttagagaattatattttttttttttaaagtttttaattcggttatttatttgtgtgatttttaattagtattttgttttttagtaaattggaaatttaatgagggtataaatatattaagttttgttattagagcgattagttttaatatttttattttgattaatataaatttttaaattttttagaaatattttttttattaaatttaggttttttagtgaatttattatgattttttttattagaggttttataaattgagtaggagaattaatatttgttgagtgtatattttatattatgggtttaaaatatattatttaatttagtgtgaaaagaaagtttatgatatgtgtaatgtatatgttttttgatttttaataaaattgtggttagaaatatatatttaagaatggttagaatatagattttgtttttttttaaaggttttttttttttttattatatatgtaatatttttaaaggtttatagttaaaatttattgatgtgagttagttataatatttttttttttatttttttttatagaaaagaattgggaggtatttaggtttttttggggggaaaaaattatttgtaaatgaataagtatgaagtaagaataatagggtggtaaattatatgaaaattttttattttgttattaatttagttttagattttatgatgaatgaagtttagtttttttggagtgattttattaatgataatattattatttttttattattatttattttttttataattaaaaaaatatttggattatttaaagtttggaggattgtagtttatgtaaaattgatttgattatttgttaaggtttgtgtttttaagttttattgagaagtgatataattgtaattataggtattttatattttgtaaatagtttgagttttaagagtttattagttagaagtttggtattagtgcgtatttttttattgatttaatttaataaagggtgattattttttaagttggtatttttttgttttttttttttattttttgtttttaatttttaaaataattataaaaaaggggaaaaatttgtttaaattagggtaaatatttttattaattttattggtttgaggtttagagcgtgttggaaaaggggatttataatttaataaggaagaatttaataggtgaaagttgattttatattaataaaagttatttttgtttaagaagttgtttttgatttgtattttaaagttttatatatttttttaaaaaaataattttttttttatatttttaaattggttttttttttagtggtgatatttgaatgaaagaaatagaaaaaggaaaaggcgaatttttatattttttagcgggtttatgatatgaaggttttttaatatttatttgatattttttaaaattagtggtaagtttaagaatggtaatattttaaatgtatttttttatttaggttttaaaattgtttagtagtgatattttttttttttatttttttttgaatatattaattttaataataaaagtatttttagagaggatgttatatttttgaggtgggttttatgtttttaaaagtttaatttttataatattttgtaaatatggatattttttgttattatgttaatgttacggattaaatatttgagaatttgagatagtagagtttattaaatttttataggttttaaaagattataatttaggttttttttattttaattttaaggttattttttttatttggtttgttaatttaatttatttttttagatttagattttatgagaagagagattttttttaatgttttatttttagtatttaggatattatttggtatttagtaggtatttaataaatgttgaataaaaaaaattagttatttttattttaatgtttttaatgatttttattataataattttagttaattttttaaattgtttttatatttataagagataatataaagtgtggttaagagtataagttaattttttataatagatgttagattatattttgagttgttgaaatttttaatttgtagttttaattgttgatttgagtaattaagaaattggcgaaaatagaaaaaaaaaagttatagaagaagtattggttttttgtaattttttttttttttttttattattttaaaaatttaagaatagtattaaatttgataaggaataaaaatagttaaaaatattaaagtttaatatttagtttgtggtttaatagaaatcgtgaagaattattttttagaataggcgatttgattagttaatttttaaattatttgatagttgattttttgtattatttttattttatttattttttaaaataaagttataaagaatatagtttataattattattgtttggggtagagtaataagattttatgtttttatatagtttttgaggtattgattataaagattaaaattaaggttaattgatattttaaaggttagttatagttaggaagtttttttagagttttaggaggaaaggtgaaaggaagggaaagaataataaaatagagagagggaagaaaaagaaaaatttttttaatagttatgttttattttatttataggaatgagtttttgttttaatatggttttatattataaatgataattattgtttattaagtagttatgtgttatgtgttttatatgtatggtattatttgattgaatttttattaaaattgtaaggaaattattattattttgaagatattaagatttagtatttatttatggatatatatatagaaattaattttgttaggatttgatagttttttggaatttagggttttcgtatttgatttttatattgtattgtttttcgaagaataatatatgtattttgtggattatgggtaagttgtaatttaaaaaatgttgtttttttgttcgtgttttggttgttaattttttttatttaaattttattaaataatttatttggagttaatggatagtgagaatgtaaaagaaaaagtggtgagtatatagtgtgtagaattggaattataagagaggtattttggtatggggttataagtaaatgttgaaatattaagtagttgtggtgtgagttttgtttttattaaaattatttttaaggaggagttattatatgtattgtaattttattttttattttattttttattttatatgtaatattggttttataaatggaagggtatagaatttagattttggttgtttttttttttaaaggaaaaaaaaaaaaaagatagttaaggacggtttttatggaaggatttagagaattattttatttagtattatgggatgtgagtattttttagtaattttttttattttttaaattattttgtagttttagtaaaagagaggaaagagatttatttgtttttattgaggttgaagtttgaaagttatgtataatttttgaagtattgtaatggttttaattataggaatagtatttttttgagaggtaggagagagaaaggagttgaattattttgtaaatattaattcggttattttggagtaatggttattgtttttgaaattttttattatgggtttatatttagaatttagatgagcgtagggggaggggaatagggtaatgttaatttttagttgttttgaagttgttttgtaagtaggttagtatttaaattgtttaaaatggaagggtttaatgttttgtttaagttatgtgattttttttgtgtaatttggtttgtatatagattgttataatattttgggaggtgatattttttagtttttttttaaattagatgttttagagagtattagttgtaattatattgggagattgatgttttatgatagttaaaagttggattgagttttaggagttattatatataaagttgggttaatttatgttattgtattaattaaatgttatttgggtggtttttttgggtttttgagtttattatttagtttagatcgagttagaggttaaggaggagaatatgatgatggatttttttgaaattggtttttattttttttatttggatggggaaaatgttattttgtagttattagaagtggtagaaggtttttttttgtatttagggagtgatggtattttgtttttttgttaggattaaatgttttcggaagcggggagcgatagtagcggagaggaatatgttttggcgttttcgggtttgtagtttttatattgtttcggttagtgtttgatttgggtttgtaagatttgtaagagaaaatttgtttttattgatcggcgaaaagtcgttattttgcgcgaaaggaggaggttaaagaaaattaacgaggttttcgaggtattgaagcggcgaattgtggttaattttaattagaggttgtttaaggtggagattttgcggagcgttattagttatattgagcggttgtaggatttgttgtatcggttggattagtaggagaagatgtaggagttgggggtggatttttttagttatagatttaaataagaaaatgtaagtttagatgttgtcggggtagggaaatgcgaaggttgattaaacgtttttcgcggggttttaatttttagttgtttggtttttttttttttttttttttttcgttcgtttttttcgtttcgtttttaatgaatttttagtgatttaagaagatcgggtgtttgtaataggtaggaaatgcgtattcggttcgaggaagtaggaaagtcgttttttattttattttaatttcggaatcgatgttttttttttaatttgtcgttgttttggttttttttttagt

SEQ ID NO: 1286 - DNA, 5858 bp, Artificial Sequence
  chemically treated genomic DNA (Homo sapiens)
gttggagggaaaattaaggtagcggtagattaggaaagaaatatcggtttcggggttggggtggggtggggggcggtttttttgttttttcgggtcgggtacgtattttttgtttattgtaagtattcggtttttttgggttattgggggtttattagagacggagcgggaggggcgggcgagaaagggggaagggaaaaaagattaagtagttggaggttaaggtttcgcggaaggcgtttaattagttttcgtatttttttgtttcggtagtatttaggtttatatttttttgtttgggtttgtagttgaaggggtttatttttagtttttgtatttttttttgttgatttagtcggtgtagtaggttttgtagtcgtttaatatagttgatggcgtttcgtagaatttttattttgggtagtttttggttggggttggttatagttcgtcgttttagtgtttcgaaggtttcgttgattttttttagtttttttttttcgcgtagggtggcggtttttcgtcggttagtgggggtagatttttttttgtaggttttgtaagtttagattagatattggtcggggtagtgtggaggttgtaggttcgggggcgttaggatatgttttttttcgttgttgtcgtttttcgttttcgggggtatttggttttggtagggggataaggtattattattttttggatataaaggagagttttttgttatttttaatggttgtagagtaatattttttttatttaagtagaagaaataggagttagttttaaaaaggtttattattatgtttttttttttggtttttgattcgatttgaattgggtgatggatttaaaaatttagaggaattatttagatggtatttaattagtgtagtgatataagttgatttagttttatatatagtagtttttgaaatttaatttaatttttagttgttatggagtattagttttttaatgtgattgtagttagtgttttttagaatatttagtttgaaagaaaattgagaagtgttattttttagagtgttgtgataatttatgtgtagattaggttatatagagagaattatataatttaaataaagtattgaatttttttattttgggtagtttagatattaatttgtttataggataattttaaaataattggggattaatattgttttatttttttttttttgcgtttatttgaattttaagtatagatttatgatgaaagattttaaaggtaatagttattgttttaaaatagtcgggttaatatttgtagagtggtttagttttttttttttttttgttttttaaaaagatgttatttttgtgattaaaattattatagtgttttaaaggttatatatgatttttaggttttaattttaatagaagtaggtaaatttttttttttttttttattaaggttgtaagatgatttgggaaatggagggggttgttgaagggtgtttatattttatgatattggatgaaatgattttttgggtttttttatagagatcgtttttgattatttttttttttttttttttttggggagaggggtaattaggatttgaattttgtatttttttatttgtggagttagtattatatatgaggtagggagtgggatagaggatggggttataatatatgtagtaatttttttttaaaaatagttttagtgaaaataagatttatattatagttatttgatattttagtatttatttgtggttttatattaaggtgttttttttatgattttagttttgtatattgtgtgtttattatttttttttttgtatttttattatttattgattttaaataagttgtttgataggatttaagtgagaaaggttagtaattaaggtacgagtaaggaaatagtattttttaaattgtagtttgtttatggtttataagatatatgtattgtttttcgggagatagtataatatgaaggttaagtgcgggggttttagattttaaagaattattaagttttagtaaggttaatttttatgtatatatttatgggtaagtattagattttgatgtttttaagatgatagtggtttttttatagttttagtgaggatttaattaaatgatattatgtatgtgaaatatatagtatatagttgtttgatgaatagtagttattatttgtagtataaagttatgttagggtaaagatttatttttatgaatgaaataaagtatagttgttggagaggttttttttttttttttttttttttgttttgttgtttttttttttttttttatttttttttttagagttttagaaagattttttagttgtaattggtttttgggatgttagttgattttggttttggtttttatagttagtgttttaaaaattatgtgggaatataaaattttattgttttattttaagtagtaatgattataagttgtgttttttatgattttattttaaaaaatgaatagagtgaagataatgtaggaaattaattgttagataatttagaaattagttaattaagtcgtttattttagaagatgattttttacggtttttattgagttatagattggatgttaagttttgatatttttggttgtttttattttttattaagtttaatattatttttagatttttggaatggtaagaaggagagagaagagttgtaagaggttaatattttttttgtgatttttttttttttattttcgttagttttttggttgtttaagttagtaattaaaattgtagattgaaagttttagtaatttagggtataatttaatatttattatagaaaattagtttgtgtttttaattatattttatgttgttttttgtaaatgtgaagataatttgaaaagttaattaagattattgtgataaaaattattaagaatattaagataaaaatgattaattttttttatttagtatttattgggtatttattaagtgttagatagtgttttaggtgttaaggataaagtattaaaaaaaatttttttttttatggagtttgaatttaaagaggtgagttaaattaatagattaaatgggagaaatagttttggaattgggatggggaaggtttagattatagttttttggggtttgtgaggatttaatgaattttattattttaaatttttagatgtttaattcgtaatattggtataatgataaaagatgtttatatttataggatgttataaaaattaaatttttaaaaatatgaaatttattttaaaaatgtagtattttttttaaaagtatttttattattggaattagtatgtttagagaaaaataagggagaaaaatattattattaagtaattttgaagtttgggtgaagaaatatatttaaggtgttattatttttagatttgttattgattttaagaggtattagatagatgttagagagtttttatattatgaattcgttaaaaaatatggaagttcgtttttttttttttttgttttttttatttaagtgttattattggagaaagagttagtttagaaatgtagaaagagaattatttttttaaaaaagtatataaagttttggggtgtagattaggagtaattttttaggtaagggtggtttttattggtataaagttaatttttatttattgaatttttttttattaaattatgaatttttttttttaatacgttttagattttagattagtaaaattagtgggagtgtttattttggtttaaatagatttttttttttttttgtggttgttttgggagttgagggtaggaggtgggaggagaaaataaggaaatgttagtttgggaaataattattttttattagattaggttaatgggaaaatacgtattgatgttaaatttttaattagtgaatttttggaatttaaattgtttataaaatatgagatgtttgtaattgtaattatattattttttagtagaatttggagatatagattttgataagtggttaaattagttttatataaattgtaattttttaagttttaaatagtttaaatatttttttaattatggaaaaagtaaatgataataggggaataataatattattattaataaaattattttaaggggattagattttatttattataaaatttgaaattagattagtgataggatgggaagtttttatgtggtttattattttgttgtttttattttatgtttatttatttgtaaatgattttttttttttaaaaaagtttgagtgttttttaatttttttttgtgggaagaagtgggaaggaaagtattatggttagtttatattagtggattttagttatgagtttttggaaatgttgtatatatggtagaaagagaagagatttttggggaaagatagaatttgtgttttagttatttttaagtatgtgtttttagttatagttttattagagattaaaaagtatatatattatatatattataggttttttttttatattaaattaaataatatattttgagtttatggtatgaaatatgtatttagtaaatattaatttttttatttaatttgtaaggtttttgatggaaagaattatagtgaatttattgaaaaatttagatttggtgagaaagatgtttttgaaaaatttggggatttgtgttaattaaggtgaaaatattgaaattagtcgttttagtagtagagtttaatgtatttatatttttattaaatttttagtttattggggaataagatattaattaaaagttatataaatgaataatcgaattaggaattttgaaagaaaggaatgtagttttttaagagtgtgtaatagtaaagttatttttgaataggaagtttgagaaaaggatggtttgggaatagaagtttttgaggtattgtggtggtatttttagggaataaagtttaagttttttgaaaagtttttggaaagtaataggatgatggtgatagttagaagaagtttaaggaagaaatagatatagatgattgttagagattagggaagagatttgtgtgggtgatagttggggaatttggttatatagttagatttaaagaaagtagttttagttatagttgataaagtagaattgagggtcggatagacgatgattatatttttttaattatgaaaaatagaagaaagaaaagggtatagaagaacggagagaagagagagaggagagaaatagagtgaatagaacgtaggttagtttttaggacgaagggttatttagtaagggtagagagtagttataaagaatagaaggtaaaggaggagttcgttgattgaaaggtaaaatttagaagaggtagattagtgtttttaatttgtggtagttaaatgagtaatatgagtttttgtatttgtaatttatttaatcggtagatagtttgtgtttagagatttttaaacgttgtggtaaaaatagttttgtatttagatttatagaatatttgagttattttagagaatttgggggaggggtataaattaagtagaggaaaaggaaagatattaaaggcgaattttttgtaatttttagtaagtggtagtgagaagttatgcgtagaaatggggttggatttagattaggaagggtttcggtttttaggtttattatggagtatttttttaaaaatagtattaagtaaatgagtttagaataagcgaagggggaattaacgaggttgttttttagataatttaagaaatatatttttgttttttgtttttatttttgattttaaaaatttgtatttagttatgtattagttgtaaaacgatat

SEQ ID NO: 1287 - DNA, 6277 bp, Artificial Sequence
  chemically treated genomic DNA (Homo sapiens)
aaagaaagtttgagaaattgttagttaggaagattttttgtttttttttaattttttttaaatttaaataaggttttaggttataaagaagattttaatgagatatgacgattaaatgtaatgtggtattttggataggattttgaaatagaaaaaggatattaggtaaaattaaggaaatttgagttaagtatgtattttagttaattataataagttattattggttgattaattgtaataagtgtattataaaaatgtaagatatttataataggggaaattggttgtaggatatatgggaattttatattatttttgtaatttttttgtaatttaaaattgttttaaaataaaaagtttattattattattattattattattattattttaaaaagtttttttgatttgttttaggttggaattgggattagaatttaggttatttggatttaagttatttttattatttaagaggttttattattacgatatgtaaggtaagtgtgtgtttgtgggtgttggaggtataggatgagagggggtttataagtattataatatgatgttatttaggaagattaaggtaatatgaagtttatggaattgggttggaagtatttaaagatttaagaaaaaaaattaattgtttgaagtaattaggtgttatggagttaagtatagagatatataagttggttaaatagtaggtggttaggatataggttagaagattggggtataaaagattagagattagatagatatattaggatatataagattagaatttagaattatagtaataggtatcgggaataaaaataatagtaataggttaggtgtagtgagttatatttataattttagtagtttgggaagttaaggtaggtggattatttgagtttaggaatttaagattagtttagttaatatagtgaaattttgtttttattgtaaaatataaaaattagttgggtgtggtggtacgtgtttgtaattttagttatttatgaggttgaggtaggagaatcgtttgaattcgagagggaggtgtagattgtagtaagttgagattatgttattgtattttagtttgggcgatagagtgagattttgttttaaaaaataaaaaataaaataatttatatttataatatattttgtatataaaatttttatatatattatttatttgatattgaattaagtattgtattttttgagttaagtatagtatttttttattttttttttttagggttgtttaagtttataggtgaggggtagttagaataattagttggagttggggaagggaagaggtgggaagttaagtagtttttgatatttgttttttattttttaaaagtgtttttagttagttttattgtatttttgatttttttttgttttatagttttatttttttatgttgtttttttatatgttttttaattataaacgattttttatttatattattatttagattttttaatgaattatttggagttttttttcgttgatttaaatgttatttatgtttagtatttagttttttgaagtattaaatattaggatatgttaattttaattgatgtattatatataattagtaatatagtattgggtttttatttttagaattgggttaattttatagaattagttattattttgtatgatcgtgtagtaaggattgttttttttgttatttttttagttattttttgtagtgagtttttttaggttagtgattatgttttatttatttttatatttttattattttaagtgttgatatataataagtttttaattaaaaataatttaattggaatttgatgattattttaatttaaattgtttttttttttaaatttttttttttttgtatgtttttttttattgtatattgttttggtttgagttgtgttttttaaaaaatgttgaagttttgatttttttttattttattatttttgtgagtgtgattttatttggaaatattatttttgtagatgattaatttaggatgagggtagtgggttgggttttaatttaattatgattgtgtttttataagaaggaataatttggatatagagatatgcgtatatatagggagtttgttatatgaagatgagggtagagattgggggatgtagtaaaagttaaaaaatgttaaatgttaaagattgtttataaattattagaaggtaggagagaggtaaggaatagattttgttttatagtttttagaaggaattaatttttttaattttttgattttagatttttagattttagaattgtgagataatattttttcgttggttaagtatagtttgtattattttattatggtagttttaggaaattaatatattatttattaattttattttttaattttattattgtttttttttttgattagaatggaagttttatggggttagggttttttatttgttttgtttatgtttgaatttttaatatgtagaataatgtttggtatatgatagtttttaatatttgttgaaaataaggaatggaattttttatataaatttagatattgtttttatttgaaaatattttatataaaaatgtttttaataataaagtaataacggaaaattttaataatttaagaatatattattttttggttattttgagagggggattttaaatttttagaagttgtaattattgttgatttttatattttattagtgatagggtgtttgggattatgaacgtatatatggaagtgagcggaggttatttttcggggtttttttttgttgtttttggttttttattttgttttttttttgaataaagtaaagtaaggttaagaatatagaattcggttaggcgtggtggtttatttttgtaattttagaattttgggaggttgaggcgggcggatagtttgaggttaggagtttgaggttagtttggataatatggtgaaatttcgtttttattaaaaatataaaaattagttgagcgtggtggtggatatttgtaattttagttatttaggaggttgaggtatgagaattgtttgaatttgggaggtagaggttgtaatgggtcgagattgtgttattggattttagtttaggtaagagaataagatttagtattaattaattaataaataaaaatataaaattttttttttttttatttttattattttttttttagtatggttttaaatatttgagtggttgaatgtatgcgttttggatttataagaggataatttttttttttgttttttttttattatttgaaaaaaatagaaaacgaagaaagtatttatatttataagaattcgtttagttttttagttttttttttttttttagtatatttagtatttttcgatagttttgagaggtaggtattatttgaaggtgagaaaataggtagagtggttattattttgtatacgatatgaagaaattgtaaggcgtaggagttaggttttttaaattttagtttagtgtttttttcgtttcgttggtcgttattgtatacgttttttttttttatgtttgggtgaagaaagagtgggttttagaaatatgaaagcgatttggttttgtaatgggaaggaatagagataaatttgtaggattttcgatttagtagatattttttttagtatttttgaggggattgtgggcgaagaggagaggtttgagttttacggagtaaggattggtttcgttttttttagtgaatggtttttttttaaatatatacgtatataatatatataatcgggggttttagttatgagagttgttcgtgatagaaatggtttattagattattatgataggtattggggattagttgtagtttaaagaaacgagagatgagggtattataaagaggtagggattaaataaataaaaatagtaataataataacgataataataaagaatgaagattatttaattagaaacgataatgagggtggggagaagatagaggatgaagatagcgtagggttgggagtagaaagattatatttttgtgttggatgtttaaggattatcgtgaggagagtgagggcggttttgtttttttgatgttgagttaaattgtaatatagattttttatgtaagtatttcgttatttttaggtggtaatcggataaattttaggtgttattatggagtcgataattattagtagcgaataggacgggaagaaggttgggatagaagggtagttgtattttcgtaaacgtataggtttaggaaagaggtatttgggttgttttcgggttatttcgttttaaagttatttaagtttttgtagtttagaagcggtttttgttttttggtatcgggagacgattttgttgtagatatcgaggtgttcggaatgattttggtgattaattttaatttgaaattttcggttttgtattgtttatttttcgggttattgttgttgataaggtttttttatagttttgggttattttatagttttttaagagggttttttttaaattttttttttaggaatgtttggaaggacgggaggagtagtttggaggtttttatcgtttattcggatatagtaatagttcgtgttatggttgcgttatcgcgggagttaggtttcgtagtagagggtttcgggttcgtttcggggtgggggcgttcggggtgtgtcgcgttttcggggtttacgtttcgggcgggttttcgggtttcggtagggcgcgaggcggcggcggggtcggttggtaggttgatgatgatgatgttttgtgttcgtagtcgatgggaggtagcgtgagttcgagagagtttagagtagtcgcggtggtagcgttggagcgtagttttttttcgtttttataatgtatagggcggcggcggtggcggcggcggtagcggaggtagtatcgcgggtcgtcgaagtggttgcggcggcggcggcgatttttaggatttcgggtaggtggagcgttcgcggttgttcgcggcgagttcgggagtgatggcgaggtttttgcgggcggttagcgtttgaggcgtttcgtttcgtttcgtttcgcgcggtttttttcgttcggttttgttttgttttgttttttgtcggcggttgcgggcgttttttagttcgttcgggcggtcgtttaggcgaggtgcggttttcgtataggcggggggcgtaggcgcgcggggttcgttatggttgcgtcggagttttatataaaggtaaggtatttcgcggtcggcgtcgaggattggggttgtgcggttttcgtcgttagttgttaggttggggagggggcgggagcgtcgggtttaggcgagttttattagcgttattttttttagcgttttagaattttcggttttattagtcggtcgttcgttgcggtatttttttttttcgggcgagatgttgaaggcggcggaaggtggttcgtttcgggggttttttaggtttttgtcgcgttgttcgagttgggggtagagcgggtttcggagtggaaagggggtttatgtggatttagtagggcgggcgtgtttttttttttgtttggttttggaaaattttcggcgggtgggagatgtttgttttagtagatcggatgggttttttcgtggggatacgcgtttaaaataacgttttgtgttggtatgtagtgtcgtttttatcgttagttagtttttttgtgaggttattttgaattttgtaaacggtggtcgtattatttttagttttttagtttagttgcgttgggggtggcgagtttcggggaaagatgttgtcggatgaacgcgagttgatttatcggttgggagggtcggtatttatttatcgttgggagtttgtaatttgcgtgtaatttcgtagagttttgttaggttttatgtttttattattttttggggtaagttttttttttttgggtttggtttaagggaagtggtagtttttttttagattgatattaatatatttagggtttggcgatttttgaatgatatattatggagaattgttatttgagtgttgcgtagatttgtgatgatttttgtgaatatatgtaattatggtattttatattgtatatttatgtgtaggtagatattttgttagatattgattatttttatatgtagttaatagagttgtttttttatattagtttttgtaatagaatttttatttagggttttgtaattattggaattattgtttttaaat

SEQ ID NO: 1288 - DNA, 6277 bp, Artificial Sequence
  chemically treated genomic DNA (Homo sapiens)
atttggaaataatgattttagtgattataggattttaaatgaaagttttgttgtaaaagttaatgtgaaaaggtaattttattaattgtatgtagaagtaattaatatttggtaaaatatttatttatatatgagtgtatagtataaaatgttatgattatatatatttataaaggttattataaatttgcgtagtatttaagtgatagttttttataatatgttatttagagatcgttagattttgagtatattgatgttagtttaagaaaagattgttattttttttaaattaaatttagaagggaaaggtttgttttagaggatggtaaagatatggagtttaataaggttttgcgggattatacgtaggttgtaaatttttagcgataaatgagtatcgatttttttagtcggtgaattagttcgcgtttattcggtagtattttttttcggggttcgttatttttagcgtagttaaattggggagttaaaggtgatacggttatcgtttgtaggatttaaaataattttatagaaaggttagttggcggtagaagcggtattgtatattaatataagacgttattttaagcgcgtgtttttacgagagaatttattcgatttattggagtaagtattttttattcgtcgggaattttttaaagttaagtaggaggggaggtacgttcgttttgttaaatttatatgggttttttttttatttcgaagttcgttttgtttttagttcgagtagcgcggtaggggtttgggagattttcgaggcgggttatttttcgtcgtttttagtatttcgttcgaaagaggaaggtgtcgtagcgggcgatcggttggtagggtcgagggttttgaggcgttgaaggggatggcgttggtggggttcgtttgggttcggcgttttcgttttttttttagtttgatagttggcggcgagggtcgtatagttttagttttcgacgtcggtcgcggggtgttttatttttgtgtagagtttcgacgtagttatggcgggtttcgcgcgtttacgtttttcgtttgtgcggaggtcgtatttcgtttgggcggtcgttcgagcggattaggaagcgttcgtagtcgtcggtagggagtagggtagggtagggtcgggcggggagggtcgcgcggggcggggcggggcggggcgttttaggcgttggtcgttcgtaggggtttcgttattattttcgggttcgtcgcgagtagtcgcgagcgttttatttgttcggggttttaggggtcgtcgtcgtcgtcgtagttatttcggcggttcgcgatgttgttttcgttgtcgtcgtcgttatcgtcgtcgttttgtgtattatgggagcgggaggaggttgcgttttagcgttgttatcgcggttgttttgggttttttcgggtttacgttgttttttatcggttacgagtatagagtattattattattagtttgttagtcggtttcgtcgtcgtttcgcgttttgtcgaggttcggaaattcgttcgggacgtgagtttcgagggcgcggtatatttcgggcgtttttatttcgaagcgagttcggggttttttgttgcggagtttagttttcgcggtagcgtagttatggtacgggttgttattgtgttcgaataaacgatgggagtttttaggttgtttttttcgtttttttaagtatttttagggagaggatttaggggaagtttttttgaaagattgtagaataatttaggattgtagaagagttttgttagtagtagtgattcgggagatgggtaatgtaggatcgggaattttaggttaaggttgattattaaggttatttcgagtatttcgatgtttgtagtaaagtcgtttttcgatattagagggtaagggtcgtttttaagttatagaaatttaagtgattttgaaacgagatagttcggggatagtttaggtgttttttttttagatttgtgcgtttgcggagatgtaattatttttttgttttagtttttttttcgttttgttcgttgttggtgattgtcggttttatggtggtatttgaagtttattcggttgttatttgaaaatgacggagtatttatatggaaaatttgtattatagtttaatttaatattaaaagggtaaagtcgtttttattttttttacggtgatttttgaatatttagtataagaatgtggtttttttatttttaattttgcgttgtttttattttttattttttttttatttttattgtcgtttttggttgaataatttttattttttattgttgtcgttgttgttgttgttgtttttgtttgtttaatttttgtttttttgtagtgtttttatttttcgtttttttgaattataattggtttttagtgtttgttatggtaatttggtagattatttttattacgaataatttttatggttgaggttttcggttgtgtgtgttgtgtgcgtgtgtatttggagaaagattatttattgaaaggaacggggttagtttttatttcgtggaatttagatttttttttttcgtttataatttttttagaaatgttagagggaatgtttattgagtcgaaagttttatagatttgtttttgtttttttttattgtaaaattaaatcgtttttatgtttttgggatttattttttttttatttagatataaaaagagaaaacgtgtgtagtgacgattagcggaacggaaggagtattggattgagatttaggaggtttggtttttacgttttgtagtttttttatgtcgtgtgtaaggtggtaattattttgtttgtttttttatttttaaataatatttattttttaggattgtcgagaaatgttgagtatattgagaaaaaaaaaaaaattaaaaaattggacgagtttttgtaggtgtgaatgtttttttcgttttttattttttttaagtgatgaggagaaaatagaaaggggaattatttttttataagtttagaacgtatgtatttaattatttaaatatttggggttatattaagaggaaggtaatggagatgaggaggagaagagttttgtatttttatttattgattgattgatattgagttttgtttttttgtttaggttggagtttagtggtataatttcggtttattgtaatttttgttttttaggtttaagtaatttttatgttttagttttttgagtagttaggattataggtgtttattattacgtttagttaatttttgtatttttagtagagacggggttttattatgttgtttaggttggttttaaatttttgattttaggttattcgttcgttttagttttttaaagttttgagattataagaatgagttattacgtttggtcgggttttgtatttttgattttattttattttgtttagaaaaaaagtagagtaaaaagttagaagtagtaaagggaagtttcgaggggtggttttcgtttatttttatgtatgcgtttatagttttaagtattttgttattagtgaggtgtagaaattagtaatagttatagtttttaagggtttaggattttttttttagagtagttagagggtagtgtatttttaagttgttaaagtttttcgttattgttttattattgggagtatttttatgtagggtgtttttaaatgaaaataatgtttaggtttatatgaaaaattttattttttatttttaataaatattggaagttattatatgttagatattgttttatatgttgagaatttaggtatgagtaaaatagatgaagagttttgattttatggagtttttattttagttagggagaaagataatgatagagttagaaggtaaagttggtaagtggtgtattagttttttagggttgttatgataaagtaatataaattgtgtttaattaacggagaggtattattttatagttttggggtttagaagtttgagattaaaggattgggagggttggttttttttgaggattgtgaagtagaatttgttttttgttttttttttgttttttgatagtttgtggataatttttggtatttgatattttttagtttttgttatattttttaatttttgtttttatttttatgtggtaggttttttgtgtgtgcgtatgtttttatatttaaattgtttttttttataaggatatagttataattgaattagggtttaatttattgtttttattttaagttgattatttgtaaagatggtgtttttaaataaggttatatttatagggatggtggggtggggagaggttagaattttaatattttttgagggatataatttaaattagaatagtatgtaatgagaaaaaatatatagagaagaaagaatttgggggaagaagtaatttgaattagggtagttattaaattttaattgaattatttttaattgagggtttattatatgttagtatttaagataataaagatatagagatgagtgaaatatgattattggtttggaggagtttattgtaaggggtggttggaggggtagtagaagaggtagtttttgttgtacggttatataaaatagtaattaattttgtaagattggtttaattttagaagtagaagtttaatgttgtgttattggttatatatagtatattagttgagattggtatattttaatatttaatgttttagaggattaggtattgggtataggtgatatttaagttagcgagaaagaattttaaatagtttattgagagatttaagtggtgatatggatgggaagtcgtttgtggttgaaggatatgtgggggaatagtatgaggaaatgaagttatggaatagaaaaaagttaagaatatagtaaggttaattgaaaatatttttgaaagatgggaggtaagtattaggaattgtttggttttttatttttttttttttttaattttagttagttattttagttgttttttatttgtgagtttaggtaattttaggaaaggaggataaaaaagtgttgtatttaatttaaaaggtataatatttaatttaatattaaataaataatatatgtgaaaattttatgtgtaaagtatattgtaaatgtaaattattttattttttattttttgagatagagttttattttgtcgtttaggttggagtgtagtggtatgattttagtttgttataatttatatttttttttcgggtttaagcgatttttttgttttagttttatgagtagttgggattataggtacgtgttattatatttagttaatttttgtattttatagtagaagtagagttttattgtgttggttaggttggttttgaatttttgaatttaagtgatttatttgttttggttttttaaattgttggaattataggtgtgatttattgtatttggtttattattattatttttattttcgatatttattattataattttggattttaattttgtgtgttttaatgtatttgtttgatttttggttttttgtattttagttttttagtttgtgttttgattatttgttatttgattagtttgtgtatttttatgtttagttttatggtatttgattgttttaaatagttgatttttttttttggatttttaaatatttttagtttaattttatagattttatattgttttgatttttttgaatgatattatgttatagtatttgtggatttttttttattttgtatttttaatatttatagatatatatttgttttatatgtcgtggtgatggaattttttgaatagtgaaaatgatttagatttaaatggtttagattttagttttagttttaatttagagtaagttaggggagttttttaaaataataataataataataataataataataaattttttattttagaatagttttagattatagaaaaattgtaaagatagtatggaatttttatatattttgtaattagttttttttattataaatgttttatatttttatgatatatttgttataattaattagttaatagtgatttgttataattaattgaaatatatatttgatttaggtttttttagttttatttaatgttttttttttgttttaggattttgtttaggatgttatattatatttagtcgttatgttttattaggattttttttatgatttgaagttttatttaaatttaaaaaaaattaaaaaagaataaaagatttttttagttgatagttttttaggtttttttt

SEQ ID NO: 1289 - DNA, 13574 bp, Artificial Sequence
  chemically treated genomic DNA (Homo sapiens)
agtttttaagttttttttttgtatttgtttaatatatatttttttttattgtttataaaaagatttaaaagtatttttttagatttttttatgtaatttttgttttattttataatgtgaggagtatatatgttgagttaattgattattttgtaaattttgtaaagttatagtttttttattaaaaaaagatagtgtgtgtattattgagaagttttatgttttggagtttttgtgttttttatagtttattttgattatgtgtatgtatatatatattatatatgtattttttttttttgtattgcgttgaaagtttatggaggaattgtacgaggtgtatgataggaaagtaaatgtttttttttttatttttaatattttatagtagtttttttatttggtatagtgtagtttaatatagttttaaatttgggtttgtaatttttgagagttttgtttttgtgagttagtgtttaggtggatgatagattttttttggagtgggaggataggtagagttttttttaggtgatttagaagatgtaagaacgtttttatttagaggattgaggtggtatgaatgtgaaggttgatttaaagaattatttgggttattatagtatttgtaggagtttgtggtgttcggaggatttattaagtaggaattttgtgtagtgtgttatatttgtttaattatggaagttttttgagatgtattttaggtatttgggaaattgtattttttaaaagtattttaggtgattttttgggttttagtagaagttattgggttttaatttagtttttgttgttttttgggaagttattaggtaatttggttatgtttatattagtttttgtaaagaaagagatataaaatttgcggaagttaaaatagatgtggatgatatagaggttttaggagatgggattttcggtagttagtgtttagagtggtagggatatttatttttttggtttggagtgattgagattagaattttgtgtagtattttgattggtggtataaaataaaagttttaagtttagtgattttttggtttttagggacgttttagttaattattgttgtatattgttagagttgagagtgggttttttatttttttttgatgtatatatttttttagttttttgttattttttttatagagggttatagggtatttttaattttaagggtgtatttgattataataagtttatttgttttttttaaatggaagtatttggttaatttttttttgtatgtgggaggtttttaggtaattgtgaataatttttaaaggttgttaagaggttaagaagtattttgttgagttttgttttgtttttttaaaaatagatttttttgttttgtttgggtttaaaaagtatgttttttttttggttttgttttaggttttttgttgttgttttggagtgattatttattttttttattttattttatagttttttttttgatacgtagttagattttagtttattattttgtatgtagggttattttatataagttttttattttgtgttatgtgcgagtgttatgtgtttgaaagggaattttattatttttatttttttgtgtttttagtgtttgttagaattttgaatttttagatgtaatttcgtagttatttgtaattttttttttaaattatagagtgttaataaatggtaattgttttttttattaataaatgttaataaagagtaatttttttttttatttagatttaagtgattattaagttttgttagttatttgtttgatttttttttatttttttttttttgatttttaaattaatattttttattttttatttttaatttatattgaaatttatttttttttgtttgttagatttattttgtttattttttttttataaaatgggaataattgtatttgtgttatagggttattgtgagaattagatatacgtaatgtaaagtgtttattgtattgtttggtataaagtaagtatttagtaaatggttagtatattttgttttttattttttgttaaatttgattattttttattttatttgcgtttaaattttggtagtagtaaagtatatagttaaaaatacgggatatggaatttttggtttgatttttggtttgaatttttagatttttgtttattatttatttttttttgggaaagtacgttagtttagttattgatttataaggtttttaggagtttagaatgagataaagtatgtagagagaatgttgtttttataggtagttacgatgtagatgtttttcgtttttgtttttaaaatttgtagtgtaatttatttggtgtaaggagtttgaagtaagtatgatgagtttttatttttttttttttttttggtaggttaaatttatttagagtaatggttgcggttttatttaggattttgggggagttgtagttgtatagaatattataaaaagttaatttatttttttattttgatgtttttatttaataaggtggtgatgatgtttagtaattttgtgaagtaggagaagaggagtttttggaaattatggtattcgtgggtatggttagtaagtttttttatgttagaaggttgtagaaggttttgagagattgggttataaattttgggttttttaattagttattgatttttttttttgttagtagtatatttatttataaattattagagggattattaatatggttgggaatattttgtagtagttatgaaaggagtagtaatgttcgggaattttatttaaaaatttttaaatgtgttgttattatttgtgtgtagagtttgggataggggaagttagatgtggttgggagtttagtattgtagagtgttggtgagtttagattttggtaaggttattatgttattgagagcgagtatagtttttttttagtagatttgggttttttcgcgtttttaaaggagagtagtgaggcgttggatgttgttgttgcgttttttgtggttgagtgtgtggagcggatggtttttatattgttaaaaagtgatttgaatgaagtgaaagagttgttaaaaattaataagaagttggttaaaatgattggttatatttttgagatgaacgatgatgatttatataaagaggaggaaattcggaaatatagtgtaatatatggtagatttgatttaaagaggaaggatgggaaatattttatattttatgaggtataaagttcgcgttgttttttttgtgtgtgtatgtggtatgttgttagtcgttagagataaatttggtaatagtttgttataaatgtgatatattatttgaaagtagtattaaaaatattgaggtgttagtaatatgtagtatttttgtgaaaatagattatatttattgtgtttagggtatatttgtattgaatttgaatatgtttgagttttggaattatagtacgaggtgatttttagaaaaatgttagaatttaagtagtgaaagcgtaaagtttttgtatttgtaaggttgtttgttttttaattaaaaaataaaattaggttttaaatataatttttaaaaaatatttttgtaggttttttttaaagaaaaaattttataaaaatagtaagaatttaaagtaatttttagttagtatagaaaatagttagatgaatgttggaagaatttttattttgaatattgttttggtttgatgtttggtattaaatatttttattttatttttatagtattttagatatagtttgtttaagtttatgtgtgtgtatatgtgtgtatagatataatattttgtttatataatattatattttacgtgtgtgtataaattttggtatttatttttttttttgtttatttggttaatatatatttttaaaatttagttaagaataagtttgtgttttttgtaatttttttttttaagtagaatgatcgtttttttttatttttatttttatatatatttttgttataataattttaattttttattgtatttatttgtatattggtttgtgttttatagtatattttgggtttttttaaggtagagataatgttttttttatttttatatttttagagttaaatgtatataataagtgtttggaaaataaatgcgtttttaaaagttaaaaagattatgttatagttaattttttttttttttttgagatgggggttttattttgttacgtaagttagagtgtagtgggtgtagtttggatttttagggtttaagtagttttttttgtttagttttttgagtagtttggataataggtgtgtgttattatattaagttaattttttaagttttttatagagatgggagtttttttattgttgtttaggttggttttaagtttttgggtttaattgatagaattgttttgtttttttaaagtgttggaattataggtatgagttattgtatttagtttgatttttttaaataaatgattttagatatgaatgttggagtttgagattagataattggttagtagaattatttaagttatagttagtttgtgatttgatttattttgggagtattttttgaattagtagaggaatttattaaaagggttatatggttgttattagtagaaaaataaaaggtaaaatgtgttggtaattttagttttatgttttaatttagtttttttataatttttaaaatatagtagatgaaatataaagttgagtcgaaatatatgtgttttttattaaagtaaaagtatttttaaaagattaataaatttagttaatttgatttaaaaaaaaattatattttatttttaaaaaatgtaaaaagaattattttatatttagtttttgttaaggggttttttgtttttttagataagtaggtatatatgatatttaagtgatgagattatgaattttataaaataaggaaatatttaaaatgaatgttagtaggttgaaatgtgggggtgggggttttggaagttgtggtttgtgtttttgaaatttaatttaggtttttttgttatttgtattttagtatgtgaatttggtttaataatatagtttaggataaatgtttgtgaattaggaagtttttttaaaattagtaattatttaagattttggaagaaattatagaattttgggggaattgaaagaaggtattattaggtatattttttaggtattatgagaattttgtatttttttttttgattatttaaaattagtagaagtttttttagttttaagtttttgagattaaagaatgttgttagtttgtatttaatttttatataaggaatatatgatttatttttaatttattgttggtttaattttattgttttgaggattttttttatataaattgtgtggatattgtttttttaattttttaagatatagagttgtatgtaggttattggtggatgaaatttaggaagttatttatatttgtaagttttttttaattgtttaagtatataagattattttttttgtaagaagaagaaaatatttgtttatatatttataataatataatttgtttttaaatgtatatcgtaaagaattatggaatgatttattgttaagttttttttttttttttttttaagttaaagaattagtaatagttttatagtttggttaagtatagtttgttttataggtgttagattgtgaagagagtgagggttgaagtttagaattatatattttgttggtgttcggtaggtgttaagggataaatttagaggcgatattagaaaaaagttagtaggtaatgttgtatttattataaggggtgttaatagatagtaggtggtaaattaggtaagtagtgtatttttaatgttaaattagtgaatggatgaggagagagtaattaaaatttgggaatagtaaggtaatagagaatgtagaaatttgtaatatttagaaatgtaagtaggtagataatttggtattatagaatatttgttagtagatagtagtttttagttaaagagttttagaaagataggaaggagaagaggagaatgtagttagcgggtaattgtaagttgagtagaagaaattttgtaggaattggggtgttgagtaggttattaagataaggatttaggtttatagaataaatagtgatgttaagtttaggttagtttttattatagtgttgagaagttaaggttgagtgttttagaggaggttagtaattttatttttgagagaggaggaatgttgaatttgagaatcgtataaacgtggttatattattaagttagtttgttttattttgaatttttaattttagaatttatagattttagtatttaatatttgaaatgttggatttttttttttgatgatttttaaaaatgaattatggtagtttattttttgagttaattttggtaagttatatttttttaagaatatttattttatttgagtttttaaatttagtggcgtaaagttatttatagttttttaagatttaatattgatttaatattgattgtatatttatttttttttagtttttgattaattttgttaaaggtttgttaattttatttttttttagagatttgtaaattagggtttgtgtgtttagttttatttattttttgtttttataaataaatttttattggtatatagttgggtttatttatttatgtattgtttgtggttgattttgagttataatggtgagttaagtagttgtgatataggttgtttggttcgtaaagtttaaaatatttattttttggttttttatagaaaaagtttgttaatttttgatttttttgaagaagttattttgggtttagttgttatttttgtttgtgttgtatacgtgtatatatttgtttttttttttagttattttattgtttttatttaatttaatttgggtgtttagtttattaatttttagttattttttttttaatatgagtaattaaagtataaatttttattatgtattgatttagtgttatttttaaagttttgttatgaggttattttattattttttaattttaattatttttatgatttttgattatgtgttatttaaaagtgtttttttatttttaaatatgagtaattttttttttttattttttttaatgatttttgatttaattatattgagggtaagagaatatggtttgtgtgatgttaattttttaaaatttgttgagagtttagttatgatttattttgtggtttgtgttttttacgtttggaaacgatattttaagtagttgttagtagagtgttttatatgtgtttgttttaataagtttattaattttgttatttaaattttatatttttaattattattttgtttgtttgttttgttagtaaaaagagttgtgtattaaaattttattgattgtagtgttgtttgtttttttttgtattacgtagtaattttattaatttttaataatgtattttgttttagaaagttattttttttaatgttgatataaatatatgagttttttttttgttagttattgtttattatatttttatattttttttttttttggagatagggtttattttgttattttagttggaatgtagtggtgagattatagtttattgtattttcgattttttaggtttaggtgatttttttatttagttttttgggtagttgggattataggtatgtgttattatatttagttaatttttttttttttttttttttttttttttttttttttttttttttttttttttttttttttttttttttttttttttttttttttttttttttttttttttttttgtagggatagggtttttacgttgtttaggttggttttaaatttttgggtttaagcgatttatttgttttagtttttttaagtgttgggattatagacgtgagttattatatttggtttattttttattatatttttatattatttttttatttttagtttttttgaatttatgttttatatatattttttataaatattgattagttggattttaaagaatttagttagatatgttttgttttttaattggaatatttggtttatgtatatttattatatgattaatattttggatttttttttattattttatttgtattttttttttagttttgatatattttttgtatagatttattatttgggattagtttttttttatcgaaagtttttttaggatttttttaatgaaggtttattggtggtaaattttgtttttttttatttattggaaaatatttttattttgtttttatttttaattattatttatttggggtattaaattttataatgttagtggtttttttttagtaattaaagatatttttgtgtaaattagcggggcgtggtggcgggtatttgtagttttagttattcgggaggttgaggtaggagaatggcgtgaatttgggaggcggagtttgtagtgagttaagattatgttattgtattttagtttgggcgatagagtaagattttattttaaaaaaaaaaaaaaagttagtggttattttgttatttattgtgtatttttaaaattttgtttttgtttaattttttttttttgatttttaagtttcgtggttatttttattgtattgttttttagtcgtatttttaaatttttttgtttttttaaatgaagtttttgagggtttgattttgttgtttgttgtttttattagtgtttatttttgttgttttgttttttttgatgttttatgatttatgtgaatttatattttttggaattttaattgtgagaatatttggagtttcgggaagaaagtgaattttttagaggttatttgttttttttttttattgggtatttggggatattataaatttaagattttatgaaaataaatttttagtttatttagtgtgaattatggttgattgggggttatgaaattttaagagagtattttttgtttttttttagttattattagggtttaagatagataattttttttgtatttttttgggggtatagacgtatttttaatttagttttatattgggtgtgtgtggtgaggttttagttttatggaggaggtattttagattttttaattttgatgggttgtgggttttgtttttttttttttttttattttttttaattttatgaggttatgaagattgaaatttaagtttattaagtttagcgattgtttttaatttaaatttttttgaggtattgtatttattaattttggttttaatgtttttatttttattagtttattgagtatttaaaagatgattttttttttattttatttaatatttttagttttttttttttgagaggggttagtaatggtatttagtttttttagtgttggaaatgaaagttttgattgttttttgagtttttttattatatagttgtttatagtgtttttgtgttaatagtatttaaagttataattatttaattgttggagattataattttaataatttgtaaagaaagtttttttaggaattagtaaattattttttttaaggataaagataattgtagtaagtttagtttttaagttcggttataaaagatagttaattttaagaggtcgggtatggtggtttacgtttgtaattttagtattttgggaggttaaggtgggtggattgtttgaggttaggagttcgagattagtttggttaatatgatgaaatttcgtttgtattaaaaatataaaaaaattggttgggtatggtggtatatgtttgtagttttagtaatttgggaggttgagataggagaatcgtttgaattcggggcgttgaggttgcgttattgtattttagtttgggagatagagtgagattttattttaaaaaaaaaagaaaaaggaagcgaattttaagaaattttttatataaagatatggtggaattttggtattttgggttataaaaagaggaaatggaggaaataagtaaattagtaagggagaatattttgttattttatttttttaataaaattagagtattggtatttagaaaaagttaatagtgttgttgtaagtgacgggaatatttttatatttttttaattgtttgggaatatttttattttttttttgtaattatattatgatagttattgatgtgtttattattagtagttagggagtatgaaatttaggtaattttgatagaatacgtgtttttaagggagaggttttatgaattagttttttattataatttgggggtgagttagagttatttttttagttttagttttttattaggttttttgagggtttggagtttagtttatttttttggtttgtgggagtttgaatttagtgataatgaatgtattatgtttattttttttggtttttggaaaggtaagagaaggaatattagaatattgtttttagtttatgttgaaaagttattttttgtgtttgtgtataagttagtatttttgaaatgttgttagttaaaatattttattgaaaattagaggtttttttagtaatttagatttattaatatgaaaaataaatcgttatataaaaagttatttgagaattttttttaaggttatttagttattgttatgttgaaattgatttattttgaatattattatttaaagtatatattttatttttaattttaataatattgtgttttttaaaggtatttaggggaggaatttatttattgatgattttttaggaggagtggagaaggttgaaaataaattttttttttaattatgtttttatatttagttatgggtttaaaataggagatttgggtttattattataatttgttgttagtggttaaattaattgttttagaataaattaatataaattatagttataaatttggggaggaggatgttaaatatttatattatattatgtattataatatattttagatggtttaaatatttaggtgggaaaagtaaaacgattagattaaattatggaatatttatatattattagagtaggaagagattttttttgtttgttatttaaggtatagaaattgtatggttaatgataaatttaaaaaaaaattttattatatatgatgaagagttaatgttgttaataaagaatttttgaagttttaagaatatgaaatattgtaatgagttaaagatgtaagaaaaatttttagttttatagttaaagggatgtaaattataattaaatgttgttttagaaatataaaattggtaaagttttaaaaagataataattagtgttggttaagattgtaggaaatggatttattatgtaattattgatagtattatgatttagagaaatttttttgagggtagttaggtggaatgtataaattttttaaaattttagtatattttgtgatttaattggtttatttgtaggaatttattgtaaagaaataattggatatgtgtgtaaaggtatatatttaagaattttttatgtagtttttttttaaatagtttatggaaaattggaggtagtttgatgtttagagtgaaggtagtttaaataatatatggttgttttttataatggaatattgtatgtgtgggtagtaaaagtgatattataaaggattttttaatttattcgttagttaatagatatatattgaatttttagtttatgttagatgttaatgtaaataagttacgtttttgttttaatatatcggtagaaatgaaaaatatagtatatgtaattgaaaaaagtagattataaatttgtatgtatatatatatttaatgtttatatgtatattgaaatattggaataatgtatattagaatattgttattttggatggaatgattgtatgttatttatttttgtttttaaaaattttaagtaagaaaaattattttaaataaagatgagatgtttgggtagggagaaagggtgattatagtagtttttttttatttgtgagggatatattttaagatttttagttggatgtttgaaattgtaaatggtattaaattttatatatattgttcgtttttatatatgtatatttatgataaagtttaatttataaattaggtatagtaagagattaataataataattattaataataataaagtaggataattagaataatatgttagtattattgtttttgtattttggggttattgttgagttaaataagggtaattggaatatgagtattgagatattagaagagtttatttgttgattgagatggttattaagtgattgatagttaggagtatagatagtgtagatatattggataaagggatgatttattatttggatgagatagagtgagatggtatatagtttaaaatttatgaattgtttatttgtataattttttatttaatatttttgggttttagttgattataggtaattgaaattttagatagtaaaattgtgggtaagggggtattgtcgtatttgattttttatgaaaagaaaataagaattaatattaattataattttatgttaggtgtgtttttttatttatattttgttagagttttttgggatagtgatattattttattttgttttttagaatattaagtattaagttttttaaaagttttgtatgtttagagttatagttggtaaatgatgaagtaggattttttttaggtttgtttgttattacgttttattttttttttgttaattattatgttttggttaagtatattttttgtatattaaaaaagtttgatatattttttgatagttttttatatttattgataaaattatgtgaaaaaatttttagtttgttaaataattatagattttgtgtttagggtaataaaattttagtataaagtgtttggttaattagtaattttatattggtaatatttaataattattgaattatgaaagggtggtagaattagatggattttagagattagtttaatattttgattttttaatatagttttagtatatgataattttgttttttattaagtgatttgataaatgtttaaaattatatggttttgatttttttttaagaatttttatgttagtttataaaaaatttgttagattatttatatttatttttggttagagaaatggtgttagtaaattttgtattttaatattttgggtttttttataagcgagttgtagaatattttttattttttattttttttgtcgtttataaatttttttatttaattaaaaaaaggatataaataaataaaattaagatgattattatgattaatttgggttttgtgagatggtagatgagttggtttttttttgaaattcggtattaggaataattaggaataaatattattttgatttttatgaataatgattttattatataatggtgtaatatttttatattttaagtgaaattttttgtattttgatgaaattaaaatgtttttaattttgaaattttgttttggatatttagt

SEQ ID NO: 1290 - DNA, 13574 bp, Artificial Sequence
  chemically treated genomic DNA (Homo sapiens)
gttggatatttaaaatagagttttaaaattaagaatattttaattttattaaaatgtaaaaggttttatttaaaatataagaatgttatattattatataatggaattattatttataaaaattagaatggtatttatttttaattatttttaatgtcgaattttagaagaaaattaatttatttgttattttatagagtttaaattaattataatagttattttgattttatttatttatattttttttttggttagataggagagtttatagacgataaggaaaataaaaagtaaaaaatattttgtaattcgtttataaaaaaatttaaaatattagaatataggatttgttgatattatttttttaattaaaaatgaatgtagatggtttgatagattttttatgaattgatatgaaaatttttaaaaaggaattaagattatatgattttaaatatttattaaattatttagtaaaaaatagagttattatatattagggttatattggaaaattaaggtgttggattaatttttaagatttatttaattttattatttttttataatttagtaattattaaatattgttaatatagagttgttagttgattaaatattttgtattaaaattttgttattttaaatataaaatttgtaattgtttaataaattagaaatttttttatataattttgttaatagatataggaaattgttaagaggtatattagatttttttaatatgtaaaagatgtatttagttaaggtatgatgattagtaaaaagaaaatgggacgtgatggtagatagatttgaggagagttttgttttattatttattagttgtgattttggatatgtaaaatttttgagaggtttggtatttggtattttgagaggtaaaatgggataatattattattttaaaaggttttaataagatgtagatgaggagatatatttggtataaggttgtggttagtgttaatttttgttttttttttataagaaattaggtacggtagtatttttttatttatagttttgttgtttgaggttttagttatttgtggttaattgggatttaaaaatattaaatgaaaaattatataaataaataatttataagttttaaattgtgtgttattttattttgttttatttaagtgatgaattatttttttgtttagtgtatttatattgtttatatttttggttgttagttatttggtggttattttagttaatagatggatttttttgatattttagtgtttatattttagttatttttatttgatttaataatggttttaaagtgtaagagtagtaatgttggtatattgttttaattgttttattttattattattaatagttattgttgttaattttttgttgtgtttaatttataagttaaattttattataggtatgtatgtatagggacgaatagtatatataaggtttggtattatttgtagttttaggtatttaattgggggttttggaatgtgttttttatagataagaggggattattgtagttattttttttttttatttaggtattttatttttatttagaataattttttttatttaaaatttttgaaaataaaaataaatagtatgtaattattttatttagaatgataatattttaatatatattattttaatattttagtgtatatataaatattaagtatatatgtatatataaatttgtaatttattttttttagttatatatgttatattttttatttttatcgatgtattaaggtagagacgtggtttgtttatattagtatttggtatgggttggaagtttaatatatatttgttgattgacgaatgaattgaaaaattttttataatattatttttattatttatatatataatattttattgtagaaaataattatatattatttaaattatttttattttggatattaaattatttttagttttttatagattatttaaaaaaaagttgtataagagatttttaaatgtgtatttttgtatatatatttaattatttttttgtaataaatttttataaatagattagttaggttatagggtatattaaaattttaagaaatttatatattttatttaattatttttagaaaagtttttttaaattataatgttgttaataattatatgatgagtttattttttataattttgattaatattagttattatttttttaaaattttattaattttatatttttaaaatagtatttggttgtaatttgtatttttttgattatgaaattaaaggttttttttatatttttgatttattataatgttttatgtttttagaattttaggaattttttattaatagtattaattttttattatatgtaatgggatttttttttaagtttgttattagttatatagtttttatgttttgggtgataggtaaagaaaatttttttttattttaataatatataaatgttttataatttagtttaatcgttttattttttttatttaagtatttaaattatttagaatgtgttatggtatatggtatgatatagatatttaatatttttttttttaaatttataattgtaatttatattaatttgttttgagataattaatttggttattgatagtaagttataataataaatttaggttttttattttaaatttatagttgaatatgaaagtataattgaaggaagaatttatttttagttttttttattttttttaaagagttattaatagataaattttttttttaagtgtttttgaaaggtataatgttattggagttaaaagtgaaatgtatattttaaataatgatatttaaaataaattagttttagtatggtagtagttaaatgattttgaagaggatttttaaatagttttttatgtagcgatttattttttatattaataaatttaaattattaaggaaatttttgatttttagtaagatgttttaattgataatattttagaggtattagtttatgtataaatatagaaaataattttttaatataaattgaaaataatattttagtatttttttttttatttttttagaaattaagaaaaataaatataatgtatttattgttattgaatttaggtttttataaattaaaaaagtagattaaattttaggtttttagggaatttggtaaaaaattgaggttggagaagtaattttagtttatttttaagttgtaataaaaagttgatttatgaagttttttttttaaaaatacgtgttttgttagagttatttagattttatgttttttagttgttaataatgaatatattaataattattatgatataattataaaagaaaaatgaaaatatttttaagtagttgggaaaatatgaaaatattttcgttatttgtagtagtattgttagttttttttgaatgttaatattttaattttgttaaaaggataaagtaataagatatttttttttattggtttatttattttttttattttttttttttgtggtttaaaatattaaaattttattatatttttatgtgaaagattttttaaagttcgtttttttttttttttttttttgagatggagttttattttgttttttaggttggaatgtagtggcgtaattttagcgtttcgggtttaagcgatttttttgttttagttttttaagttattgggattataggtatgtgttattatgtttagttaatttttttgtatttttagtatagacggggttttattatgttggttaggttggtttcgaatttttgattttaagtaatttatttattttggttttttaaagtgttgggattataggcgtgagttattatgttcggttttttaaagttagttattttttataatcggatttaaaaattggatttattatagttatttttatttttaagaagagtggtttattgatttttaaaaaaattttttttataggttgttaaaattataatttttaataattaaatgattgtgattttaagtattgttggtataaaaatattgtgaataattgtgtgatagggaggtttaaaaggtaattaggatttttatttttagtattgggagggttaggtattattattggttttttttagaaaaaaaaaattaaaaatgttaaataaaatagggaggggattattttttaaatgtttaatgagttgatgagaataaggatattgaggttaaaattaatgagtatagtattttaaagaagtttaagttagggatagtcgttaaatttgatgagtttgagttttaatttttatggttttatggggttgaggagaatgggaaggaaaaaagaggtaaagtttatagtttattagaattgaagagtttaagatgttttttttataaagttgaaattttattatatatatttaatgtaaggttgaattagaaatacgtttgtatttttaggagaatgtaaagaaaattatttgttttgaattttagtaatgattgggagagaatagaagatatttttttaagattttataatttttaattaattataatttatattaagtgggttgagaatttatttttatagggttttagatttgtaatgtttttagatgtttagtaaaaagaaaaagtaaataatttttagggaatttatttttttttcgggattttaaatgtttttatagttaaagttttaagaaatatgaatttatataaattataaaatattaaaagaaataaggtaataaaagtgaatattagtagaaataatagatagtaaaattagatttttaaagattttatttgaagaaataaagggatttgaaaatacgattaaaaagtagtatagtaaaaataattacgaaatttgagaattaggagaggagaattggatagaaataagattttaaaagtatataataaatagtagaataattattaattttttttttttttttgagatggagttttgttttgtcgtttaggttggagtgtagtggtatgattttggtttattgtaagtttcgttttttaggtttacgttatttttttgttttagtttttcgagtagttaggattataggtgttcgttattacgtttcgttaatttatataaaggtatttttaattattaagggaaaattattaatattatagaatttaatattttaaataaatagtaattaaaaatgagggtaaaataaagatattttttagtaggtagggaaggatagagtttgttattagtaggtttttattaagaaaattttaaaagagttttcgatagaaggaagttaattttagatgataaatttgtatagaaagtatattagggttagaggggagatataaataaaataatggaaaaaaatttaaaatattagttatataataaatgtatatggattaaatattttagttaaaaaataaagtatgtttgattgggttttttaaaatttaattgattagtatttataaaagatatatataaaatatggatttagaaaggttgaaaataaaaggatgatataaagatataataaggaatagattaggtgtggtggtttacgtttgtaattttaatatttggggaggttgaagtagatagatcgtttgagtttaggagtttgagattagtttgggtaacgtggaaattttgtttttataaaaaaaaaaaaaaaaaaaaaaaaaaaaggaaagaagaaagaaagagaggaagaaaggaaggaaggaaggaaggaaggaaggaaggaaaaaagaaaagaaagaaattagttaggtgtggtggtatatgtttgtggttttagttatttaggaggttgagtgggagaattatttaagtttgggaggtcgaggatatagtaagttgtgattttattattgtattttagttagggtgataaagtgaattttgtttttaaaaaaaaaaaagatataaagatgtaataggtaatgattaataaaaagagagtttatgtatttatattaatattaaagaaaatagttttttaaagtaaaatatattattaaaggttaataagattattgcgtaatataaagagaaatagataatattataattagtaaaattttagtatataattttttttattgatagagtaagtagataaaataatagttaagaatataagatttgaatgatagaattaataagtttgttagaatagatatatatagaatattttattaataattgtttaagatatcgtttttaaacgtaaaaaatatagattataaaatgaattataattaaatttttaataaattttaaagggttggtattatataaattatgtttttttgtttttaatgtaattaagttagaaattattaggaaaaataaggaaaaaaaattatttatatttggaaataaagaaatatttttaaataatatatggttagaaattataaaaataattaaaattgaaaaataataaaataattttataataaaattttgggaataatattgaattaatatatagtgaaaatttatattttaattgtttatattagaaaaagaatgattaaaaattaatgaattaagtatttaaattaagttagataagaataataaaataattaagagaggagataaatatatatacgtgtatagtataagtaagaatagtaattaagtttagagtggtttttttaaaaagattagaggttggtaagttttttttgtaaaaggttagagagtaaatattttaggttttacgggttaaatagtttgtgttataattatttaatttattattgtagtttaaaattagttataaatagtatataaataaataggtttagttgtgtgttaataaaaatttatttataaaaataggaggtgagtgagattgggtatatagattttagtttgtagatttttaaaaaagaataaaattggtaaatttttggtaaggttggttaggagttaaggagagataagtgtataattaatattaggttaatattaggttttaaaaaattataaataattttacgttattaagtttgaaaatttagatgaaatggatatttttagaaaaatgtaatttattaaaattgatttaagaaatagattattataatttatttttaaaaattattagaaggaaaagtttagtattttaagtgttagatgttgaaatttatgaattttgagattgagagtttagaataaaataagttaatttaataatgtgattacgtttatgcggtttttagatttagtatttttttttttttaaaggtgaaattgttggttttttttgaaatatttagttttgattttttagtattataatggaaattgatttaagtttggtattattgtttattttataggtttgggtttttattttggtaatttgtttagtattttaatttttgtagagttttttttgtttagtttatagttattcgttgattatatttttttttttttttttttatttttttagagttttttgattggaagttgttatttgttgataaatattttgtaatgttaaattatttatttgtttatatttttgagtattataagtttttatattttttattgttttgttgtttttaagttttagttgttttttttttatttatttattgatttaatattaggggtatattgtttgtttagtttattatttattatttattaatattttttatgatagatgtaatattgtttgttggtttttttttgatatcgtttttgggtttgttttttggtatttgtcgaatattagtaaggtgtgtggttttaagttttagtttttattttttttataatttgatatttataaaatagattgtatttagttaggttgtaggattattgttgattttttagtttaaaaaaaaaaaaaagaggggtttaataataagttattttataattttttacggtgtatatttggaaataaattatgttattataaatatataaataaatatttttttttttttataagaaaaataattttatgtatttgaatagttgaaaaaaatttataggtatagatagttttttgaattttatttattagtgatttatatatagttttatgttttgaaagattaagagaatagtatttatataatttatatgaagaaaatttttagaatagtgagattaagttaataatgaattaagagtaagttatgtattttttatgtggaaattgagtataaattagtaatattttttaattttaggaatttagaattaaaaaaatttttgttaattttaaataattaggagaaaaaatataaaatttttataatatttaaaagatatatttaatagtatttttttttaatttttttaggattttgtaattttttttaagattttggatagttattagttttaagaaagttttttgatttataaatatttattttaaattatattattggattagatttatatattggagtataagtaataagaaggtttaagttaagttttaaaaatataagttataatttttaaagtttttatttttatattttagtttattggtatttattttgagtatttttttattttgtgaaatttatggttttattatttaaatattatatgtatttatttatttaaagaggtaaagagttttttagtaaaagttaagtgtaaaataattttttttatattttttaaaagtagggtatgatttttttttaagttaggttaattaggtttgttaattttttagaaatatttttattttgataaaaaatatatgtatttcgatttaattttgtattttatttgttatgttttaaaaattataagaaaattaggttaaagtatgaaattaaaattgttaatatattttgttttttgtttttttattaatgatagttatatagtttttttagtggatttttttattggtttaaaggatatttttaaaatagattaagttataggttggttatgatttaagtaattttgttaattaattatttgattttaagttttaatatttatgtttaaaattatttatttaaaaagattaggttaggtatagtggtttatatttgtaattttagtattttgggaggataagatagttttattagttgagtttaggagtttgagattagtttgggtaataatggagaaatttttatttttatgaaaaatttaaaaaattaatttggtgtggtggtatatatttgttgtttaagttatttaagaggttgagtagggaggattgtttgaattttggaggtttaggttgtatttattgtattttagtttgcgtgatagagtgagatttttattttaaaaaaaaaaaaaaaattagttatgatatagtttttttaatttttgaaaacgtatttattttttaagtatttattgtgtatatttgattttggggatataaagatgaaggagatattatttttgttttgaagaaatttagagtatattgtgaagtatagattagtatataaataagtataataagaagttaaagttattgtgataaaagtatatgtagggataaaaatggaaaggaacggttattttatttgaaggaaaagattatagaaaatataagtttatttttggttgagttttaaagatatgtgttgattagatagataagaaaaggagtaaatgttaaagtttatatatatacgtgaagtataatgttatatggataaaatgttatatttatatatatatatatatatatatgaatttaagtagattatgtttagagtattataaagataaaataaaaatgtttaatgttaaatattaaattaaaataatgtttaaagtgagaatttttttaatatttatttaattgttttttatgttagttgagaattgttttaagtttttgttatttttatgaaattttttttttaaaaaaagtttataaaaatgttttttaaaagttatatttaaaatttagttttattttttaattaaaaaataaatagttttataaatgtaaagattttacgtttttattgtttaaattttgatatttttttaaaagttatttcgtattgtagttttaaagtttaaatatgtttaagtttaatataaatatattttgaatataataaatatggtttatttttataaaagtgttatatgttgttaatattttaatgtttttaatattgtttttaggtagtgtattatatttgtggtaaattattattaaatttatttttaacgattagtaatatgttatatatatatatagaaggaataacgcgggttttgtattttatgaagtgtgagatgttttttattttttttttttgagttaaatttgttatatattgtattgtattttcgaatttttttttttttgtgtggattattatcgtttattttaaagatgtgattaattattttggttaattttttgttggtttttagtagtttttttattttatttaagttattttttggtagtgtgggggttattcgttttatatatttagttatagagagcgtagtagtagtatttagcgttttattgtttttttttggggacgcgggggagtttaggtttgttggggagaggttgtgttcgtttttagtggtatggtggttttgttagagtttggatttattaatattttgtagtgttaggtttttaattatatttgattttttttgttttaagttttgtatataggtggtggtagtatatttggggatttttaaatgaggttttcgggtattgttattttttttataattattgtaggatatttttagttatgttggtgatttttttggtaatttatagatgggtatgttattgataggaagggaagttagtggttgattgaaaagtttagggtttgtgatttagttttttaaagttttttgtagttttttaatatgaaggggtttgttagttatgtttacgagtgttatgatttttaaaaatttttttttttttgttttatagagttgttggatattattattattttgttggataaaggtattaaaataagaaagtagattggttttttgtaatattttatatagttgtaatttttttagggttttgggtaaggtcgtagttattattttggatgggtttaatttgttaaaaaaaaaaaaaaaagtaaaaatttattatatttgttttaaattttttatattaaataggttatattataggttttaagaataaaaacgagaagtatttgtatcgtgattgtttgtgaaggtagtattttttttatatattttattttattttgaatttttaaaaattttataggttagtaattaaattgacgtatttttttaaaagagaataaatggtaagtaggaatttggaggtttaaattaaggattaaattaaaggttttatgtttcgtatttttggttatatattttgttattgttaaggtttggacgtaggtggagtgaaagatagttaaatttagtaggaggtaagaagtagagtatgttaattatttgttgaatatttattttgtgttaggtaatataataaatattttatattacgtatgtttaatttttataatggttttgtgatataggtatagttatttttattttatagagaaaaaatgagtaagatgagtttggtaggtagaggaagatagattttagtatgaattggaggtgagaaatagaaggtgttaatttaggaattaagaaagaagaggtagagaaaagttaaataagtaattgataagatttggtgattatttagatttaagtgaggaaggaagttattttttattgatatttattgatgaagaaaatagttattatttattgatattttgtggtttaagggaagagttataggtgattacgagattatatttgagagtttagaattttaataggtattggagatatagaaaaatgaggatgatgggatttttttttaaatatatggtattcgtatatggtatagggtagaaggtttatgtagaatggttttgtatgtaaaataatagattagaatttaattacgtattagggagagggttgtaggataaaataaggagggtgggtgattattttaaagtagtagtagaaagtttaagatagagttaaggaagaaatatattttttgagtttaagtaagataaagaagtttgtttttaaagagatagaataagatttagtaaagtattttttgattttttagtagtttttaaaagttgtttatagttgtttggagattttttatatataaagaggagttggttaagtatttttatttaagagaaataaataaatttgttgtaattaaatgtatttttaggattaaaagtattttgtagttttttatggagaaaataatagaaggttaaaagaatatgtgtattagagaaaaatggaagatttatttttaattttgatagtatgtagtaatagttaattgggacgtttttgaaagttaagaagttattgaatttgggatttttgttttatgttattaattagaatgttatataaaattttagttttagttattttaagttaggagaatgggtgtttttattattttaagtattgattatcggaagttttattttttggaatttttgtgttatttatatttgttttgattttcgtaaattttatgtttttttttttgtaagggttagtatgggtataattaggttatttgatgattttttaaaagataataaaggttgaattagggtttagtagtttttattaaaatttaggaaattatttggggtgtttttgaaaaatatagttttttaggtgtttgagatgtattttaggagatttttatgattaggtaaatatgatatattgtataagatttttatttaataaatttttcgggtattataaatttttataggtattgtgatgatttaggtaattttttaggttaatttttatatttatgttattttagttttttggataaaaacgtttttgtattttttaaattatttaaaggaggttttgtttgtttttttattttagggagaatttattatttatttgggtattaatttataaaaatagagtttttaggagttatagatttaagtttagagttatattaaattatattatattaaatagaagggttgttataaagtgttggaggtggaagaaaggatatttatttttttattatatatttcgtgtaatttttttataggtttttaacgtaatatagaaaaaaaaagtatatgtgtaatgtgtatatatatatatatgattaaaatagattgtggaagatatagaagttttaagatatggggttttttagtagtatatatattatttttttttaataagaggattgtaattttgtaaggtttatagggtgattaattaatttagtatatgtgttttttatattatggaatagagtagagattatatgaggaaatttggaaaaatatttttaaatttttttatgagtaataagaaaaaatatatgttagataaatataaaagagaaatttaagaatt

SEQ ID NO: 1291 - DNA, 5291 bp, Artificial Sequence
  chemically treated genomic DNA (Homo sapiens)
aagtgatttatttattttggttttttaaagtgttgggattataggtgtgagttatcgtggttagttttaggggataatttaggttttttgtgtttttgttttaaatttaaatttttatttttttgaggtagtattattttgttttttaggttggagtgtaatggtataattaatttattgtagttttgaatttttgggtataagtgatttttttaatttagttttttaagtagttaggattataggtgtgtattattatgtttggttgaattttttttttaagagatggatttttgttgtgttgtttaggttcgtgttaatttttggttttaaatgatttttttttttaggttttttaaagtgttgggattatagacgttagttattgtatttagtttagtttaagttttaagtattaagaattgattttttggaggaatagggattttttaaggatttttatagttagtgattttaaatgtagtgtttggattagtaagtagtattagtattatttaagaagttattagaaatgtaaatttttggttaggcgcggtgttttatgtttgtaattttagtattttgggaggttgaggtgggtagattacgaggttacgagttcgagattagtttgattaatatggtgaaattttgtttttattaaaaatataaaaattagtcggtcgtggtgaagggtatttgtaattttagttatttaggaggatgaggtaggagaattatttgaatttaggaggcggaggttgttgtgagttaagatcgtattattgtattgtagtttgggtaatagaatgagattttattttaaaaaaaaaaaaaaaagtaaatttttgagttttattataggtttgttgaattagaaattttgaggatgggtttagtagttcgttttaataaattttttaggtggttattataaatgttgaagtgtgagagttattgtttgtaattttatttagagaggtatataggtaatttaaaaataggttttgataaaagaattttattaaatttaaaaaataaatttaggtaattttataaataaataaatttcggtcgggcgcggtggtttacgtttgtaattttagtattttgggaggtcgaggcgggcggattacgaggttaggagatcgagattattttggttaatacggtgaaatttcgtttttattaaaaatataaaaaattagtcgggcgtggtggcgggcgtttgtagttttagttattcgggaggttgaggtaggagaatggcgtgaattcgggaggtagaaattttagtgagtcgagatcgcgttattgtattttagtttgggtgatagagtaagatttcgtttgaaaataaataaataaaaaaaataaattttaaatatggaattatttttttattttttttttttgttttgtttttttttttttttgagatagagtttcgttttgttatttaggttggagtgtagtggcgcgatttcggtttatattgtaatttttgtttttcgggtttatattatttttttgttttagtttttcgagtagttgggattataggtgttcgttattacgttcggttaattgtttttttgtatttttagtagagacggggttttatcgtgttagttaggatggtttcgattttttgatttcgtgattcgttcgtttcggttttttaaagtgttgggattataggcgtgagttattgcgttcgattttttttattttttttaatgttttgtaaatattaatgtatttatatatgtatttagaattttaaaaaattaattttattgagttataattaatatatagtaaaaatgtttttattttgagtaattttatgttttttgataagtgttttgtatttatgttacgattattataatcgagagagaatatttttattattttagaagggtttttttgtagtgagtattttttaggagttttagcggtcggtgatattgatttgttttttgttattgtagatgagatttgtttgttatatataatttttaaaaattaaatgatatgtatggttttttttgtttagtataatgtttttgagtttatttatttgttgtatatattaatattttgtttttttttattatttgtattttatttatggatacgttgtttatttatgtgtttatttttaatggatattgggttgtttttgattttttggttattattatgaataaagttgttatgaatattattgtataaatttttgtgtgtttatgtgtttttattttttttgggtaaatatgtaggaatggaattgttagattgtatggtaagagtatatttagttttttatgatattagtgaattgtttttttaaagatattgtattaatattattttatatttttataattaatgtatgagtttttagttgttttatatttttaattaatagttgatattgtataatataaatgttaatttttagaatatttttataattttagagtagatagtgattttttaggatataaaaattattaattataataaaaattaaaattggattttattaaaattaaaaatttttttttgaaagatattattaagaaaatgaaaagatggttaatagattgagagaatatatgtgtaatgtaaatatttaataaaggattagtatgtaaaatatataaagaatttttataatttagtaataaaaaggaaaatacgtattttttaaatgggttaagaatttaattacggttaggtgtagtggtttatatttgtaattttagtattttgggaggtcgaggtgggtggattacgaggttaggggttcgagattagtttggttaatatggtgaaattttgtttttattaaaaatataaaaattagttgggcgtggtggtgggcgtttgtaattttagttattcgggaggttgaggtaggggaatcgtttgaatttaggaggcggaggttgtagtgagttgagattgtgttattgtattttagtttgggcgatagagcgagattttgttttttaaaaaaaaagaaaaaaatttaattattttattaaagaagatatatgaatgattaataagttattaaattaaaattttagtgagtatatatatatgttttgaagtagttaaattttaaaatattgttttatgtgtgtgtattttttagttaaaaaagtgtttgaaaatagtattattttgaaatttaaaattttaaattttttttttaaattaggtagtagtgttattggaagtaaaagagaagttattttaattgttaaagagtatttattaagaatttataataaatattatgtttaatgtttaaattttagaagaatttatattaaaagttaagaataagataggatatttatttttattattaagtaatattatattagaggatttaattaatgtaataaggtaataaataaaagataaaattgttataattagatattataaatatttaagaaaatttagggggatttatagttatatattaaatagtttagaaggagttttatatattattaatgaatattgagaataaaaaatagtttttaaaatttttttaatttataagggtaataaaatgtataaggtattaaaataaatgtaatgtgtatttgggtataaatatagtaatataatgaaaaggtttattggggaaaaaattatagggagaagggttaataacgtgaagaggtttttttgttatttggatttttggaaaaagatttgttggtttaggtatagttggatgtattatggaaagtggttttaataaatattggtattgtaataattgtgtatgttgatataaaaagagggagttaatgaatatttggtcgattatttaataattgtttttttgttgaagaaatggttttgttggattagagtttaattgtggtttatatattaatgttgttataatagttagaagttttattaagaaatttgttaaattattaaaaagaggaaatgaattttttaggatatttggattgtttttttttaaaaatttagttttggttgggtgttgtggtttacgtttgtaattttagtatttggtgaggtcgaagtgggcggattacgaggttaagagatcgagattattttggttaatatggtgaaattttgtttttattgaaaatataaaaattagttgggcgaggtggtatgtgtttgtagttttagttgttggggaggttgaggaaggagaattatttgaattcgggaggcggggtttgtagtgagttgagattacgttattgtattttagtttggtaatagagtaagatttagtttaaaaaaaaaaaaaaaaaatttagtttgtatggtagtataatattaggtaaaagtatagattagttagattattggttaattttaatttttatgtgtttgagtttttttatttgtaatatggagatgatatagtaatagttgattttggattgttaaaggaattaagtggatatatgtaaagtgtttagaattgtgtttggtaagtagtaggttgtaatattgtgatataataaatatatatatttgatttttatttagtttttggtatagatttttagaaatttttgtaattttttgagtgataggggtgatagaaatattttttattagaatatttggttttggtttttgatataagagtttttaagatttttggaatttttaagtgataagagtgtatgatagtgagttaattggtggttgggattttttagataattttaggatgggggttattttttgaaagattaaggtatgattagaggtttgggatttgtagttttacgtttcgatttttagagagggtaaaagggttggcgattgattaattattaattgttagtgatttagttaattatgtttaagtgatggtatttttattaaaaaataaattataggtttggagagttttcggtttggttaattttaattatatattaagaaggcgatgtattttaaattgtatgaagataaaaggttttgtgtttatttgggatttttttggacgttgttttgtgtattttttcgattgtttgtttatttgtattttttataataaagtagtaaatataagtaaagtttttgagttttgtgagttattataagaaacgatcgaatttgggatttttttttcggaagtcgtttttttttataagggagagagttgttttttttttttttttgcgtgttaaattttcgtttttaaatttatttttcgtgtgtatcgtgtttttaattttgttggtgcgaga

SEQ ID NO: 1292 - DNA, 5291 bp, Artificial Sequence
  chemically treated genomic DNA (Homo sapiens)
tttcgtattaataaggttaaggatacgatatatacgaagagtgggtttaggagcggaggtttaatacgtaaaagaaaaaggagaatagtttttttttttgtgagagagagcggttttcgaaaggaaaattttaggttcgatcgttttttataatggtttatagaatttagaaattttatttatgtttattgttttattataaaggatatagatgaataggtagtcgaagaggtatatagggtaacgtttagaagggttttaggtgagtataggattttttgtttttatgtagtttgaggtgtatcgtttttttggtatgtggttggggttaattaaatcgaaagttttttaaatttgtggtttattttttaatggaggtgttattatttaggtatgattggttaaattattggtaattggtggttaattaatcgttagtttttttattttttttggaggtcgaggcgtggggttgtaaattttagatttttaattatgttttagttttttaggggatagtttttattttgaagttgtttaaaggattttagttattagttagtttattgttatatatttttattatttggagattttaaaggttttagaagtttttgtgttaggaattaagattaagtattttaataaaagatgtttttattatttttgttatttaggaaattataagggtttttggagatttgtgttaggaattggatgaagattaaatatatatatttattatattataatattgtagtttattatttgttaggtataattttaagtattttatatgtgtttatttaatttttttaatagtttaaaattagttattgttatattatttttatattatagataaggaaatttaagtatataggggttaaggttaattagtgatttggttagtttgtatttttatttgatgttgtgttgttatatagattagattttttttttttttttttagattgagttttgttttgttgttaggttggagtgtaatggcgtgattttagtttattgtaaatttcgtttttcgggtttaagtgattttttttttttagtttttttagtagttgggattataggtatatgttatttcgtttagttaatttttgtatttttagtagagatagggttttattatgttgattaggatggtttcgattttttgatttcgtgattcgtttatttcggttttattaaatgttgggattataggcgtgaattatagtatttagttaagattagatttttaagaaaaggtaatttagatgttttagaaggtttattttttttttttggtggtttagtaaattttttagtaaggtttttagttgttatagtagtattagtatgtgaattatagttaagttttagtttaataaggttatttttttagtagagaagtaattgttaaataatcgattaagtatttattggttttttttttttgtattaatatatataattgttatagtgttagtgtttattggaattattttttatggtgtatttagttgtgtttagattagtaggtttttttttagaagtttagatggtaggggaatttttttacgttgttgatttttttttttgtaattttttttttaataaatttttttattatgttgttgtatttatatttaaatatatattatatttattttagtattttgtatattttgttgtttttataaattggaggggttttaaaaattattttttatttttaatatttattgatgatgtataggattttttttggattgtttaatatatgattgtaaatttttttgaatttttttagatgtttgtagtatttgattatgatagttttgttttttatttattgttttgttgtattgattaggttttttaatataatgttgtttaataatgaagatagatattttattttatttttgatttttggtataaatttttttaaagtttgagtattaaatatgatgtttgttgtagatttttagtggatattttttagtagttaaagtaattttttttttatttttagtgatattattatttaatttgaagagaggatttggaattttgagttttaaaataatattgtttttaaatatttttttagttaaaaagtatatatatatagggtagtgttttaaagtttagttattttagggtatatgtgtatatttattgaagttttaatttaatggtttattggttatttatgtattttttttggtaaggtaattaaatttttttttttttttttaaaagatagagtttcgttttgtcgtttaggttggagtgtagtggtataattttagtttattgtaattttcgttttttgggtttaagcgatttttttgttttagtttttcgagtagttgggattataggcgtttattattacgtttagttaatttttgtatttttagtagagatagggttttattatgttagttaggttggtttcgaatttttgatttcgtgatttatttatttcggttttttaaagtgttgagattataggtgtgagttattgtatttggtcgtaattaaatttttgatttatttaaaaagtgcgtgtttttttttttattattaaattataaggattttttatatattttgtatattagttttttgttagatatttatattgtatatatatttttttagtttgttaattatttttttatttttttaatggtgttttttaaaaagaagtttttaattttgatgaagtttaattttaatttttgttatgattgatagtttttgtgttttaagaaattattatttattttaaagttgtgaagatattttaaaagttaatatttgtattgtataatattaattgttagttgaggatatggagtaattggaagtttatatattagttgtgggaatgtaaaatggtattaatataatgtttttggaaaaatagtttattggtgttatggaaagttaagtatatttttgttatataatttagtaattttatttttatatatttatttaagaaaaatgaaaatatatgaatatataaagatttatataataatgtttatagtaattttatttataataataattaaaaaattagaaataatttaatgtttattggggataaatatatggataaataacgtatttataaatgaagtataggtggtaaaaagaagtaaagtattgatatatgtaataaatgaataagtttaaaaatattatgttaagtaaaagaagttatatatattatttaatttttaaaaattgtatataatagataaattttatttatagtgatagaaaatagattaatgttatcggtcgttggaatttttagggagtatttattgtaaaggagtttttttggagtgatgaagatgttttttttcgattgtggtggtcgtggtatgggtatagaatatttgttaaaaggtatggaattatttaagatgggagtatttttattgtatgttaattataatttaataaaattgattttttaaaattttaagtatatatataaatatattaatgtttatagagtattaagagaagtgaaaaaggtcgggcgtagtggtttacgtttgtaattttagtattttgggaggtcgaggcgggcggattacgaggttaggagatcgagattattttggttaatacggtgaaatttcgtttttattaaaaatataaaaaaataattagtcgggcgtggtggcgggtatttgtagttttagttattcgggaggttgaggtaggagaatggtgtgaattcgggaggtagaaattgtagtgtgagtcgagatcgcgttattgtattttagtttgggtgatagagcgagattttgttttaaaaaaaaaaaaaaataaaataaaagagagaagtgaaaaaataattttatgtttgagatttgttttttttgtttgtttgtttttagacggagttttgttttgttatttaggttggagtgtagtggcgcgatttcggtttattgaaatttttgtttttcgggtttacgttatttttttgttttagtttttcgagtagttgggattataggcgttcgttattacgttcggttaattttttgtatttttagtagagacggggttttatcgtgttagttaggatggtttcgattttttgatttcgtgattcgttcgtttcggttttttaaagtgttgggattataggcgtgagttatcgcgttcggtcgagatttgtttgtttataaagttatttgaatttgttttttaagtttagtagaatttttttattaggatttgtttttaagttatttatgtatttttttaaatgggattataggtagtagtttttatattttaatatttatggtaattatttggaggatttgttaaagcggattgttagatttatttttagagtttttgatttaataggtttgtgatggggtttaagaatttgtttttttttttttttttgagatggagttttattttgttgtttaggttgtagtgtagtggtgcgattttggtttatagtaattttcgttttttggatttaagtgatttttttgttttatttttttgagtagttgggattatagatgttttttattacggtcggttaatttttgtatttttagtagagatagggttttattatgttggttaagttggtttcgaattcgtgatttcgtgatttatttattttagttttttaaagtgttgggattataggtatgaggtatcgcgtttggttaagaatttgtatttttaatgattttttgggtgatgttaatgttatttattggtttaaatattatatttagagttattgattgtagagatttttaaaagatttttatttttttaaagagttaatttttaatgtttaaaatttgaattaggttgggtatagtggttaacgtttgtaattttagtattttggaaggtttaggagagaggattatttgaggttaggagttgatacgagtttggatagtatagtaagagtttattttttaaaaaaaaaatttagttaggtatggtggtgtatatttgtagttttagttatttgagaagttgaattgggaggattatttgtgtttaggaatttaaggttgtagtgagttgattgtgttattgtattttagtttgagagatagagtgatattgttttaaaaaaataaaaatttaaatttaaaatagaaatataaaaaatttaaattattttttaaggttggttacggtggtttatatttgtaattttagtattttggaaggttaaggtgggtggattattt

SEQ ID NO: 1293 - DNA, 16509 bp, Artificial Sequence
  chemically treated genomic DNA (Homo sapiens)
agttttatggttaggtgtagtggttttttttattaattttagtattttgggaggttaaggcgggcggattatgaggttaagagattaagattattgtggttaatatggtgaaattttattttttttaaaaatataaaaattagttgggtgtggtgttatatgattataattttagtgatttgggaggttgaggtaggaaaatcgtttgaatttgggaggtggagattgtagtgaatcgagattgcgttattgtatttcggtttggtagaggaagattttattagaaagaaagaaagaaaagaaaggtaggtttcgtagtggtttatatttgtaattttagtattttgggaggttaaggtaggtggattatttgaggttaggagtttgagattagtttggttaatatggtgaaatttcgtttttattaaaaatgtaaaaaattagttaggtatgatggtgaatatttgtagttttagttatttaggaggttgaggtaggagaattatttgaatttgggaggtggaggttgtagtgggttaagatcgcgttattgtattttagtttgggcgatagagttgttagtggtttatatattagtgggaggtggttaaggaaaggatagattaaggttagtagggtaggtttgagtttgagtagttgtagttgatgttattagtttagatggggaattgattgtagaggattgattgtattagggtgtgatcgtgtttatgatagggtgagtcgtgttttgaagagttgggaaagtagacggtagcgtgagaaggttttatagagggtttatttattagttaaggtttaaagattggttgggagtggggtagaggtggacgttgagtttgaagtagttggaatattgtagttaagggaaagggtttaggtgtgagatgaattttaattttattttggttttttttatttttttgtaaattagggcgaattattttttttgtgggagttttagtttttttaatttgtaaaatgggatgaaaattgtttttttttaattttcgtaatttattagttaaataaaatgtaaattatggttaggcgtggtggtttacgtttgtaatgttagtattttggaagtttaaggtgggcggattatttgaggttaggagttcgagattagtttggttaatatggtgaaattttatttttattaaaaatataaaatataaaattagttaggtgtggtggtatatgattgtaattttagttatttgggtggttaaggtataagaattgtttgaatttagaggtagaggttgtagtgagtagagatcgtgttattgtattttagtttgggtaatagagtaagattttatgttaaaataaataaataaatagaaataaaatgtaaattaagtatttgggagggtgtattataagaattgaatggttattagttaataagtttttatgtgattgttaatattgtttggattttattttaaataaatttaatgaattttggaaatggaaaaaaattttttggttgaaaaggttgaggggttatattatttgttgttgtatgataaattattttgaaatggaatagtttaaatagaagtttttatatagtgttgttttgatagatatggaattaaaatcgtttgtggtaatttaggtttatttttatttgttttgtggttaggatatagtggtaattataagtaggtggtttaggtaagtttatttatgtatgaagagagttgggggaaggttttttatgttttgttcggtttagttaattttttagataatagcggttttttaaattgtggtttcgggattatttgtattttaattttatttttttttttttttgagatgagatagggttttattttgttgtttcggttggagtgtagtggtatagttatagtttattgtagttttaaatttttggggttaaataatttttttattttagttttttaaggagtaattaaaaattttttaattttgtggagataggattttgttttttgtttaggttggtttttaatttttaggtttaagcggttttttcgttttggttttttagagtgttgggattataggtatgaattattaggtttggttgtattttaattatatagggttttgttttttaaaaatgtagatttttgtgatttattatagatttagaattggaattattgtgggtacggttttggaaattgttttatttaaagaagatttttaggatagttttagatttgtagaaaaattgtaatgatagtaaaaaaaaatttttatatattttagttttttttatgattaatattttatattagaatggtatatttattattacgtatgaattagtatggtataatattattaattaaattttatagtttatttagatttttttagtgtttttgtttgttttgagatggagttttattttgttatttaggttgtagtatagtggtataatttcggtttattataatttttattttttgggtttaagtaattttgttttagttttttgagtagttgggattataggcgttttttattaggtttagttaatgtttgtatttttagtagagatagtgtttttttatgttagttaggttggtttggaatttttgattttaggtgatttattcgttttagttttttaaagtggtgggattataggtatgagttatcgtattcggttaatttttttggttttttaatttaatgtttttttgttttaggattttatcgaaggtaagatattatatttagtagttacgtttttttggttgtgatggttttttaggttttttttgttttgatgatttgatagtgttatttgtttgagatagagttttttttttgttttttaggttggagtgtagtgaggtaattttcgtttattgtaatttttatttttagggtataagtgatttttttgttttagttttttaagtagttgtgattataggtatgtattattttatcgggttaagttttttgtatttttagtagcgacggggtttttttatgttggataggttggttttaaatttttggttttaagtgatttttttgttttggttttttaaagtattaggattatagatgtgatatattgtatttattaatagtgttgaggagtattgggtaagtattttggaggatgtggtttaattggaatttgtttagtgttttttttatgattagattgaaagattttagaagtaaagagttattttaattatatgatttattaatgttgaggttaattttaattatttagatgttaatgttaggtttttttattgtaaatttaggttttttttttttttttttgtatttttttttttgaaaggaagttattatgtatagtttatatttatagaatggggaggtattttttatttttttgagagtagagtatttacgtagattatttggaatttttttgtataaattatttgtttatttttttttttttatttatttgttttatatttatttatatgattataggtttatggatattttatgtttgggattataatttaatattattttattttgatgtttaaattgttttagttttggttattgggagtttttttagttggtttttttggtatattttttaattttgtgtgtgagtatacgtgtggaatattttttttttttttggtattataaagttatattgaggtgagttatgattgtgttgttgtattttagtttgggcgatagatcgagattttgtttttaaaattaataatttaaagagtgagattttgttttagaaattagtaatttaattttttgggatagtaggaggtgtgtttgagtttaaatttttttttttagagatagagttttgttatgttgtttaaggcgggatttgaattagatttaaatttttgggtttaagcgattttttcgtttttcgagtagttgggattataggtacgagatatcgcgtttattttcgaatttgaatttttttttaatacgttttttttagttattttttttttttttttgagattaagttttattttgtcgtttaggttggagtgtagtggtacgatttcggttcgttgtaatttttattttttcggtttaagcgattttttttttttagtttttttagtagttgggattataggagtgtgttattatattcggttaatatttgtattttagtagagcggggtttcgttatgttggtcgggttggttttaaatttatgattttaagtgattcgttcgtttcggttttttaaagtgttgggattataggcgtaagttatcgtgttcggttttttttagttattttttatgaaattagagttagagaattttttaagtttttgtttgtagtttttttttatcggtttttttaaagtagttttagtattggtcgatagagggagtaagaaaaagtagaacggttttttttttttataaacgtttttttaagtgaagaaatcggcgagattagtcgcgggggcgggattaagttttgcgtagaattgttaaattcgggcgtgggtttcgagttgttacgtgagtgtttgcggttagttgattgtgttagagtttcgcggggagggcgagtgggggatttttcgttttagcgcgagtcgagggtttttgttgattggtggaggaggatttagtagtaatatcgtggggcggggtttcggcggggggtattgttattgttttttatagggttacgtgggaggtgaggtatagagcgttggggagagagtggagcgtcgttcgtcggtatgtgcgtatgcgttgaggttttttgacgtcgattggggggttacgagttacgggcggcgtgcggcggttggtgggggcgtgttcggcggagcgggcgcggcgttacgaggtcgttggttggttagcgttagttacgtggtttttggtcgtaagcgacgcgcgtcggtgcgacgttaacgtagtcgggcgagttttatcgatttgtgtttcgcggttcggtcgcggttgagtttttttagggttagggttaggcgttttgttgagtttttttgtggtcgttatggataatttcgggaaggaagcggaggcgatggcgttgttggtcgaggcggagcgtaaagtgaagaattcgtagttttttttttttggtttttttgggtgagaatcgggttgaggggtcggtcgggatttaggttgagaggacgaaggagttacgttcggaggtggcgggttagggtacgtagagttcgggtcgaggggacggagaggaatttgtaataaggtgatatggtttgaggcggtagaggggacgtaggttgagggttaagagtttgggtcggggtaatacggtttgaggagagacggtttgatatggcggaagggatttgggttgaggatatacggatcgaggcgatattattttgaggcgaggaaggggatttaggtcgaagataggttagcgggcgggggagaatttggatcgagggagtacgttttgaagttttggaggggatcggtttggggggacggagggagttcgggagagaagttaggtttagaggtttttcggagttttaggggagtttgtttgaaggtttttaggcggtagtgatggggtttggggttgaggacgtttgttcgagggattgatttttttaatttttggagtagtggatttgcgtgggttttgggcggtgagggtgaaggttgaagggggttgatattaggtagaggggtttagggttagatgattttaggagcggtgagtcgcgtttgaagtgtggggggtgtatggggtgagtacggttttggttagtagtgattagtttaaggatagttgagcggaggaattcgggatgatggagttaagattgtggaggttttagtattttgggaggtcgaggtgggtagattatttgaggtcgggagttcgagattagtttggataatatggtgaaatttcgtttttattaaaaatataaaagttatttgggtttggtggcgggtatttgtaattttagttattcgggaggttggggtaggagaattatttgaatttaggaggtagaggttgtagtgagtcgagatcgagttattgtattatagtttgggggatagagcgagattttgttttaaaaaaaaaaaaaaaaaaaaagaaagaaagaaagaaaaaagtttgaggaggtttgggttgaggttggagatttttgggtgggggaatgcgtggtggtggtttggttaaggagatggagggataatagggagagatagggggattgagagaattaaaacgggggattaaatttttgttgtgtgattttcgagtaatagggatgatagagatatgttgagaagagggatgggaaaaggtttgggagatagaattaatatatatgacgtggtataaaatttacgttagtttttaaaagttgatacgattattttgtgataaattgtagtggtttagaagtgttaagagtttaagtagttttgttatttattttatgattttgggtaaattgtttagtttttttgtaaaggagattataaattaaatttattttttatttgttatgagtgttagaattgagtttggcgtggagttatatttttgagagtgttagttgttgttaatgtgatttttagaaggaaataggttcggagcgtgtagagagttgatgggggtttaaggtggacgttcgagcggagaggtttgggaggggttaggagagggagagattgagaaatatgagtgtgttaagaggagttgaaagggaatagaaaagggatttacgaagatttagtagggttgagaggagtatgaggttttgggtagaggaaggagaagggagtttggtagggggcggtggtgtgggaggtggtgggatttgtgttgatgggatgattcgaaagggttaaggggaggttgtggaaattgagaggagatttgggaaaggattagtgggtttgtagagagaatagtgtgtggtggttatttagaagtagagtttggggacggtggtgggattgggaatatttgtagaaggttggagaagggggtttgggaggagggtttggggatgggaagagattgtggtaggagtttggtagaggttggtaagatacgaaggagagggatttttataagagaggaaggaataggaaaagggttttaggttacgttttttgtttgaggttggataatgtttagtaaaataatttgaagaatatgatggcgaattgtttggtgtggagaaatattcggggttgatggattggattgattaggtgaaaaatgttttattttagaggttgcgaggagagagagggtgtgtgtgtgtttttttttttttataaggggagaagtttaagtgttgtgtttgggggtggggttacgagttgggtttttggtgatagtttttttgggtggttttgggtgtttggtttttttggtttagggattagtgggttgttggattgtgtgtttggagggagtagttaagttagttttaaggtatttgttatttgattgggaaggtaggatgaatagtaaatattaataaagtggaattatttattgtaaggaggggttcgatgatgttatttttgtgattgtttgagtttagaggaagtagcgtgaattagggggaggtttttggtgaggagtgagttgggttttaaggaattttaggatttgttggggagtggggtcggggagggtgttttaggtagtagggatggtgtaatagagatttatcgtgacgggaggttttgtttggaaagatagggaattgagatttagagggattagaaatggttttttgggggagaggttttaattttggggggatgaatatgagttttggggtgttttttggtagggagtagtattttaggtaaggattattatggagtatgttttaggaagatggaatatagggagttttacgttagattataaaggtggaagcggtaggtgaggttagataaggaaggtttggtgagtaagggttgggtttggaggaggtattgaagattttcgaggaggttaagggaggtttattttggcgagtttttgtttgttttttagaaaggattgtagtagttggtgtgggggagagtgatagtaggaggttgttgtagtgtcggtaatattagtagatgttggttattaagtgttcgttttgatttagattttggtttgggttaggtttaatttgttgatggatggtatggatttagtttttataaaattttcgtggaggtagagaaatttgggggtttagagaagttgatttatttgtttagttttatagtaagtgggagaagtggtatttaaatttagttttgtgtgattttagagtttttttatttagtttttttgttgtgttattacggtagtttttttttaaggtttatgattatttttgggtattatatttaggaaggatgttggtaaattaggtgtgttggagagttgttatttttttaattgtttttttatggttgttttttttaaatatgtgaaaaaaagagttggtgtgtttattttagttttttttagtttttagaggagttgatttggtgttgtgggagtatgagtgaggttagggtagagggtagggaggatgggaggttggtttgatcggagtttgtgtgtttgggagttgggagtatagttagaggttagtttgggaggatttgtttggcgggcgggaattatttaggtatttttttttttttgatttgggtttgtttgtgtttaatattttataatttatttttatttaaggtttttggtagttgtcgggattggagaagggagcgttgcggtttagtttgtttttggtgtttttttttttttttttgggaattttagtaatgatagtattttatattgaggggtttttgtttttgttaaagggtaagttagagagttcgtatttgggacgtaaggcgatgggtgtttgtgttgtcgtttgttttggtgtttagatgttatttttgttttttattatttttgggttgttagacgttagggggttttgatgtattagtagttattgaaggcgatagtattagttagttaggagaagtttaaagttatatttgtttttttttttggtgatgggggcgtagtttaaatttttgttttggaagtaaaaagacggagattttttaattatagtatagtgagttagtagtagaaggggatggttgagtttaggtatattagttttttttttttgttgcgtgttttttggggaatttagagtgtttgttgtgtcgtttggggattttgtaggttttgaatggcggttttgttttttggggtttttttttatttttgatgttttttagttattttttttgtttttaaaatagttaaaataaaaatttttttttttttggatataaacgtgtagagggagtttttttatttgtgaaatgaaaattatggtaattgtttttttaggtggttttaaggataaatgagacgatgtgtgggaagtggtgggagtacgttgtttggttttgttaatgtttattaagggtttattgttatttttattagtaggtattgttattggaagttgagttagaagtgttggagaaataggtggtagagggtgttttgtatataaatagtgtatttttaagattagattttgataaattagtttttgtttgaattatttgtaggtaataacggcgggattttgggagggttagtttgtttgtatagggtttgtttagggttttggttgagattggtgtgggtacgagtttttagatttttttttagatcgtttttttttgtagagcgtgtagaaatttcggcgttatttttagtgggtattttggtgaattatagtgttttgttagttgttaagatttataattgaaaatttggtattttttgtttagttttagagtggagttttttttgagggtatataaggtttttggggaattcgagagtttttggtttttttgatggataggattttgttgtttggttatataaatattttcgttttttttttgggatggggttattgagaggtaagggtttttgagaatattttttaagaaaaaggaagtatattcgtttttggtttgtggtgaaatgtaatttcgttggggtgtaggagggtattcgtataagaaaataagaaatagggcgtttgttaggttgtgtgtcgtgtggtaggtgagattttggttttgagtttatttcgaagggtcgtgggtttgtatgtattttgagtattgtgtagtaaggggtggggtatgggaggttaggattttggaagtcgaaggaggagtattatttagttaatttgggatggagatgaagtttatgttgttattttgaagtagggaagcgtgtttggaatcggttttttgcggggtttgatgagagggatgttttcgtttattgaacgttcgtggtgtggttagttttttgttgggtacgtcgtggggtgttgtttgtaagattgttcgtgttttagtagttttgtaaggtgtggagttttatgtttagttatatataaggaaacgtaggttggtatacgatgagttggcgttgaggttaggtttgtttgattattgttagtatttattttattttattttattttatttattttattttattttattttattttattttattttattttattttattttattttatttttattattataagaaattttttagaatttttatttttgggtggtaggtatttttttgagcgtatttttttttttttgtgtaatagtaattattgagtattttttttattttgcgttttgtgttaagtattgattatgtgttatttttaatttttataaagattttttttaggttagatttattgtttttattttattttattttttattttttgagagatagggttttgttttgttgtttaggttggagggtagtggcgcgattatagtttattgtagttttaattttttgggtttaagtgatttttttattttagttttttaagtagttgggattgtaggtatatgttattatgtttggttaatttttagtagagttggggttttattgtgttgtttaggttggttttaaattcgagattaagtaatttttttgtttcggttttttaaagttttgggattgtaggtgtgagttattgtggttagatatgttgttattttgtagataaagaatggaattttagtattttgggagtagaggtaggaggattgtttgagtttaggagttcgagattagtgtaggtaatatagggagattttattttttatttaaaaaaaaaaagttttagggataattagttttaggtcgaatatttagtaaagtatttgaaacggattttagtttaggtttcgttattttaaagttattttttttttattttttgtttttgtttagataggtatgttataagagggttttgtggcgattttagagttgggtagttagtttgtgatattttatttttttatcgttgttaattggggtttgtggagagatgggaaagtagagttgggtttaggtttcgttttgtaggaatttatattttgtttggttaggtaaggtttattgtagagtggcgggaggtagttggtggtttttcgtttttaggtgatattggtggcggtgtttttaggatgttgagtttttggtagtttttagttttagtgtagttagtggattagtagggttggtggttttcggttttttgtgttagggtggattttgtattataggtagttttaattttttttgacgttttttttgtttgttggtttgttattggtaggttcggtagggggttggtttaatttatatttttttgtttagaggatgttttacgtagttttagtagagagtagtttttgttcgtgagatgagggaagtttaggtagtataggttttttggtttttttaatttagaggaggggtgggggtaggtagggattttgttttttttttttatttttttaaggagttttgggtatggggaaggaagtttttttgattattgagtgagaggtaagggtaggattggatttttagggttttagttttttttttaagttttgttgttttttggtagggtaagtttggataagtttttcgttttttttgagttttagttttttcgtttgtaaagtaagggtagtatttaaagggttttcgtgaggagttgtgggttttttttaggggagtgtttgggaggtagggaacgttatgcgttagtcgtgattaaggtatatggtttcgagagtcgtgtaggaggtgggtttatagggaagatataggtatgtgacgggttttaggatattttttttattgagggtgttgattggagatttggggtagtgggttttaagtttgaggaggaaatcgtaggtttgtggttgtggtttttatagaggtaagagagatagagtgagtttaggattcgaaatgggggtttgattttgtttattttgtttcgtgaggtttttcgggagttgtaggtggtgggttttagggtatggtgtatttttggtagttaggaagtgtttggtggatggaggaaggaaggagggggttaagattttgttttgtataattttttggtttaggttttattaggtatttgtgtatttttggtagtgtttagttttttatatggtagtttttgaggttggtggttgtgtttgggagatttgagattttttttttcgttttggagggggagagagtaaagttgagcgggtaattatagatagttttgtattaggtagtttaaattagttttttttattttcggagtggtttagagtcgtgggatgggaggagtgaagtagaggtagtttgggggaggttagtgggggagggatagttagttgttatatgcgttgttatttaggtttttaggagaggaggtttagttagatttttttttcgtgtattgttgttattttttggtacgtaataaatgttcggatatttgttttttaggtgaataaatgtgtatgtgaatggtttttttaggattttttattggaatttaggtacgttattttttttttttggggattttatttttatttttaaaagaagaggatgggattttggagattttttgttattttttggttatggtaatgggtaagatcgcggggtgtaggggaagaaggaggtaagtttggggtttgagtaggtgttaatttttttggtttttttattttatagaattattgatttcgtgtagggttggttgtgtttagtttgggattatagagttttagttcgggtagttggtaggttttgtgttcgttttgaaataaattcggttgggttgattttgtttattgttgattgttcgttgtgggttatttagtgacgtgggttatttttgtttatttagggtttgtgtttttttagagagtgtatggagttggataggatttagttatatttaaaaagaagggaaggttgagttgggggatttgtggggtgggtagatttgtgattaaggtttgaaaatgtttttttaagagaatattttagagaaggtttttttgagggttttttgtagttaggttttaaaggattttttaggatttttagttagaaggttttgaaagttttttatttttttaaggttaggaatgggttttaaagaagttattttaggttgggtacggtggtttatgtttgtaattttagtattttgggaggtcgaggcgagtggattatttgaggttaggagttcgagattagtttggttaacgtggtgaaattttgtttttattaataatataaaaattagtagggtgtgatggtatatatttgtaattttagttatttaggaggttgaggtaggagaattgtttgaattcgggagttggaggttgtagtaagttgagatcgtgttattgtattttagtttgggcgataagagcgaaattttattttaaaaaaaaaaaaaaaaaaaagaagttattttaaataaggtttaaggtgtgttgggttggttgaggtgaggtgggtgagggaagatagagtgtagtagggcgagtgcgggaagaatatattgtttagggttattttttagggatagtagagggtgggggatagtattagtatagttttagaaggtagagggtaggttttttatttggtaagatgatagagaggataggaataaatagattatttatttggtgtgatgtggatttaggaggttaggatttttggtttaattagttcgtttatcgtgggggtatttatttgtttgttgatattgttaggtttggtcgttgatttgatcgttggtggttgttttttaggtagtcggttttagttaattttttttttttaaatttatttgattagttgaattatttgggttttttaaattttaattgttaaaaattttatttgtaggttttatttagattttattgagcgaattttaaagtgtgtggttgtgggattttggtttgatgaaatgagtattttatgtggttgaaagggatgggtaggttggatatattgaattcgtagtgtagagggaaggaatgtttatattttagtttttaaaattatttttgagtttttttatagttggggttggtgtggataagtttttaggtataatgttgggttagttgatatagggtgtgggatgggatggtgaggatgatttgaatgggaaagtatttatttttttttttttttttttttaaaaataaattaaatattagttatgttagtgaagagaggttttgaaatttatttggtgggattttagagtgtgtggattttattttattgattatgtagatattgggagtttgagtagttatagagattatagatttcgcgggttaagtttggttgtattattaagggtagaagaatgtagtgggatttacgggtttgaggtattaatgaggttttttaagttaagaggaggtttattatgtatatgtggaggttaagaagttagagtgaagttgtttaaatagggtattttttatgtttttaaatttttgtttattttttagtgtatttttattgttggataataagtttttggggggttttgttgttttaaataatgttatgttgaatatttttgtaatttttttgattagtttttttaggataaattgttagagatgtaatttattgttggattatagggttaaatataaattttaatatttaaaaatatgtgtgtgtgtgtgtttgtgtatgtgtaaatgtatagatatatatatatatatatatatatatatatatatatatatgtgtatatatgtatacgtgtgtgtatatatgtatatattttttttttcgaaaagatgtataaatagttaaaaaaaaatttagatagtataaatacgggatgtttagtgaataagtttgttttttatatttggttttttttttgtaggttttattttaagagaaaaatgttgttattaggtttttgtgtatttgtttagaaatattttatgtttatataaatatgtatgtttttattatttttattttttttttttttttttttttttttttttttttgagataaggtttggttttgtcgtcgtttaggttggagtttaatggtgtgattttggtttattgtaatttttgttttttaggtttaagtgatttttttatattagtttttttagtagttaggattataggcgtgtattattatattttgttaattttttgtattttttgtagagttggggttttgtcgtgtggtttaggttggtttcgaatttttgagtttaagtaattcgttaattttggttttttaaagtgttgggattataggagttatgaattattatatttagtttatttttttttttttttaaatataaatgggaatattttatatttatattttaaaatagtgttttttatttttttgtatggttgtgtgatatatatgtttagttttgagttggtaatgatatattttagggttgtaaggtttttattgagtaattatagagtgtaaggtataggattaaggttgtttttgcgaaagtaatacgatgttttaaattgggttagttttttagaatgttttgtagtttttcggggaaaggggatttgtagcgcgtttgggatttagtgggtttttagtattttaggtaggaagtagaagaggttgttagattttggggttgtggtggggttaggaatttttcgttttattattttagtaagtatttagtatttattttagtattttcggagggagttggtttgttcgaagtgagtgtgttattgtatgtaggggcgggggttatagatttaagaggtttgggggaagttggttttataggtgaagggtgaggggtaggggtacgtttgtgttcggtattggagtagaatgtttgtttttttttggatagtcgattagattgtttttttttttttttttttttttttttaga

SEQ ID NO: 1294 - DNA, 16509 bp, Artificial Sequence
  chemically treated genomic DNA (Homo sapiens)
tttggggaaaaaggaaagaaaaaaaggagataatttagtcggttatttaggagaaagtaagtattttgttttagtgtcgggtatagacgtgtttttattttttattttttatttgtgaagttagttttttttaggttttttgagtttgtggttttcgtttttgtatataatggtatatttatttcgggtagattagtttttttcgggagtattggggtagatattgggtgtttgttggggtagtggggcgaagagtttttgattttattataattttagggtttgatagttttttttattttttgtttgggatattaggggtttattgggttttaggcgcgttataaatttttttttttcgggagattgtaaagtattttgggggattagtttagtttaagatatcgtgttgttttcgtagaggtagttttaattttgtgttttgtattttgtggttgtttaataaagattttgtagttttggagtgtgttattattagtttaggattgggtatatatattatatagttatataaagaaatgggaagtattattttaaagtgtagatataagatgtttttatttgtgtttaaaaaaaaaagagggtgggttgggtgtggtggtttatggtttttgtaattttaatattttgggaggttaaggttggcggattgtttgagtttaagagttcgagattagtttgggttatacggtaaaattttaattttataaaaaatataaaaaattagtagggtgtgatggtgtacgtttgtagttttagttattagagaggttgatgtgggaggattatttgagtttgggaggtagaggttgtagtaagttaagattatattattgaattttagtttggacgacgatagagttagattttgttttaaaaaaaaaaaaaaaaaaaaaaagagaaagagagtgaaaataatagaaatatatatgtttatataaatataggatatttttgggtaaatatataaaaatttagtaatagtattttttttttaaggtgaagtttgtagaaggagggttaggtgtgggaggtagatttatttattggatatttcgtatttgtattgtttgaatttttttttaattgtttgtatattttttcgagaaaaaaaatatatatatatatatatatacgtgtatatatatatatatgtgtatatatgtgtatgtgtatatatgtgtgtatatatttatatatttatatatatatagatatatatatatatatatttttaagtattaggatttatatttggttttgtggtttagtaatgaattatatttttagtaatttattttaaaaaaattaattagaaaagttataaggatgtttagtatagtattatttaaaatagtaaaattttttaaaaatttattgtttaatagtagggatatattgggagatagataggaatttgaaaatataaagggtattttgtttgggtagttttattttggttttttgatttttatatgtatataatgagtttttttttgatttgggggattttattagtattttaaattcgtaagttttattgtatttttttgtttttaataatataattaggtttagttcgcgaggtttgtagtttttgtaattgtttaaatttttaatatttatataattagtagaataaaatttatatattttggagttttattaaatggattttagggtttttttttattggtataattagtgtttagtttatttttaaggaagagaaaagggaggagtgggtatttttttatttaaattatttttattattttattttatattttgtgttaattggtttaatattatatttgggaatttgtttatattaattttagttgtggaggggtttaaaggtaattttgggagttgggatgtgagtattttttttttttgtattgcggatttagtgtgtttaatttgtttattttttttagttatatgaagtgtttattttattaaattagagttttatagttatatattttgggattcgtttagtagggtttggatggggtttgtaaatgagatttttaataattggggtttggggggtttaggtaatttagttgattaggtgagtttgagaaggaaaaattgattgagatcgattatttggaaagtagttattagcgattagattagcggttaggtttggtaatgttagtaggtaaataaatgtttttacggtgggcgggttggttgggttagggattttggttttttgaatttatattatattaggtaaataatttatttatttttattttttttgttattttgttagatgaaaagtttattttttgttttttggggttgtgttgatgttgttttttattttttgttgtttttgggaagtggttttgagtaatgtgtttttttcgtattcgttttgttgtattttgtttttttttatttattttattttagttagtttaatatattttgggttttgtttggagtgattttttttttttttttttttttttgagatggagtttcgtttttgtcgtttaggttggagtatagtggtacgattttagtttattgtaatttttaattttcgggtttaagtaatttttttgttttagttttttgagtagttgggattatagatgtgtgttattatattttattaatttttgtattattagtagagatagggttttattacgttggttaggttggtttcgaatttttgattttaagtggtttattcgtttcggttttttaaagtgttgggattataggtatgagttatcgtgtttagtttggaatgatttttttagaatttatttttggttttggagaggtaagaaatttttaaaattttttggttgagaattttgaagggttttttggggtttggttgtaaaaaatttttagaaggattttttttggaatgtttttttaaagggatatttttagattttaattataggtttgtttattttataggttttttagtttagtttttttttttttttgagtgtgattaagttttatttagttttatgtattttttgaaaaagtatagattttggatgggtagaaatgatttacgttattgagtggtttatagcgggtaattaataatgagtagagttagtttagtcgggtttattttaggacggatataaagtttattagttgttcgggttgaaattttgtgattttaggttaagtatagttaattttgtacggggttaatgattttgtggggtggaaaggttagagggattaatatttgtttaggttttaggtttgtttttttttttttttgtatttcgcggttttgtttattattatggttaggggatgataggagatttttagggttttattttttttttttagaaatgggagtgaagtttttaaagggggaaagtgacgtgtttaggttttagtggaagattttgaagaagttatttatatatatatttatttatttggggaataggtattcgagtatttattacgtgttaggagataataatagtatacgaaaggaaaatttagttgggtttttttttttgagggtttgggtggtagcgtatgtgatagttgattgttttttttttattgattttttttaagttgtttttgttttattttttttattttacggttttgagttatttcgggaatagagggaattggtttgggttgtttgatgtagggttgtttataattattcgtttagttttgttttttttttttttaaggcggaggaaggagttttaggttttttaaatatagttattaattttagggattgttatatggaaggttgggtattgttaggaatatatagatgtttgatgggatttgggttagggggttgtgtagggtagagttttagtttttttttttttttttttatttattaggtattttttggttgttagaaatatattatgttttgagatttattatttgtagttttcgaaggattttacgaggtagggtggataaagttaggtttttatttcgggttttggatttattttattttttttgtttttgtggaagttatagttataggtttacggttttttttttagatttaaggtttattgttttaagtttttagttagtatttttagtggggaaggtgttttagggttcgttatatgtttgtgttttttttgtaagtttattttttgtacggttttcgagattatgtgttttaattacggttggcgtatggcgttttttgttttttaggtatttttttggaaggagtttatagttttttacgagagttttttgggtgttgtttttgttttataggcgaggaagttggggtttagagagggcggagggtttgtttaagtttattttgttaggaagtagtagggtttggaaagaggattggggttttggggatttagttttgtttttgttttttatttagtgattaggaaggtttttttttttatgtttaaggttttttgggaaaataaggagggaggataaggtttttgtttgtttttattttttttttagattaaagaagttagggagtttgtattgtttaggttttttttattttacgagtagaggttgttttttgttggggttgcgtggagtattttttaggtaaaggagtatgaattaagttagttttttatcgagtttgttagtaataagttaataggtagaaggaacgttagaaaaagttaaggttgtttgtggtgtagggtttattttggtatagggagtcgggggttattagttttgttagtttattgattgtattggagttgggagttgttagaggtttagtattttgaaggtatcgttattagtattatttggaagcgggaaattattagttgtttttcgttattttgtagtgggttttgtttgattaagtagagtatgagtttttgtagggcggggtttgagtttagttttgtttttttatttttttataagttttagttaataacggtgaaagaataaagtgttataggttaattgtttagttttgaaatcgttataggatttttttgtgatatgtttgtttgggtaaagataaggggtagaaagagaatgattttggggtggcgagatttgggttgaagttcgttttaggtattttgttaagtgttcgatttggggttagttatttttgaggttttttttttttaaataagagatggggtttttttgtgttgtttatattggtttcgaatttttgggtttaagtaatttttttgtttttgtttttaaagtgttgagattttattttttatttataaaatggtagtatgtttggttatagtggtttatatttataattttagggttttgggaggtcgaagtaggagggttgtttgatttcgagtttgagattagtttgggtaatatagtgagattttaattttattaaaaattagttaggtatggtggtatatgtttatagttttagttatttgggaagttgaggtgagaggattatttgagtttaggaggttgagattgtaatgagttatgatcgcgttattgttttttagtttgggtaatagaataagattttgttttttaaaaaatgaaaaatgaaataaaatggagataatgaatttggtttgggaggagtttttgtgaggattagaaatgatatatagttaatatttggtatagagcgtagaatggaaaaggtgtttaatggttgttattatataaaggaagagaaatacgtttaaaggggtgtttgttatttaggaatgggaattttagagagttttttgtggtggtaaaaataaaataaaataaaataaaataaaataaaataaaataaaataaaataaaataaaataaataaaataaaataaaataaaataaatgttgatagtagttagataggtttggttttagcgttagtttatcgtgtgttagtttgcgtttttttatgtgtaattaggtataagattttatattttgtagggttgttgaagtacgagtaattttgtaggtagtattttacggcgtgtttagtagagagttggttatattacgggcgtttagtaaacgagagtattttttttattaggtttcgtagaggatcgattttaggtacgtttttttattttagaatagtagtatgggttttatttttattttagattagttaagtaatgtttttttttcggtttttagagttttggttttttatgttttattttttattgtataatgtttaaaatatatataggtttacggtttttcgagatgagtttagagttaggattttatttgttatacggtatatagtttggtaggcgttttgttttttatttttttatacggatgtttttttgtattttaacgggattatattttattatagattaagggcgaatgtatttttttttttttaaaaggtgtttttaaagatttttgttttttagtagttttattttaaaaaggagacggaaatgtttgtatggttaggtagtaaagttttatttattaggaaagttaggaattttcggattttttagaaattttgtgtgtttttaggaaagattttattttgagattgggtaagagatgttaagtttttagttgtggattttggtagttggtagggtattgtgatttattagggtgtttattggaaatggcgtcggggtttttgtacgttttgtagaggaaggcggtttggagagaaatttggaagttcgtgtttatattagttttagttaaggttttgggtaggttttgtatagataagttggtttttttagggtttcgtcgttattgtttataggtagtttaaataggaattgatttgttaagatttgattttaggaatgtattgtttgtatatagaatattttttgttatttatttttttagtatttttagtttaatttttaatgataatatttattaataaagatgatagtgagtttttaataaatattagtagagttaggtaacgtgtttttattattttttatatatcgttttatttatttttaaaattatttgaggaaatagttattatgatttttattttatagatgaagaaattttttttatacgtttgtatttaagaggaaggaagtttttattttggttattttggggataggggaggtggttgggaaatattagggatgaggaaaagttttagggaatagagtcgttatttagaatttgtaggatttttaaacggtatagtaggtattttggattttttaggagatacgtagtagggaggaggaattagtgtgtttggatttagttatttttttttgttgttggtttattgtgttgtagttaggaagttttcgtttttttgtttttagagtagaagtttgagttgcgtttttattattaaggggaggaataggtatggttttgagttttttttaattggttggtgttgtcgtttttagtggttgttggtgtattaaagttttttagcgtttggtagtttagaaataatgaagagtaagggtggtatttgagtattaaggtaggcgatagtatagatatttatcgttttgcgttttaggtgcgggttttttgatttgttttttgataggggtagaggttttttaatgtgggatgttgttattgttggggtttttaaaggggaagggagaggtattaaggataagttgagtcgtaacgtttttttttttagtttcggtagttattaaggattttgaataaaggtgggttatgaaatgttgaatataagtaaatttagattagagaggaggaggtgtttgagtgattttcgttcgttaagtaggtttttttaagttggtttttggttgtgtttttagtttttaggtatataagtttcggttaggttagttttttattttttttgttttttgttttaattttatttatatttttatagtattaggttagtttttttgggagttggaaggaattgagatgaatatattagtttttttttttatatatttggagaaaatagttatgggaggatagttaagagggtggtagttttttaatatatttagtttgttaatattttttttaaatgtagtgtttagagatggttatgaattttgaggagaaattatcgtggtagtatagtaaaggggttaagtgagaaggttttggaattatatagaattgggtttgaatgttattttttttatttattgtggggttgggtaaataagttaatttttttaagtttttaagtttttttatttttacggggattttgtaaggattaaatttatattatttattagtaggttgagtttggtttaggttagggtttgagttagagcgagtatttaataattagtatttgttagtattatcggtattgtaatagttttttgttgttatttttttttatattagttgttgtagttttttttagaaggtaaataggagttcgttaggatgggttttttttagttttttcggagatttttagtgttttttttaggtttagtttttgtttattagattttttttgtttggttttatttgtcgtttttatttttatggtttaacgtggaattttttgtgttttatttttttaaggtatgttttataataatttttgtttggagtgttgttttttgttagagagtattttagaatttatgtttatttttttagggttggggttttttttttaggaagttatttttgatttttttggattttagttttttgtttttttaggtagaatttttcgttacggtagatttttgttgtattatttttgttgtttagagtatttttttcggttttattttttagtaagttttggggttttttggggtttagtttattttttattaagagtttttttttggtttacgttgttttttttgagtttagatagttataggaatgatattatcgagtttttttttatagtaggtaattttattttattggtgtttgttgtttattttgtttttttaattaggtagtaaatgttttggggttgatttagttgttttttttaagtatatagtttaatagtttattaatttttgggttaaagggattagatatttagagttatttaggaaaattattattaaaaatttagttcgtggttttatttttaaatatagtatttgaatttttttttttgtgaagaaaaagaaatatatatatatttttttttttttcgtagtttttaaaataaaatattttttatttaattaatttagtttattagtttcggatgtttttttatattaggtaattcgttattatgttttttaagttattttgttaaatattatttaattttaaataaggggcgtggtttagagttttttttttgttttttttttttttgtaaagatttttttttttcgtgttttattagtttttgttaggtttttattatagtttttttttatttttaggttttttttttaaatttttttttttagttttttgtagatgtttttagttttattatcgtttttaggttttgtttttgagtggttattatatattgttttttttataagtttattagtttttttttaggtttttttttagtttttataatttttttttgattttttcgggttattttattagtatagattttattattttttatattatcgttttttgttaaattttttttttttttttttgtttagagttttatgttttttttaattttattaagttttcgtggattttttttttgtttttttttagttttttttagtatatttatgttttttagttttttttttttttgattttttttagattttttcgttcgggcgtttattttgaatttttattagttttttgtacgtttcgaatttgtttttttttggaagttatattaataatagttaatatttttagagatgtaattttacgttaggtttaattttaatatttatagtaaatgggaggtaggtttgatttgtgattttttttatagggagattaaataatttatttaaagttatgaagtaagtggtagagttatttgggtttttggtatttttaagttattataatttattataggatggtcgtgttagtttttaggagttaacgtgagttttatgttacgttatatgtgttagttttgttttttaggtttttttttatttttttttttagtatgtttttgttatttttattattcgaggattatatagtaggaatttgatttttcgttttggtttttttagtttttttgtttttttttgttatttttttatttttttggttaagttattattacgtatttttttatttaggagtttttagttttaatttaggtttttttaggtttttttttttttttttttttttttttttttttttttttttgagatagagtttcgttttgttttttaggttgtagtgtagtggttcgatttcggtttattgtaatttttattttttgggtttaagtgatttttttgttttagtttttcgagtagttgggattataggtattcgttattaggtttagataatttttgtatttttagtagagacggggttttattatgttgtttaggttggtttcgaattttcggttttagataatttgtttatttcggttttttaaagtgttgagatttttatagttttgattttattatttcgggttttttcgtttagttgtttttaaattagttattgttaattagggtcgtatttattttatgtattttttatattttagacgcggtttatcgtttttaggattatttagttttgagtttttttgtttggtgttagttttttttagtttttatttttatcgtttagggtttacgtaaatttattgttttaggggttgaaaaggttagtttttcgggtaggcgtttttagttttaggttttattattgtcgtttgagagtttttaaatagatttttttagagtttcgaaaagtttttggatttggtttttttttcggatttttttcgtttttttaggtcggttttttttaaggttttaggacgtattttttcggtttaggttttttttcgttcgttggtttgttttcggtttgggttttttttttcgttttaagatagtgtcgtttcggttcgtgtgtttttagtttaaatttttttcgttatgttagatcgtttttttttaaatcgtgttgtttcggtttaggtttttggtttttagtttgcgttttttttgtcgttttaggttatgttattttattgtaggttttttttcgttttttcggttcgagttttgcgtgttttaattcgttattttcgagcgtgattttttcgtttttttagtttaggtttcggtcgattttttagttcggtttttatttaaagaggttagagaagaaggattgcgagttttttattttgcgtttcgtttcggttaatagcgttatcgttttcgtttttttttcggaattgtttatggcggttataaagggatttagtaaagcgtttgattttgattttgggaagatttagtcgcggtcgggtcgcggaatatagatcggtaaaattcgttcggttgcgttgacgtcgtatcggcgcgcgtcgtttgcggttaggaattacgtgattagcgttggttaattagcggtttcgtaacgtcgcgttcgtttcgtcggatacgtttttattagtcgtcgtacgtcgttcgtgattcgtgattttttaatcggcgttaagagattttaacgtatgcgtatatatcggcgaacggcgttttattttttttttagcgttttgtattttattttttacgtgattttgtggaaggtaatggtagtatttttcgtcgaggtttcgttttacggtgttgttgttggatttttttttattaattagtaggagttttcggttcgcgttggggcggggggttttttattcgtttttttcgcggaattttggtatagttagttgatcgtagatatttacgtgatagttcggggtttacgttcgggtttgatagttttgcgtagaatttagtttcgttttcgcggttggtttcgtcggtttttttatttggaaaggcgtttgtgggaaaaggaaatcgttttgtttttttttgttttttttgtcggttagtattggaattgttttggggagatcggtgaagagagattgtaaataaaaatttaagaggttttttaattttggttttataaaaaatagttgaagagggtcgggtacggtggtttacgtttgtaattttagtattttgggaggtcgaggcgggcggattatttgaggttatgagtttgagattagttcggttaatatggcgaaatttcgttttattaaaatataaatattaatcgggtgtggtggtatatttttgtaattttagttattgaggaggttgagagaggagaatcgtttgaatcggggaggtggaggttgtaacgggtcgagatcgtgttattgtattttagtttgggcgatagagtgagatttagttttagaaaaaaaaaaaaaatagttgaagagagcgtgttaaaaaaaaatttagattcgaagatgggcgcggtgtttcgtgtttataattttagttattcgggaggcgagaggatcgtttgggtttaggagtttgagtttagtttaagtttcgttttgggtaatatagtaagattttgtttttaaaaaaaaaagtttaggtttaaatatattttttgttgttttagaaaattgagttgttggtttttgagatagggttttattttttgggttgttggttttggagatagggtttcggtttgtcgtttaggttggagtgtagtagtataattatagtttattttagtataattttgtagtgttagaaaggaaggaagtattttatacgtgtgtttatatataaaattagggggtatgttaaaggagttaattgaaagaatttttaatggttaaagttggaataatttgagtattaaaataaagtagtattggattataattttaaatataaagtatttatgagtttatggttatatagatgaatatagaataaataaataaaggggggagaatagataaatagtttgtgtagaagaattttaaataatttgcgtagatattttgtttttaagaaggtgaaggatatttttttattttgtaagtatggattgtgtatagtgatttttttttaaagaagagggtataagaaaggggagaaaaagtttaaatttatagtggagaaatttgatattgatatttaggtgattgaggttaattttaatattgataagttatgtgattaaaatggttttttatttttgggattttttaatttaattatgaaaaaaatattagataaattttagttgagttatattttttaaaatatttgtttagtattttttaatattgttggtgggtgtagtgtgttatatttgtagttttggtattttgggaggttaaggtaggaggattatttgaggttaggagtttgagattagtttgtttaatatggggaaatttcgtcgttattgaaaatataaaaaatttagttcggtgaggtggtgtatgtttgtaattatagttatttgggaggttgaggtaggaggattatttgtattttggaggtggaggttgtagtgagcggagattgttttattgtattttagtttgggggataagagggagattttgttttaaataaataatattgttaagttattaaaataaggaaagtttgagaaattattatagttaaggagacgtgattgttaaatgtaatgttttattttcggtgggattttggaatagaagggtattgagttaaaaaattaaggaaattggtcgggtgcggtggtttatatttgtaattttattattttgagaggttgaggcgggtggattatttgaggttaggagttttagattagtttggttaatatggagaaatattgtttttattaaaaatataaatattagttgggtttggtggagggcgtttatagttttagttatttaggaagttgaagtagaattgtttgaatttaggaggtggaggttgtggtgagtcgagattgtgttattgtgttatagtttgggtgatagagtgagattttattttaaaataaataaaaatattaaggaaatttaaataaattatgaagtttagttaataatattgtgttatattggtttatacgtggtaataaatgtattattttaatataagatgttaattataggggaaattggggtatgtgggaatttttttttgttgttattgtagtttttttataaatttaaaattattttaaaaattttttttaaataaaatagtttttaaggtcgtatttataatggttttaattttgagtttgtggtgggttataggaatttgtatttttaaaaaatagaattttatataattaggatgtagttagatttggtggtttatgtttgtaattttaatattttgggagattaaggcgggaggatcgtttgagtttaggagttaaggattaatttaggtaaaaagtaagattttatttttataaaattaaaaaatttttaattattttttgggaggttgaggtgggaggattgtttgattttaggagtttgaggttgtagtgagttatgattgtgttattgtattttaatcgggataatagagtgagattttgttttattttaaaaaaaaaaaaaagtaaaattaggatgtagataatttcgggattatagtttgagaaatcgttattatttagggggttggttgagtcgagtaaggtataagaagtttttttttaattttttttatatatgaatagatttgtttggattatttatttgtggttgttattgtgttttgattatagagtaggtgggggtgagtttggattattataagcggttttggttttatgtttgttaaagtaatattatgtaaaagtttttgtttaagttgttttattttagggtaatttgttatgtagtaatagataatataattttttagtttttttaattagggaatttttttttatttttagagtttattggatttatttaggatgggatttaaataatattagtaattatatgagagtttgttaattagtagttatttagtttttatggtgtatttttttaagtgtttaatttatattttatttttatttatttatttattttgatatggagttttgttttgttgtttaggttggagtgtagtggtacgatttttgtttattgtaatttttgtttttggatttaagtaatttttgtgttttagttatttaagtagttgggattatagttatgtattattatatttggttaattttgtattttatatttttagtagagatggggttttattatgttggttaggttggtttcgagtttttgattttaagtgattcgtttattttggatttttaaagtgttggtattataggcgtaagttattacgtttggttataatttatattttatttaattgataggttgcgggggttgaggaggggtaatttttattttattttatagattgagaaaattgaggtttttatagggaaagtgattcgttttagtttataaggaggtaagaggagttaggatggaattgaggtttattttatatttgaatttttttttttaattgtagtgttttaattgttttaaatttagcgtttatttttgttttatttttagttaatttttaagttttagttgataggtgggttttttgtgaaatttttttacgttgtcgtttatttttttagttttttagaatacggtttattttattatagatacgattatattttgatgtaattaattttttgtagttaattttttatttgagttaatggtattaattatagttgtttaggtttaaatttgttttgttggttttgatttgttttttttttgattattttttattgatgtgtgagttattgataattttgtcgtttaggttggagtgtagtggcgcgattttggtttattgtaatttttattttttaggtttaagtgatttttttgttttagttttttgagtaattgggattataggtgtttattattatgtttggttaattttttgtatttttagtagagacggagttttattatgttggttaggttggttttaaatttttgattttaaatgatttatttattttgattttttaaagtgttgggattataggtgtgagttattgcggagtttattttttttttttttttttttttttgatggagtttttttttattaggtcgaaatgtagtgacgtaatttcggtttattgtaatttttattttttaggtttaagcgatttttttattttagttttttaagttattgggattatagttatgtggtattatatttagttaatttttgtatttttaggagaaatggggttttattatgttggttataatggttttgattttttgattttatgattcgttcgttttggttttttaaagtgttgggattagtggagagagttattgtatttggttatggagtt

SEQ ID NO: 1295 - DNA, 9741 bp, Artificial Sequence
  chemically treated genomic DNA (Homo sapiens)
ggtttttaatggttggtatttgtgggtgtggtttcgtttttttttttttttttaaatatttatttttttgttttgattttgaaatttaattgaaaataaaaaaattaataatgatggttttgtgaaaggttagagtaggagaggttgagaggaatgtggagaaagtttagtaaaaagaagtaaatataagttaaagaaattattggaaagggttgggtgtaggggggtgtattggtgattttagtattttgggaggttgaggtaagagggttgtttgagtttagaagtttgagattagtttgggtaatatagtgaggttttgtcgttattaaaaataataataaaaaatagttaggtgtggtggtatatatttatagttttagttatttgggaggttgaggtaggaggattgtttgaggttaggagtttgaggttgtagtgagttatgattatgttattgtattttaatttgggtgatagagtaagattttgtttttaaaaaaaaagaaagaataatttaaaaaagaaagaaagaaagaaagaaaagaaattattttgaagaagggttatggttaggtttgagagaaaatattttttaagtgtttaaatgttttttttttttttttcgtaatgatataggatttttagttaaaattgattgagttttgttttggaattcgtattgtattgtgttttgaatatagatggtgagtgtagttatagacgatggtaattaatagattacgcggtggttgtggatagggagatgaggagacgtggttgtttttgggtattttttggaggtaaagtcgatagaattttttatagattgtatgtgttgtgcgatagaaagagtagaggagtatgattttaagtgtttgggtaaggagagggtgaagttgttatgaatttagtatggttgagtttgaagggagagtaggtatgggagtattaggagtttagatttgaatagattatgtatgatattttagatgtttaggtggagttgttaagaaggtattggatataggaatttggagaacgaattttttatattaattttatagagatttagtggtgatttttaaaagttaatgtatttattaatatttaattagaaaaaaaaatatagattataatggtttttattagttttattagaaaaaaagttaagaataattttttaaaattttattttgatgaaaggaattgttaaatgatagtagaatttgttttaaaggttttttgtaaattcgttatttataatttagaatatatttttttagagaaatgattttatgatttatggttaattttttgggttgggttttagaagtgtattttttgtataatataatagtatatttgtgggggaaaagggtaaaattatatagttaggttattagtaattaaataaataaagaaaatttagcgatataggagtttttatgtttttttatttatgatttttgatttgaaatagagtttatttgatttattaaattttttttttaagaaatgataaagattttttatttgattggaatatttagttgtgggaggtaggtttaaggattttgttttttggtagtagattaggttaggggaaggaagtaggtttgtgtagataaggaatttggggatgtaggtttaaagaatttttagagatttaagtttattatgagagaaggaatggggtttgtaagttttattttaagttttatttatattttgatgtgaattattttagttatatttaaaataagtagattatttaggaatgtatatttttattgaggtaggataaagaaaaagagtttttagaattagaggagaggattggtttagatggaattatttgggttagtagttagtaagtttgtatgttgacggggtaggtgagggaggatatgagcgtttaaagagttttaggagaggaggtaagaggtaagttgaagttataaagataatttttgttgaggttttggtggtagttgttgtgataataagaattacgtttatgggttaataaggtttggggttatattatcgattttagtttgggaaattatacgttttagtttattattatttggtttatgttttttatttttagtttttttaagttgattttttagtttaaattttttttgtttaatttttattttaatgttattgtaggaagagaaggggaggggaagaaagtgggggtatttgtgttatatttttattgtgtttatttttttttttttttttttttttattatgaatgtatgttagtatatatttattacggtttttttggttaagggttttttgaaatatagaatttttgaatgtttatggttattgatatagttcgaacgaatggaggaatattagggttgttggtttcgtgttgataggattaataatacggatacgtggagtggttttaagttgtgaaaagtttaataggtaagaaagaaggaaggaagaagaaaatattttttttatatagagatagaggtagggaggatttgaataaagagaaaatttagtgtgtagtggaaaagtggttgtttatattgggattttggaggaggcggtgtttggtttgtatagggtttaggggattggtttgattaggtgtgttatttatatagttttcgaaaaatttggtttttttattttagttttttaatatgtaaatataggttatcgtgatgttttgaatatatggtgttatttggaggtggtcgtgatatttggtatatttgatgataaggaagagatggcggaatcgttatgttgagtgaatttagtttttaaggattgatatttgtatattaaagtttgcgggtttggttttttaagttgttttttttgttagaaaagagatggtttaggggttgttttttaaaataggaaaatttttattgagaatatttatttttattatttgtttaaaaagtattttttaataattgttatattattatcgtggggttttttttttattttttttttgttgatgttaaagtaaaattaagttaaatattgtatttttttatagattatgaatgtaatgagggtaggtattatattttttgtttaataattgggttttaggtgtgtaggtttaatgttttgtgtagagtgggtatttagtaaataataatttaataatgaatgaataaataagggagaatgtggaggaggttataggtttagaaaattttttgggtatttttaatggttttagagggtgatggtattgggtggttaataaatttaaatttatttgaaaatataaggttttttattggtaatagtttttttatatttaattagttattttagagttgtggtgaattggaagttatggttaaattattttatatttttttatttttttattttttgaatttgaatttgttttatgatttgtttttattaataaaatgtggtagaagtaatgtgtagtgggagtttaggttttacgaagtttgaagtttttatttttatttttttgaaattttgttgtttttttataaaggaagtttaggttagataattaaatgaagaggggttttgtgtgtgggtattaaataagaaagtgaggatagagaaaaaaatttaaggttagtttatttgttggtattagaaaaaatgtaaaatattgattggtaaatagatgtaggaagatcgatcgattgtgtggtgaggttaaagggaagaatttttcgaatagttattttatatttaataataagtgagagttggtaggtaagtagagattgtgtaggagttttgagaaggaaggtgtgaatagttttttaagtgagtgggtgagtgatttgattatggaaatataggagagttgtttagtagtattaaaggtcggtttaatgtttatgattattaaaatgagtaatgttagtattttcgtttgtttttttttagttaaatttatttgtttaagagtagttttagagtaggtggagagttggggttttttttggtttggagaaaggagggagagggagttaaggtcgttgagagtatacgtattaaaatgatgggatatgaatttatgttgggaaaagaaggacgtgtaagagtagagggatagggaaaggtgaggaatttggtgaaggttaagtaattattagtattaggaggtatgagttggaatggaaaggggaagtaaagtgagttgtttgaaattgatattacggagggtatatagttatgagtaaggttaagggtgtgattttaggaatgtgtggttgcgttagtgtgggaaagattataggaggttggaagttgagaggttgtatagttattgtaggaattatttatgtggatattgaaattattatgaattatgaatgaagttaattgtattattggttattatttttattagattattgtacgcgattttagattttttaattttttatttagagtatttattacggtttgaaatattagagcgattatttgcgttgggcgcggattatttgatagtaattagggtttataagtttgtttcgttttttgattgatatacgattaatatttaaaaggtagaatggatagaagaatattattttatttgttatatagagaaattttagatgtaataaattataaagttaattaattttataaataggatttatagtagttttatattaatgaaaaagtaagattttaagagggcgggagtttttgtttgttgattttttcgtatttaaaatagtgtttgatatatattaggtgttttgtaaatattgaatgaaagaatacgttttattagtattttatcgcgtttgcgttagatgttttaggtggggttagttttgacgcgttgcgtttgcgtaatgtttttttgcggggcgtatcggtaggtttttagtttcgtttcgtcgtagcggtttgggtttttcggtttttcgtagtcgttcgattgtcgcgttgtattagtttttttttcggcgtttttacgtttatttgggcggatttttggcgtcggaggaagaggtagggttattttttttttacgttagagatttgattgtggagatggcggtttagaagataaacgaggggttggaatatttcgttaaagtagagaaatagtgagtgagaatttttcgggggtttgtgtgtggacgtcgggttcgttttttattggcgcggttttagtattcggggggggcgggagggagggtttagggttgagggggttcggcgcgttggtgttcgcggggttgtcggggttcggtgttttttgggttatattttcggggtcggggttagttttgcggcgtttcgggaagcgtcgtgggtttatttcgtcggaagttcgttttttagagtcggtgtgggcggggattcggcgtagtgttgcggggcgagggtttttttatttgggcgttttgtttttgaagattgtggtgggggttgtttgtgtatcggaggttcgttagtagtatttttggtttttatttgttgggtgtcggtcgtattttttttttatttgtggtaatttaaaatgttatttggggaataatatcgttttgttgagaattatcgttttagaagagttttttgtgtggaggggattataggtttattttaaaaatttttcggtgaatttttgttatttggtattttattgtttttgtgggtagggattgtgtttcgttcgttttttgatgtgtatgttttgttatttttggtatagtacgtagtaggtattttgtaaatgtttgtgggattgaattgataatttttaatttatttttttggtagtttttttttttcgttttattattttagtgtattttttatttggtagttatagttaatagaaagttagtattgtgggtcgggcgcggtggtttacgtttgtaattttagtattttgggaggtcgaggcgggcggattataaggttagaagatttagattattttggttaatacggtgaaaatcgtttttattaaaaatataaaaaattagtcgggcgtggtggcgggcgtttgtagttttagttattcgggagtttgaggtaggagaatggtttgaattcggaaggtagagtttgtagtgagtcgagatcgcgttattgtattttagtttgggttatagagcgagatttcgttttaaaaaaaaaaaaaaaaaaagaaaagaaaaagttagtattgtgttttgtggtgggtgttttatatatataattttataagttgagatttttataataattttttaaatagagattttaatttttcgtaagaggaaatgagatttagggaagttttataacgatttgttttcgattgtataggtgaaagatcgtagagttagtttttaaatagtggaaaaatttaagttttattatatgattcgaggtagttagcgtgtaaggtgttggggtttttttggtgtaggaggtttttataatattttgttttttagtgggagtaaacgtaaaatttgtaataagaatagtgtgtggaatagggattataaaaaagttgtattaattgtgtataggtaatttagagggagaagtttattttgtttgagaaaatttgaggaggagatgatttgtgagtagggtttgaaaaatacggaatgttttagacggagggaaaattttgtgaaagagattttgtgcgtaatttgtagtatgtattatacgcgggtttgaaaatgtgttttgggaatagtgaatgtagtgtagttatagtgttaggggacgagttggagtgaaaaagagttggggttagattgtgaagggatagttttttatatggttattgtaggtatttaattagtggattcggttagatttgtttttggtgaaagaaatgtggtagtaggttgggttttgtcgtttatgtttgtaattttagtattttgggaggttgaggcgggtggattatttgaggttaggagttcgagattagtttggttaatatggtgaaattttgtttttattaaaaatataaaaattagttggttgtggtggcgcgtatttgtaattttaattgtttaggaggttgaggtaggagaattttttgagttttagaggcggaggttgtagtgagcggagatcgcgttattgtattttagtttgggagatagagtaagattttgtattaaaaaaataaataaataaaaaggaaaagaaaaagaaatgtggtagtagtgtggagaatggattttgatatatttagtaaacgaatatttataaagttgtttttgtgtatttgtattagttatagaggatattggagtaattaaaagtggttttttttttaagagtttagaatttataggtgggtagataagttaatagaggattaaaaataggatgtttagtgttagaatataagtatttagtgtggtatggtagagataggaagtaaggaaaaggtaatatgtttaggatgtggggaatggaagaggaggaaaggtgatttttttatgaaggtattgttagatatgttagtgggttgtcgattttaggggagaggtggtgatggtttgaatttaaataatagtataggggtaggattgggtgatgtttgttagtaaggttgatatgttttaatgaggtgtttgtatgtagagatgaagagttaatttttaggtttttaatttgggagacgagtgggagaggtttttagttaagataggggatatagattaatggatgtgattggtgggtaggtttggggtagggaggtggggcggggaggtgtggagtttaggtttgaagtgttagtttgaaatgttgttagatagagttatttagtgggtggtaggaaaaatgggttaggagtttaggagatatttgatttttttttattttttaatgatgacgtagtttaatattgttgagtaattttgtaaattgatttttatatagatggtaattttgttgttttttttttttttgtggaaattggttagtttttttattgattttttggagaaaaaggttaaaaggattaataggtatggttgttaaatttaaattagttgtatattttttttttttattagtggtgtttatgtgatttgggatggtttgtttagttttaaattttttgggttttttcgtgtatagtatattaggtgacggagtgattgtattttgtttttagtgggattaaaaaaattatgttaatatatagaatgtaatgtttgttatgggataggaatagagggttagtattttgtatattgtatatttttttaattttgtagatttgagtagatatattataatttaaggatattatttttttgaatagtgaaatttttggtaagtttgaaaaattgtttattttaatttgaattttgtaatattatatatataaataagttttagatgttaaatatgttgaataaatttaattggtaaaaaatgttattgtagttggttgggtatagtggtttatgtcggtaattttagttttttgggaggttaaggtgggcggattatttgaggttaggagttcgagattatttggttaatatggcgaaattttttttttattaaaaatataaaaattagttgagtgtggtggtataagtttgtaatttcggttattgaggaggttgaggtacgagagttatttgaatttgggaggcggaagttgtagtgagtcgagataatattattgtattttagtttgggtgatagagcgagattttattttaagaaaaaaaaagaagttatgattttgtggtagtttttatggttgttatataatgaaggttgtatttttgagggtttatatagatgttttattttttagttaagatatttttttgagttatttgaagtaagtagtgttttgtgtaagtaggtttttattaattgaatgatatttagaatttacgatggtttgggtaatttttatgtatatttaaatttgatagttattgaattagtttaaattaagtttgaaattattttaaaataagaaaataaatattgaggaaaaggtaagtaagttaaggatttaaaattgattgttttttggtttggtatttaagaagttagtagtgattttagaaagtagttttttttggtttttgtaatatttttttttttttgattattttttttgtttatgggtggcgagtttttattttttttttttttttttttttttttttgtttattttttttgttgttttattgaatgattgtattttttagtttttttgttttttttttgtagttttattaggggatttgattttatttatgtttttgatatatgtttatgatgtttttatttatgtttttagatttttgtttgtgcgttagttttatgaatttttttgttgtcgatattgtgttttagaggttttaaagttttaatgtatttttgagttcgttaaattttagaggtgttgtaggtttgggatggggttaataatttacgattttagtaagtttttagttagtgttgatggtgttggtttagggattatgaattgagaatttttaggaggaaaattacgtatttgtgatagtgggagtgaaagaggtgaggttgtgtttgttaggtttaagtttggatggaggcgggtgatatagagtttgtgtttgatggttttttttttttttttttttttttaaagatttagaaggttattataagtagagatttgatttataaatgtggttggtaatttttgttaattgtgttttttttattttagt

SEQ ID NO: 1296 - DNA, 9741 bp, Artificial Sequence
  chemically treated genomic DNA (Homo sapiens)
gttagaatgaaaaaaatatagttaataggagttattaattatatttataagttagatttttgtttgtaatgattttttaggtttttaaaaaaaaaaaaaaaaaggagaaattattaggtataaattttgtgttattcgtttttatttaaatttaggtttaataaatataattttattttttttatttttattgttataggtacgtggttttttttttagaggtttttaatttatggtttttggattagtattattagtattaattgggaatttattaaaatcgtaaattgttgattttattttaagtttatagtatttttgaggtttaacgagtttaaaggtgtattaaagttttagaatttttgaagtatagtatcgatagtagagggatttatgaaattgacgtatagataagagtttagagatataaatggaggtattataagtatatgttaagagtatagatgagattagattttttagtgagattgtagagagagaatagaaagattaaggaatataattatttagtgaaataatagaggaagtaggtaaaaaaaaaaaaaaaaaaaaaaaaaaagtgaaaattcgttatttataaataagaaggataattagaaagggaaggatattataaaagttaagagaaattgttttttaggattattattggttttttggatgttaaattaaaggataattaattttgaatttttaatttatttgttttttttttaatatttatttttttattttaaaataattttagatttagtttaaattaatttagtaattgttaaatttgggtgtgtatagaaattgtttaaattatcgtaaattttaaatgttatttaattagtgaaggtttgtttgtatagaatattgtttgttttaaatgatttaggggagtattttaattgaaagatgaggtatttgtatgagtttttagaagtatagtttttattatgtgatagttatgggaattgttataaagttatagttttttttttttttttgagatagggtttcgttttgttatttaggttggagtgtagtggtattatttcggtttattgtaattttcgttttttaggtttaagtgattttcgtgttttagtttttttagtagtcgggattataggtttgtgttattatatttagttaatttttgtatttttagtagagaagaggtttcgttatgttggttaggtggtttcgaatttttggttttaagtgattcgtttattttggttttttaaagagttagaattatcggtatgagttattgtatttagttagttatagtaatattttttgttaattaaatttatttaatatatttagtatttaaaatttgtttgtgtatatagtgttataagatttaaattaaaataagtaattttttaagtttattaagaattttattgtttagaaaaataatatttttaaattgtggtgtgtttatttaaatttataaaattgaggaaatatgtaatatgtaaaatgttaattttttgtttttattttataataaatattatattttgtatattaatataatttttttaattttattaaaaataagatataattatttcgttatttaatgtgttatatacggaaagatttagagagtttaaaattgggtaaattattttaagttatatgaatattattaataaggaagaaagatatatagttaatttgggtttagtagttatatttgttagtttttttgatttttttttttaaagaattaataaggaaattgattaatttttatagaaaaaaagaaaatagtaaaattattatttgtgtggggattaatttataaaattatttagtaatattgaattacgttattattagaaaatggagaaaaattaaatattttttaagtttttggtttattttttttattatttattgagtaattttgtttagtagtattttaaattaatattttaagtttgaattttatattttttcgttttatttttttgttttagatttatttattaattatatttattaatttatattttttattttggttgaaggttttttttattcgttttttaagttagaaatttaggagttaattttttatttttatatgtaggtattttattaaagtatgttaattttattgataaatattatttagttttatttttgtattgttatttgaatttaggttattattattttttttttgaagtcgataatttattaatatgtttggtagtatttttatgggagagttattttttttttttttttattttttatattttgagtatattattttttttttgttttttatttttattatattatattgaatatttgtattttagtattgaatattttatttttagttttttgttaatttgtttgtttatttgtgaattttaagtttttgaagaagggattatttttggttattttagtattttttgtggttggtataggtatatagagataattttgtaaatgttcgtttattgaatatgttaaagtttattttttatattgttgttatatttttttttttttttttttttatttatttatttttttgatatagagttttgttttgttttttaggttggaatgtagtggcgcgattttcgtttattgtaattttcgtttttagggtttaagggatttttttgttttagttttttgagtaattgggattataggtgcgcgttattatagttagttaatttttgtatttttagtagagatagggttttattatgttggttaggttggtttcgaatttttgattttaagtgatttattcgttttagttttttaaagtgttgggattataggtatgagcgatagggtttagtttgttgttatattttttttattaaaagtaaatttaatcgagtttattggttggatgtttataatagttatgtgagaagttgtttttttatagtttggttttaatttttttttattttagttcgttttttggtattgtgattatattatatttattgtttttagagtatatttttaggttcgcgtataatatatattataggttgcgtatagaattttttttataagatttttttttcgtttaaaatatttcgtattttttaagttttgtttataaattattttttttttaaatttttttaggtagaataaatttttttttttgggttatttatgtatagttaatatagtttttttgtggtttttattttatatattatttttattataaattttgcgtttgtttttattagaaagtagaatgttgtgggaattttttgtattaggagagttttagtattttatacgttgattgtttcgagttatgtgatagagtttgagtttttttattgtttgaaaattggttttgcgattttttatttgtgtagtcgggggtaagtcgttatgaggtttttttgagttttatttttttttacgaaaaattagaatttttatttggaaagttattgtgaagattttagtttatgaaattatgtatgtgaagtatttattatagagtataatgttgatttttttttttttttttttttttttttttttgagacggagtttcgttttgtggtttaggttggagtgtagtggcgcgatttcggtttattgtaagttttgtttttcgggtttaggttatttttttgttttaggttttcgagtagttgggattataggcgttcgttattacgttcggttaattttttgtatttttagtagagacggtttttatcgtgttagttaggatggtttggattttttgattttgtgattcgttcgtttcggttttttaaagtgttgggattgtagacgtgagttatcgcgttcggtttataatgttgattttttattaattgtaattgttagataaaaaatgtattggagtaatgaaacggggggaagaggttgttaaaaggatgaattaaggattattagtttagttttataaatatttgtagggtgtttattacgtattgtattagaggtggtaggatatatatattaaaggacgaacgaagtatagtttttgtttatagggatagtaaaatgttagatgataaaggtttatcgaggagtttttggggtaaatttatggttttttttatatagggggtttttttagggcggtggtttttaatagagcgatgttgttttttagatgatattttgggttgttataaatggggaagagatgcgatcggtatttagtaggtagaggttaaggatgttgttaacgagttttcgatgtatagatagtttttattataatttttaggagtagagcgtttaagtagagaagttttcgtttcgtagtattgcgtcgggttttcgtttatatcggttttggggagcggattttcggcggggtggatttacggcgtttttcgaggcgtcgtagagttgatttcgatttcgggagtgtgatttagaggatatcgagtttcggtagtttcgcgggtattagcgcgtcgagtttttttagttttgagttttttttttcgtttttttcgggtgttaaggtcgcgttagtgagagacggattcggcgtttatatataggttttcggaaggtttttatttattatttttttgttttggcgaggtgttttagtttttcgtttattttttgagtcgttatttttatagttaggtttttgacgtggagagagggtgattttgttttttttttcggcgttaagaattcgtttaaataggcgtgggaacgtcgaggaggaagttggtgtagcgcgatagtcgagcggttacggagggtcggagggtttaagtcgttgcgacgaagcggggttgggagtttgtcggtgcgtttcgtaaagagatattgcgtaggcgtagcgcgttaaggttggttttatttagggtatttagcgtaggcgcggtgagatattgatggggcgtatttttttatttaatatttgtaaagtatttaatatgtgttaggtattattttagatgcgggaagattagtagataaaaattttcgtttttttgaagttttgtttttttattaatgtgaaattgttgtggattttgtttgtagggttaattggttttataatttattatatttgaagtttttttgtatgatagatagaatagtatttttttatttattttgttttttgggtattaatcgtatgttagttaagaaacgaaatagatttgtaaattttgattattgttaaataattcgcgtttaacgtaaataatcgttttaatattttaagtcgtgataagtgttttaaatgggaagttgagggatttaaagtcgcgtatagtggtttggtaaaaatagtaattagtaatatagttggttttatttataatttatggtgattttaatatttatatggatgatttttgtaatgattatatagttttttagtttttaattttttgtgattttttttatattagcgtagttatatatttttgggattatatttttgattttatttataattgtgtatttttcgtagtgttagttttaaatagtttattttattttttttttttattttagtttatattttttagtgttagtaattatttaatttttattagattttttatttttttttatttttttgtttttatacgtttttttttttttagtataaatttatgttttattattttagtgcgtatatttttaacggttttggtttttttttttttttttttttaagttaggaaaaattttagttttttatttattttggaattgtttttgagtaagtgaatttgattggaaaaaaataaacgaggatgttaatattatttattttaatgattataaatattaagtcgatttttggtgttgttgagtaatttttttatgtttttatggttaaattatttatttatttatttggagggttgtttatatttttttttttaaaatttttatataatttttgtttgtttgttaatttttatttattgttgaatatgaaataattattcgaagagtttttttttttggttttattatataatcgatcgatttttttgtatttatttgttaattaatattttgtattttttttagtgttaataggtgaattggttttggatttttttttttatttttatttttttatttagtatttatatataagatttttttttatttggttgtttagtttgggttttttttataggaaggtagtagaattttaagagagtgaaagtggaaattttaggtttcgtaaggtttggatttttattgtatattatttttgttatattttattgatgaaaataagttataaggtaagtttagatttaagaggtaggaaaatagaggagtgtaaaatagtttggttatgatttttaatttattataattttgggatgattgattaaatataaaaggattgttattagtggaaagttttatgtttttaagtgagtttagatttattaattatttaatattattattttttaaaattattgaaagtgtttagaaagttttttaagtttataattttttttatatttttttttatttatttatttattattgaattattgtttattgaatgtttattttgtataagatattaagtttatatatttaggatttaattgttgagtaagagatataatgtttgtttttattgtatttatgatttatgagaggatataatatttaatttaattttattttggtattaataaagaaagaatgggaaaaaaattttacgatagtgatatagtagttattaagaaatattttttaggtagatagtaagggtaaatgtttttagtggaaatttttttgttttaagaaataatttttgaattattttttttttaatagaaaaggtagtttgaagagttaggttcgtaagttttgatatgtaaatgttagtttttagaaattgagtttatttaatatggcgatttcgttattttttttttgttattaggtgtattaagtgttacggttatttttagataatattatgtgtttagaatattacggtgatttgtatttgtatattaaagggttaaggtgggagggttaggtttttcgagagttatgtaaatgatatatttggttaaattaattttttgggttttatgtaaattagatatcgttttttttaggattttaatataagtaattatttttttattgtatattgggttttttttttgtttaaattttttttatttttgtttttgtatgggggaggtgtttttttttttttttttttttttttgtttattaaattttttataatttaaaattattttacgtgttcgtgttgttaattttattagtacgagattaataattttggtgtttttttattcgttcgagttatattaatagttatgggtatttaagggttttatgttttaaaggatttttgattagggaagtcgtggtaagtatgtgttaatatgtatttatagtaaaggggagaagaagagagagaatgggtatagtaaaggtgtaatataaatgtttttattttttttttttttttttttttttttgtaataatattgaggtgggagttgagtaaggggaatttaaattgagaagttagtttggaagagttgagaatggaaagtatggattaaatgatgatagattaagacgtgtagttttttaagttagaatcgatagtgtgattttaggttttgttgatttataaacgtaatttttgttattatagtagttattattagaattttagtaaaagttgtttttgtgattttaatttattttttgtttttttttttaaggttttttagacgtttatgtttttttttatttatttcgttaatatatagatttgttggttgttggtttaagtgattttatttgagttaatttttttttttagttttagaaattttttttttttattttgttttaataaaaatgtgtatttttgagtgatttatttgttttggatgtgattaaaatgatttatattaaagtgtgaatgaggtttaaaatagagtttgtaaattttatttttttttttatggtgggtttaagtttttgagagttttttaagtttgtatttttaggttttttgtttatataaatttgttttttttttttagtttagtttgttgttaggaagtaaaatttttggatttattttttatagttgaatgttttagttaaataaaaggtttttgttattttttggagagagggtttgatgggttaaatgagttttattttaaattaggaattataaataaggaaatataagagtttttatatcgttaagttttttttgtttgtttaattgttagtagtttgattgtgtaattttattttttttttttataaatatattgttatgttatataagagatatatttttgagatttagtttaagaggttagttatgaattataaaattatttttttgggaaaatatattttgagttataaataacgaatttataaaaaatttttggaataaattttgttattatttgatagttttttttattagaataggattttagaagattgtttttggttttttttttgataaaattaatagaagttattatgatttgtatttttttttttggttaagtgttaatgaatatattgatttttaaaaattattattgaatttttatgagattaatatggagaattcgttttttagatttttgtgtttaatgtttttttagtagttttatttagatatttaaaatgttatatataatttgtttaaatttgagtttttgatgtttttatatttgttttttttttaggtttagttatgttgggtttatggtagttttattttttttttgtttaaatatttggagttatgtttttttgttttttttgtcgtataatatatgtaatttgtaggaaattttgtcgattttgtttttaaaaagtgtttagaggtaattacgtttttttatttttttgtttatagttatcgcgtagtttgttagttgttatcgtttgtgattgtatttattatttgtgtttagaatatagtgtagtgcgaattttagagtagaatttagttaattttggttgaaagttttgtgttattacggaagaagaggaagaagtatttggatatttggaaggtgtttttttttaagtttggttatggtttttttttaaggtaatttttttttttttttttttttttttttttttaaattattttttttttttttttagagatagggttttattttgttatttaggttggagtgtagtggtataattatggtttattgtagttttaaatttttagttttaagtaatttttttgttttaattttttaagtaattgggattgtgggtatgtgttattatatttggttattttttattattatttttagtagcgataaggttttattatgttgtttaggttgattttaaatttttgggtttaagtaatttttttgttttagttttttagagtgttgggattattagtgtatttttttgtatttagttttttttagtgatttttttggtttgtatttgtttttttttgttgggttttttttatattttttttaattttttttgttttaattttttatagaattattattattaatttttttatttttaattgaattttaaaattaaagtaagagaatgaatgtttgaaaaggagaaagagaacggggttatatttataggtgttagttattgaagatt

SEQ ID NO: 1297 - DNA, 5690 bp, Artificial Sequence
  chemically treated genomic DNA (Homo sapiens)
aattttattgttttgttatttattgaggtttttttttagtattttgttttttttattcgatatttttttttttttttattttttatattttgtgttgtaagtatattatttgttttttaggtagaagcgagtatttatttttatttttttttttattttgaaattatttatgatatgatattttagaaattcgatttttttgttagtgggagtatattttttatatttattaaaaattttaagaattttatatttggtatgtaatacgatattttttagttttttgtaaaagatgtttagagaaatatgtatgttggtattttataagttaatacggatattttttatattaatagttagtgtttgtttttttttggtaaatggtatgggagttgttgtgtagatatttattagtaaaattgtagaggtttttaattttttatatttggtagaataagtttatgagttatttaatttaaagtatttaattattagtgttttgaaatttagagggaaaaagatatggaaaaagataataatttttggaggttttttttgtgtgtgtgtgtatatttatgatgtattagtgttttatgttttttttttgattgaaataaaataataaaagttgattatttataatgaaagttattttataataattttaaatgttttttattatattttataattttttttatataaatgttagtttttttttttttaaaatattttttaaatttatagtgaaagatattaattttgagagtttattttatgatagatagtgtgttaagtgttttagttttgtatattttaggatataggatgagtttataaattgaagtaaaaatttaaaaagggattttatatgggtgatgtaatatttaggattaatttttatgatatttagttttatttaaatttaaattggttaaaaaatagatgttgtttgacgttttatataaaattgagaagtattaaatatttggaaaatagagttattttagaatttatagattaattttttttgttattgaaagtttcgttgaataaatattttataagaattttaaatattgattaatgaaaaggaagagttttgttttataaaattaatgaatataaattataatatagaaatatttattttaatgaatttgaataagtatatgaaataattttttttttttaaagtgatatatgttgtttaggtgatttatggattttttgaaatttttattatttaattagttatttttagatattatggtttttgtaatggataattatgttaaagtattttttaattattatttagagatatgaatgatttagttattattgttgattaaagagttaaaggaaatataaaattattgtaaattttttaaaattatttttgaaaaataggttttggaaataacgaagttttttttaattttatcgttaaatttgataatgatattttgtttattattattttagttttttaattatgtttttttaatattatgagttttgagttattaatttagattttaagaatttaaaaaatgtgtggaataaaataagaggtttatttttcgttttagaggaaaagttaatttttgatgaaaattaatttttattttattttttaaaatttgagtatggataaagggtaacgttagtaagaaatttatatagaaaagaaaagtagtttgattacgatgatattttttatagtatgttagtattttttttttttggaggatatttgttttttttttttttttattaggtaatatttgtaaaggttaggatgtgagatgtgtgtgagataatgtatgtgtaaatagatttgttttatattttatggatgaaatattttttttaatttaaaaagtaaaaaggtggtattttttaatagtttaattttttaaaattagtaaatttttgtttttttgaggttttttttttgttttgttttgttttataatagtagtttttatatataaggtttgtttttgagttgatttagaataattaattatagtagtttattaatttataagtgatttataagttattagtttaagtaaagataatttgtatttaaaagagttggtaatgtttatattaaagttaagattattataattaaagaaatttgttttttgtttgtatggtttaataaaataagattattggtttatttttgggaagtttggtatatttgattatattataatatttattgagtattttttttgtttttaggattaaaaaattaataagatagtttttgatttttaagagtttagattaatgaagagtaagattaatcgtttttcgttatatatttatatttaaattagtttttttatgttattatagaggttataataaaatttaaaagttattgttttaaagttttaagtatgaagaattttaatttttatttaatatttattgattttttgatttttaattttagatgaatatattagtatattgttttttttgttggttgatatttttttaagtgtttttagtattttattttgaagtataacgttaataatgtataattttttatgtttagttatagaatgtttacgtgtgatttggttataatatattgttttatttaggtttttaataaaattgattttttttaaatggatttgtagttgttgaattttaaattaatattttattttaaaaatagaaaaggaggggaagggtggagggaggggaatagagagggtataagaggtaaaaaaagaaaaagaggaaaataaatgtttgtaaataagttaaattaaataaaagagatataaagtaattttttaaaagaaggaatgatattttaagtaagaattaaatatttaggtatgtataaatcgttttcgtttttttagatcggttttttttttttttttatatatttagtataaattttaggtgagggggtagagaggggttggtattgtttgattaaatatattttgttttttttttgagtggtagaattttagagtttgattaaatgttacgaaagggtgttggtggaagttaggatgagaagaaatgtaatttaatagatttggagaaatgatgttgtagatattaagaatagagaaagttggaaattggtaatatggggaggatagttgggttagaaaggaaaaataggagaatatagaagaaatgttatgagaagggaaaataagagatgttttatttattattatttatttcggggtaggtttttttgtataaggttatttttaggttatattatatataaaagagttatatttgaggtttgtatagtattgttataattatagttttaaaaggttaaggttttatgatggtaggtttaaaaaattttttttaaaatatttaataaaataaggggtatttatttttttttggtttatattatttgaaagttaaaagatagttttcggttttatttaggtttttttttattttattttttgttgttttttattttttggtaaatttggtgaattttttgttagtgttgttttttagtaggtttttattaatagttttgaatgaatattttattagtttttatttattaatagttttgaatgaatattttattagtttttattttgtagtagaatgtatacgtttaggttttagtaaaagttttttagtaaagttttagatttatttagattatatgttatttatgggttaagtattggttttagagtatatgtgtttaaattggttttatttagtttatgtgattatttataaggcgtaatatgggtagtttgttttttatatagtatttagaaatattattttgattgtggtaaatattgtttaattataattttttttttaggttttttttatttatattttttattttatttatagtaaaaattaaaatgttagttttagttttaaggttgtagttgtttgttagattttattttaatttatttttttttttatttatgtgttttaattatttttgttttttgaatgttttttgaacgtttaaggtagtttttagtttaaggttttgttattttttgtttttttatttggaataattttttttacgtatatttttatgttttattttttggtattttttaaattttagcgagtgttttttttttggtgtgttttttttttttttaaattaattaatttaaaattggagttttttttttgtatttattgggttttttttttattttagtttttttagggtatttattataatttaatagattgtatgttttatttatgtatttaattttttatatatgttattttaatttttattaaaatataagatttttgagagtaagtaagtattagaatagtaggaaatatattatagttatttagtgaattattttttgagttaattaattaatggatgagtgaattaatatagttttttgagcgggaaattttgtataaggtttagttaaaagggaaattgagtgggttaggtattacggatattatatattttattgtatgatttttttgtttatattagaagacgtttataagtttattttaaaggatattagttggaattttttttttattaattattaagagaattatgaataagttgtttattatttgatttattatttaattttgatttttagttttttatatttgaaagaagatataatatattttttataggattttgggattattaattgaatttatgtgtgtaaaaggaatttatataatgaaagtattagaaataattattatatttataattattgtatttttatatgtttaaaatatagttataattagtttatttaaatttaagtgtaaaagtaaaatgatttgttttcgttttgttttttttgtttaggggattatggatattgaagtatattttgaaagaattggttataagaagtttaggaataaattggatttggaaatattaattgatattttttaatattagattcgagttgttttttttgagaattttaatatttattgtggggatgttatggatttaggtttagaggttatttttgattaagttgtgagaagaaatcggggtggatggtgtttttaggttaattattttttgtattgggttttgattattattggttttgagattacgatgttgggagggtatgtttatagtattttagttaaaaaatatagtattggtatgatttatttttttttgtaggtgattattgatggtaggaattatattgtcgatgttgggtttggacgtttatattagatgtggtagtttttggagttaatttttgggaaggattagttttaggtgttttgtgtttttcgtttgacggaagagaatggattttggtatttagattaaattagaagggaatagtatattttaaatgaagaatttttttattttgattttttagaagatagtaaatatcgaaaaatttatttttttatttttaagtttcgaataattgaagattttgagtttatgaatatatatttgtagatatttttattatttgtgtttattagtaaattattttgttttttgtagattttagatggggtttattgtttggtgggttttatttttatttataggagatttaattataaggataatatagatttaatagagtttaagattttgagtgaggattttgagt

SEQ ID NO: 1298 - DNA, 5690 bp, Artificial Sequence
  chemically treated genomic DNA (Homo sapiens)
atttagagtttttatttagagttttgaattttattagatttgtattgtttttataattgaattttttatgggtgagggtgaagtttattaaatagtgaattttatttggggtttgtaaggaataaaatgatttattagtaaatatagatgatggagatgtttgtaggtatgtatttatagatttaaaatttttaattgttcgaggtttaagagtaaaggagtagatttttcggtatttgttgttttttaggagattagaatgaagaaattttttatttggaatgtattgtttttttttgatttggtttagatattagaatttattttttttcgttaaacggaagatataaggtatttgaggttgattttttttagaaattaattttagaggttgttatatttggtatgagcgtttaaatttagtatcgataatgtagtttttgttattaatggttatttgtaggagaaggtgaattatgttagtgttgtattttttggttggagtgttgtaaatatatttttttaatatcgtggttttaaaattaatagtggttagagtttagtatagaagatgattgatttggagatattatttatttcgatttttttttataatttgattaaaaatggtttttaagtttaagtttatggtatttttataatggatgttaaggtttttaaagggaatagttcggatttggtgttgaagaatgttagttaatgtttttaagtttaatttgtttttagattttttatagttaatttttttaagatatgttttaatgtttatgattttttaagtaaggaaaataaaacgaaagtaaattattttatttttatatttggatttgagtaggttaattatggttatattttaaatatgtaaaaatataatggttataagtataataattatttttagtgtttttattgtatgaattttttttatatatataagtttagttaatagttttagaattttgtgagaaatgtattatgtttttttttaagtgtgagaagttggaaattaagattaaatgatgagttaaatgataaatagtttgtttatggtttttttggtgattaataaaagagagattttaattggtattttttaaaataggtttataaacgttttttgatgtaggtaggagaattatgtaatagagtgtatagtattcgtggtatttgatttatttaattttttttttagttgagttttatataaagtttttcgtttaaagaattgtattgatttatttatttattgattgattaatttaagaaatagtttattgaatagttataatgtgttttttattgttttagtgtttgtttatttttaaaaattttatattttagtgggagttggagtgatatatataggaaattgaatatatggataaaatatgtaatttgttagattgtagtaagtgttttgggaaaattaaagtaaagaaaggatttagtaagtatagagggagagttttaattttaaattagttggtttaaaaaaaaaaaaaatatattaaaaaaaaaatattcgttaagatttgaaggatgttagagaataaggtataaggatatgcgtgaggaggattgttttaagtaggaaaatagaaaataataaggttttaagttggaaattgttttgagcgtttaaaaaatatttaggaagtaagggtaattggagtatatgagtaagaaggagagtggattgagatgagatttgataggtaattgtagttttggagttaagattggtattttggtttttattgtaagtgaaatgagaaatgtaaatgagagaggtttgagagaagggttgtaattgagtaatgtttgttataattaaagtgatgtttttggatattgtgtagagaataggttgtttatattgcgttttatggatagttatatggattaggtgggattaatttgaatatatatgttttaggattagtgtttggtttatggataatatatgatttaagtagatttgagattttattgaggaatttttgttgaaatttaagcgtgtatattttgttataaggtagaagttggtggggtatttatttaaagttattggtgagtagaagttggtggggtatttatttaaagttattggtgagaatttattgaagaataatattaataaagagtttattaagtttattaagagatgaaaaataatagaaggtagaatgaggaaagatttgaatgaagtcgaaagttattttttaatttttaggtaatgtgaattaaaaaaaaataaatgttttttattttgttaaatattttagaaaaggttttttaaatttgttattatagagttttaattttttgagattatgattgtaatagtgttgtatagattttaggtataatttttttgtatgtggtatggtttgaggatgattttgtataaagggatttgtttcgagatgaatggtgataagtggagtattttttattttttttttttataatattttttttatatttttttattttttttttttgatttagttattttttttatattgttagtttttaattttttttgtttttggtgtttataatattatttttttaaatttattagattgtatttttttttattttaatttttattagtattttttcgtaatatttggttaagttttaaagttttattatttagagagagaataagatgtatttagttagataatgttaatttttttttgtttttttatttagaatttgtattgagtatgtaaagaagagagagaagtcgatttaaaaggacgaaggcggtttatatatatttggatatttgatttttgtttagaatattatttttttttttaagaaattattttatattttttttatttggtttaatttgtttataagtatttgtttttttttttttttttttttgttttttgtattttttttgtttttttttttttattttttttttttttttttgtttttaagataaagtgttgatttggaatttagtaattgtaagtttatttgaaagaagttagttttgttagaggtttggatagagtaatatgttgtaattaaattatacgtgaatattttgtggttgaatataagaaattgtgtattattaacgttgtgttttaaggtggaatgttgaaagtatttggaaagatgttaattaataggaaagataatatattaatgtgtttatttagagttgaaaattagaaaattagtgaatattaagtagaggttaggattttttatatttgaaattttaaagtaatgatttttaagttttattgtgatttttgtgatagtatggaaaagttgatttgggtgtgagtgtgtggcggggggcggttaattttgttttttattaatttgaatttttagaggttagaaattgttttgttaattttttaattttgaaagtaaaaaaggtgtttaataaatgttataatataattaaatatattaagttttttaagagtaggttagtaattttgttttattgaattatataggtaggaggtaagtttttttagttgtaataattttagttttaatgtggatattgttagtttttttagatataaattatttttgtttagattgataatttatggattatttgtgaattaatgagttgttataattaattattttaaattagtttaagggtagattttgtatatggggattgttattgtaaaataaaataaaataaaaaaaaaattttaaggagatagaagtttgttggttttggaggattaagttattaaaaaatgttatttttttattttttaaattgagaaagatgttttatttataggatgtaaggtaagtttatttatatatatattattttatatatattttatattttggtttttataagtgttgtttagtaaagaggaggggaaggtaggtgttttttagggagaaaaagtgttgatatattgtaagaggtattatcgtagttaggttattttttttttttgtgtgagttttttgttgacgttattttttgtttatgtttagattttaggaaatagagtaaaaattggtttttattaaggattaattttttttttaaagcgaaaaataaattttttgttttattttatatattttttaaatttttggagtttggattagtagtttagagtttatagtgttgagggaatataattgagagattaaaatggtgatgagtaaaatgttattgttaggtttgacgatagagttgaagaagatttcgttgtttttaaaatttattttttaaaaataattttaaaaagtttataataattttgtattttttttggttttttaattagtaataatgattaaattatttatgtttttgaatagtaattagaaaatattttgatatagttatttattatagaaattatagtgtttgagaatgattgattaaatagtagaaattttaagaaatttatgggttatttagatagtatatattattttaaagggaaaaagttattttatgtatttatttaaatttattaaaataggtgtttttgtgttgtggtttgtatttattggttttataaaataaagttttttttttttattgattaatatttgagatttttatgggatgtttgtttagcgaggtttttagtaataaagagaattaatttgtggattttaaaatagttttgttttttaaatatttggtgttttttagttttatgtaaaacgttaaatagtatttattttttggttagtttgagtttggatagaattaaatattatagaagttagttttaagtattatattatttatataggatttttttttgaatttttgttttagtttatgggtttattttgtgttttaaaatatataaagttaaagtatttagtatattgtttgttataaagtaggtttttaaaattaatgttttttattgtaaatttaaaagatgttttaaggggaaagaaattaatatttatatggggaaaattatgaggtataataggagatatttggggttattgtaaagtgatttttattataagtaattaatttttattattttattttagttaggaggaggatatagaatattgatgtattataaatgtatatatatatatagagagaatttttagaaattattgtttttttttatatttttttttttttaaattttagagtattgatagttaaatgttttagattaagtgatttataagtttattttgttagatatggagggttgagagtttttatagttttgttaatgagtgtttgtatagtagtttttatgttatttgttaagaagaaatagatattggttattaatgtaaaaggtattcgtattggtttatgaaatattagtatgtatatttttttaaatattttttataaaagattaagaaatatcgtgttatatgttaaatgtagggtttttaaagtttttagtagatgtgagaaatgtgtttttattgatagaggggtcgggtttttaaagtgttatattataggtaattttagggtgagaaaaggagtggaaatgagtgttcgtttttgtttgggaggtagatgatgtgtttgtagtatagggtgtaggaggtggagagggaagaagatgtcgaatgaggagagtagagtgttgggaaaggattttagtagatgatagagtagtgaaatt

SEQ ID NO: 1299 - DNA, 15592 bp, Artificial Sequence
  chemically treated genomic DNA (Homo sapiens)
gtttatattttttttattatatcgttttttttggtttagttcgtttataatatttttttttttttttttttttttttttttttggagatagagtttcgttttgttatttaggttggagtgtaatggtgcgattttagttcgttgtaatttttgttttttaggtagttgggattataggtacgtattattatatttagttaattttgtatttttggtagagatggggttttatcgtgttggttaggttggttttgaatttttgattttaggtgatttatttgttttagttttttaaagtgttgagattataggtatgagttattacgtttggtttttttttttttttttttaaataaatattattatgatgattatttttcgagatagaattttattttattatttaggttggagtgttttggtatgatttcggtttattgtaattttcgttttttaggtttaagtaattattttgttttagttttttaaatagttgggattataggtacgtattattatatcgggttaatttttgtttttttattagagacggggttttattatgttggttaggttggttttgaatttttgattttaaatgatttatttaattcggttttttaaagtgttgggattgtaggcgtgagttattacgtttggtttttttaaataaatattaaataattgaatttggaatttttagaatatattggttatgtgagatttatttatttgtttatttgttgtataatttgtttgggtgtggtagaatataagttttttggaggttgggattttattggtttagtttgttgttgtgtttttaatatttttgtgtatgtttggtatataataggtataataagtatttgttggataaatgaatgattttagataataaatttatggagtatatagtattattaattgtattttatagataaggaaattaaggtttaggtgtgaaataattagtatagagttagagggcgatgtaggaataatgtaaattttgagttttttttgatgagttcgaatggttttttttagttttatatttggaggtgtgaacgtttttatttttattataaaaagagagggattgtgtattaattttttgtttagtgggttggattgggaagataggttttttgtttgtttttattttatttttttagcgagagtgtagaggtttggattttcgttgaggttagattgataggattagaggaaatagttgggttgagttcgtgttttgtaggagggagtttatattttcggattttgggagagagtagttttttatagtttagttatattttaggtcggttatttttttgagtttagatgtttgttaatgagttggggagaggggtttttagttttgagttttagttttgggttttatattatttcggttttaagaggttggtttagggttaggaggttttggttttaggtttatgttttgtgttagttaggtttgtaggggtagttggaatattattgttaattaggtgtatttgttcgagttgggatattttgacgtgataggttttgtttttttcgttggggtttttggggtttatttttagtgtagtatttttgttgtagtttgatggggaggagtattgaggtagtcgagagggtggagagggtgtggtgggtaaggaagtatggattttggtgttgataggtttgggtttaagtttaggttttgttaattattagtaatgtggttttgagtaggtaatgatatattttggtgtttcgattttttttatttgtaaaatgggaataatgatgggattgtggtaaggattagaggagatgaagtagatagagtgattagtataatgtttggtataaaatgggtagatattattattaagttattttttaggttttttgtttatattgtagttttttcgttattagatagatggtgatttaattttaaattttttgtttttgattagggggttggtgttgtttttgaatttttcggtgtttgagagatggtgggttgttttgttaagggtattggttggaagttgtggtttttatttttggttttatgtgtgatttgattagtttattaggttttataattagttttttgtaatgtgggagtggatttttataaaatgtagaattttattttttattttgttcggggtttgtatgaaagatggcgggggtaagttttggttgtaaaatggtaaatattttttgagtgtttattgtgtatagtgtagtgaggttggtttttgtcgtatatggtatatagttatttaatagatattagttggtatgggtttttattgtgtgattttaggcgagttatttaattttttttttgacgtttttttttttattttttttttttttttttgagataaggttttgttggagtgataagtttattaggttttataattagttttttgtaatgttgtttaggttggagtatagtggtataattatagtttattgtagttttaaatttttgggattaagtgattttttagtttcgggattttttttatttttattattttatttgtttgtttgtttatttatttatttatttgagatggagttttattttgttttttaggttggagtgtagtggtgcgatttcggtttattgtaattttcgttttttaggtttaagtgatttttttgttttagtttttcgagtagttgggattataggtatacgttattatatttggttgatttttgtatttttagtagagagagggtttcgttatattggttaggttggtttcgaatttttgattttaagtgatttttttgttttggttttttaaagtgttgggattataagtatgagttattgcgtttggtatttttaaaatagagataatatttattttataggtttattgtgagagtggtaatagtttgtaatgggatgaggtatatggtaaggtgtttaatatgtgtgaattattataacggttatagttattattaagggaagatttatttgtgttatattaatgggggataataattattttattcgttgggcgtggtggtttatgtttataattttaatattttgggaggttgaggcgggaggattatttgaggttaggagttggagattagtttgggtaatatggtaaaattttatttttattaaaaatataaaaattagttgggcgtggtggtgggcgtttgtaattttagttattcgggaggttgagaattgttggaatttgggaggtagaggttgtagtgagtcgagattacgttattgtattttagttagggtaataagagtaaaattttgtttttaataataataataataataataataataataataataataattttatttaattaaatatattgtatattttatttggtttgtttataagtaatggagatattgaaataaatacgatttttgtttttaaggtttaatggaggaaagagatgtatatagttattttagagggaaattgatatgaatagaagtttttattttgtgttttaggattatattggaggagggagatgtttttagagggttttgggaaggttttttaatttggagttggaagaatgtttgtttaagagatgtatatagttattttagagggaaattgatatgaatagaagtttttattttgtgttttaggattatattggaggagggagatgtttttaaagggttttgggaaggttttttaatttggagttggaagaatgtttgttagagatgaaaggaggggaagggaatttcgggtagagggaagggcgtaggtaatagttaggaggcgtagatgtaggttgggtgtggagggtgcgagtaggttggagtatattagggagtttttagtaggttattaggagttatttaggatgttcggtaattttatgagttagataagtagggttgtgtttatttggaagtttttagttaagttaggtaaaatatatggatataggtaattatgttgtaaagtaaaatttttaagttttataatcgtgttttagtggtgtttttgggttattattttttagaagtaaagttatttttttatttcgttgttaagtatatagaatagagaaggtacggtcgtaatttatttaagtgtttattgattagataggaattttcgaggtgaggttggaagttggggttaggagttttattttttttaggagttagagaagtgagtttatttgttggttttttagtttttaataagtttttggggtttttcgggatgtttaagttaagggcgtggggtcgagagcgatattaggataatattaggtaaggttgagtaatttaggttattaatagtacggatttgaatcgggtcgtatgtcggagcggacgggatgaggtgtatcgtagaattggggatttttggtgtcgggacgcggcgggttggggcgttttattttcggggtaagtttgtaatgttcggtgtttataaaaaggatatatttatttttgttatttcgaggtttggtacggtttgacggtttaggttcggtaaaagtcgggcggagagagtggaagcgtagagaaattcggggagggcgtttaagaacgggttagggcgttcggttgggttgttttgtttttcgggcgtcggttaggcgtttcggtcgttttattacgtcgtcggagcgcgtcgaagtttagttcggggcgggcgggttaggagagggttcggggtttttgtcgtcgcggcgtttttttttgcgtattcggagggagaggtcgcgcgcgttcgttcgttttttttgcgcgcggtttttttcgttgtcgtcgttttcgcgttttgtttggagggagttattttgacgtcggagtcgttttttcgcgtcgcgcgttcgttcggggtcgtagatacgcgtagcgtagtttagtcgagcgtcgcggggtcgtttttcgttttgtcggtcgtttcgtcgagttttttggggcgttcgggttcgcgattttcgtatttagtttcgtaggatcggcgggcgcgcgcggtaagtttcgttcgggtcggtacgcgggcgttcggtttttagaggtttcggtcgcgggggtagtgtcgcgtttttagttcggagttgcgtttttcggcgcgttcggcggtcgcgggtatcgggtggaggcgtcgtcgtcgagtttaggagttttgggggatttggcgggcgttttcggacgtcggcgttggggacgtgggcgcggtacggggtggtcggggggtatcgtcgcgttcggagttcgtttttagattcgttttagggtttcgtttttggatcggagttttcgcggtcgggggagagagggagcgagggagggagatgcgtggtcgggcgggtcgggttcgtatgtttttcggtcgtgttcgggtttcgtcgcgtcgcgtttttcggttttggacgttttcgtttttcgcggttttttttgtttcggtttttacgttcgtgtgtttgttttttcgtcgtttcgttttcgtcgtttatttttttttggtttgttcgttttttttcgtttttcgtttgttttcgtgttcggttgttcgcgtttgtgtttttgtttttggtttttttttttttttttttgtttttgcgttgttttttgtgggggtttcgttttgtgtttgcgtttttttttgatttttcgtttttcgatttagataattttttagtgtcggaggttcgtttttttttagcggggtttacgaatagttttttagatcgggtgcggtaaattttttttttgtttttcgtcggtttcgaggtttggttcgggttatttttttggaattgagtttggggtagggagagttagttttttcgggggtttagtttttttaagaattttattttcgcgaggtcggttggacgataggttttgttgcgggttatttgttcggttcgtttttagggcggggcgattttgatcgtttataagcggcggtaaagggggtagtcgtttgttttggcgtggtcggaggttggcgggtattaagggagaaagttatatttttaggttttcggaggttttcgttttttaagttggacgttattagtttgtaattaggggtattttaggaaaatagaggttagggttggaggttaaagatcgggcgttggcggggaagtaatttgttaataaggagttttttattttttgttattgcggaatggggtttttttagatttttttagatgttggggttgtttgggcgtggtttgttttgagttggggttaaagaaaaggcgaggttgtagcgttttttcggtgatttttatttttttttatttatttttgtaagttggatttttttttcgggtttgtgttttggaggggtggataggggagtaggtgttttgtatcggttagggatatcgttttattattttaaagtgaaattttaggttgagtttagttgtttttttttatttataattttaagggtcggaggttgtcggagcgggtagggttgttggtgaggtttgtagtggaatttttgttgagtagatgtgtagtttggttttgtagtagtttattagtatggatttgttttggagattgtttttcgtttgcgggtaggagggtttgcggtaaggagggtcgtggtttgggtttgggggttggtatagaggtggttagggttggaagatgtaggtaggtttgggtggtacggggtcggttttgtgtgttcgttttttggatagttgatttatgttttttttagtgttgaaggaaggaaggaaaagttattttgtcgtgagattggggtcgtggaattatagcggttttaagtagtatgttggagttaggtttttttttgggggatttgttgaaatggacgtttttaggttaggttgtttattttatagatgtaaacgtgaagttgaggggggaagtaaatggttagtggttcgagttataattattagatttttttgattttaggtatatagaaagttaatgtatgagttttggttagaatttatttttaaattttagagtgagtttaggaaattcggttgggttgattagagtcggggtttgatttgggtgagtagggagttttaagtttgatattgttttgtttttttatagagtaataattttagttgtattatttaaggaagtttttgtgtttattttaagatttggagcgatcgtttcgtttttgttaagttttaagtttagggttgtagtttagttattttttatattttttgtatttagtagtatgtttagtttggtagtggggtatagtttgtttttttgaagttggattttggaggaggttggtgtttttacgattttgttttagagtttgagtgggattttttttttagtttttattttagatagggaattatgttgggtggtttttgataatttttaaaatttatttttagttgttattttatttgttggagttttattttaaggttttttttaaatttagttttattggggtagatgtagtttagattgaaatagttttaggatttgtcgaggattttgtgggagcgaggggtagaagggagtaggtagaggttagggaggataagaggtttaagttagtatttaaagtgatatggattgaggaattaattatgatgggcgatttttttagagatttttatgtattttttagtttaattgttatagttgttttgtgagttggatattagtattgtttttattttgtagatgaggaaattgaggtatagaaaggttagaatggggttaagtgattttagtgttttgggaggttgaagtgggagtttaagattagtttggttaataaagggagattttgtttttttaaaaaatataaaaaaattagttgggtatggtggtgtatgtttgtattattagttattttggaggttgaggtgggaggattatttgagttttagagtttgaggttgatgtgagttatgattgtgttatcgcgttttagtttgggtaatagagtgagattttgttataaataaaaatataaagataaaaagagaaagattagaatggttgagttaagatttgaattttagtttgttataattgtggagaatggaggaggagagttagattttgtttttagtgagtgtggggggagaggaaaggtgggagaggtaggggagggggagtatttggtttgaaagttattagttataaacgttgcgtgttcgttgtgtatgcggattgtggtgttatttgaatgttgagtttataggtagaatcgttcgtttttattagttggggttaagtgtggggaggtttttcgaggaggttttggaagtaggaggtgaagatggggagggagagttttgttttttttatcgaggatttgttagttttgttttttacggttttgtatcgagtggttgttggaatcggtaataggaaaggtttggtgtgtgtgtgtgtgcgtgtgtgtgtgtgtgtgcgtgtgcgcgcgtgtgtgtgcgtgtttgtgcggatgtatatttttttgtgtatatataggtatgtttatatatgcgtttgtgtgttttgcgtttatagggggtataggtggtttggggtatgtttgtttttgtgtgtgtgtgggtttggggtgagtggatatattttattttgaaaattttggtatatttggttttgagtgattttgaatatttagatttaatttagaagaggaattggggaggatggtttatttgttatattaaagttaatttattttataaagggttttacggtgggcgggagttaggaagaagtaagtgttttttgaaatttaggttatttttgtgtatttagggtgtatttaggatgtttttttaggtatcggaatttaggtagtgggttggggggttttagtggtagcgttgttaatcgaagttttttttttgggggttgggaggtcgttgtttttggtttggttgggttttagagtttcgtggggagtatatttaggtgtttaggtcgtgttttatatttggcggggttatacgaggagggtcgggtttcggcgttttagttttggtaggtattttaggaaagaggtgttataggtttgatttcggagttggtttttttgggggattttttggattaagatttttaggaaagtaattagggtagggttgttgtgtttgttttttgttttttttttcggagtgggagttacgggtgggttatttttttgatttgtgttttagtttttacggtgttaaaatgggtttgttgttgttattttttggggaattttttttttgtgtgggcggtagtttagaatgtattaggtattggtagagggtcgttgaggaagtggagggtttggatttgggagtggcgggtgggtggggttgggaagatatttatttgtgttaaggatattttttttaaagttttacggcgtttttatgagggaggatcgtgttatatatatttttattagggttttaagagttagggttagttatggttataagacggttggttagggagttaggaatgggatttgaattttggtttgtggagtttttaagtttttagtttaggtagtggttgaacgttagggtgttaataggaatgagaggcgtagtcggttggggtagtggtgggagttttaggttttattttgattttagattttatcgttttttgttttttttttttcggtgaattttttgatttgtaagggtagttgggggttaatttgttattttttaggtttaaatttcggtttttttgtttattaatagtgtaagtttaagtagattttttggtttttttgtgttttagtttttttatttaaaaatgggggaaagaataggattaggtagttattataggatagaataaattaatatttagttatatattatataatgatgaattacgtatataatggtgttgttataaaattattattattattattattattattttgagatgaagtttcgttttgttttttaggttggagtgtagtggtgtaattttggtttattgtaatttttgtttttcgggtttaagtgatttttttgttttagttttttgagtagttgggattataggtatgtgttattatattcggttagtttttgtatttttagtagagacggggtttcgttatgttggttaggttggtttcgaatttttgattttaagtgatttgttatttcgattttttaaaatgttgggattataggcgtgagttattgcgtttggttttttatagaattataatattgtatttttattatatttttttttttttttatgattgtgtagtggtatgattttggtttattgtagttttaattttttaggatcgagtgatttttttattttagttttttaagtagttgggattataggtatgtattattatatttggttagtttttaaatttttgtagagatgggatcgttttatgttgtttaggttggttttgaatttttgagtttaagtaatttttttattttggttttttaaagtgttgggattataggtgtgagttattatgtttagtttattttacgtttttttttttttttttttttttgagatagagtttcgttttgtcgtttaggttggagtgtagtggcgtgatttcggtttattgtaagtttcgtttttcgggtttacgttatttttttgttttagttttcgtgtgtgttatagtgatttatagtatttagtatagttatatgtggtttagatttgtagtttaggagtaatgggttatgttatatagtttaggtttgtaatagtttagattatttaggtttgagtttattttattatttaatggtatattttttagagtgtatttttatggttaattgacgtatgattatagttgcgtttttatatttagtttagaatttagaatttttgttttttttttgagagttatttttgattgtgttaatttaaaataattgttttttatttatttatatttttggatttttttttaggggagtgtttgagtgggtatagggtttgtgtttttagttttttgtttttatttttgtttttttttttatttttttagaagtgagtgagtgtggaattgtagggttttgaacggtttagggtagggtattgttttgtttgatttgttgggggttttgggatagttttttgtagagtagggagatttggttgggagatttttaattttttttttcgttttcgtttttggggagttttatgatttgttgtgtgatttttagggcgggaggaagggttgagaatttgggtgaggtttttaaggtttaggaaggaaagtacgatcgttgtttaaaaaaaaaaaatagattagttgttgtttgaaaaaataaaaaagcgtaaattaataaaaaagtataaattaataaaaaaagaaaatttgttagttaagagtttattttatcggtgggggtagtttgggtttttcggggttgggtaggagggtgggcggaggtaggtgtgtttggatgatagtcgtgtgtgggagagattttatttggtattttcgttgttttttgttttagtttagttttggttttgatgttggtttagttttttttatgattttttggggggaagagagttgattttagtgggtgttttttaggtgttgagtatttttatttattttttttaatttttttttagggaaggtgtaatgttttttatgttagggttgagaaaggtagtttttgaggagtgaatttatttttggagttatatagtttttaaggggaggggttgtagtttaaatattggggattttagggtttacgtttttagggggagttcggggaaaatgttggagttttacgttgttggttcggggaggtcgaggttttagcgtttgcggagagtttgttagggtttggtgggttgggttatagtatttttttgtggatatagttggttttgtgataattttagttgtgtattggaaagggtggaaggtaaggagggggttttttgttttagttcgttttattttttttaatttttgttttagtttgacgttgataattagtttttgatttttgggtttgtaattttttttaaaaagttattattattttattttttagtaagtttttattagttttaattttagttttaatattcggttttagtttagttgtgatttatagtttcggttgtgattttttttaattttaattttaagtgtttattttagtttttttttttttttttgtttttttttttttgtttttttttttttttttttttttgtttttttttttttttttttttttgataggtttttgttttgttatttagtttggagtgtagggacgtaattatggtttattgtagttttaagtttggttttaagttattttttcgttttagttttttatatagttggattataggtgtatattataatgtataatgtgataataaaaaatgtgttattatagtgtgataataaaaaaatattttattttattttattttattttgagattaagttttattttgttttttaggttagttttggatttttgagtttaagtggttttttcgttttggttttttaaagtgttagaattataggtgtgagttattatgtttggtttaggttatttgtattataattttagttttaattttaaatttatattattttttgttttagttatttttttggttttttgtgatttgttgtttttgaggaagtaagatggggttagatataggaggataagagtttttggattttttttaagggtttagggggttagtttagtttagggagttttggttttaaatggatttttaggattttttaggtgtgttgtgggtagatttgatttaggagtgaggaagtcgtttgtatgttaggtttgttgaaaaatttattgggttgttagttagggaggaatttattttattttgttaggatgtggttgtattggaaatatgggttttgttagtaagatcggaaatgcgtgggtgagggtttggatcgtgataggaatttatttgggaggcggcgggggggtagtttgttcgattttatttttagttgttttttttttttagtgggttgggagtggggtttatttcggtattggggttttttgagatggagatttgtaggagaggggtaggagttgggggaatttgttggatggggagcggagtgtttggaggggtttatagttttgtaggagttttatttagttagtttatttttagattcgtgttttttagatattttataaagtatttggttttgggttgggtgtagtggtttatatttgtaattttagtattttgggaggtcgaggtgggtagattatttgaggttaggagtttgagattagtttggttaatttggtgaaattttatttttattaaaaatataaaaattagttaggtgtggtggcgaatgtttgtaattttagttattttggaggttgaggtaggagaattatttgaattcgggaggcggaggttgtagtgagttaagattatgttatgatattttagtttgggcgatagagtgagattttgttttaaaaaaatagataagtaaggtcgggcgtagtggtttatatttgtaattttagtattttgggaggttgaggcgggcggattacgaggttaggagatcgagattattttggttaatacggtgaaatttcgtttttattgaaaatataaaaaattagtggggtatggtggtgggcgtttgtagttttagttatacgggaggttgaggtaggagaaggcgtgaatttaggaggcggagtttgtagtgagtagagatcgtgttattgtattttagtttgggtaatagagcgagatttcgttttaaaaaaaaaaaaaaaaaaaaagtatttggttttgttatttttatggtttatggtaggattgttttaaatgggatgtttagttttaagttatttgatttttggtgttgggtttttgtggggttattgggattaggatttgtttttttttttttttgatttagttttatttaggtttttttagggattgttttaaggtaaagaatttttgattgagcgtatagttgtttaggaagtttgattaaaacgtagatttttatttattttagaatttttattttataagtttttagggaattttgattaaattttaggtttgggaattattggtttggtttattgtatttattttataggtggtggggaaataggtttgagtgtttcggttatttagtatacgtggatttatgttttttttcggttgtgtcgtttttcgagggtttgggggtttttttgaagaaggtattgtttttatttttgaagtttttttttttcgtgttttttgtattggggggtatgggtgaaatttatttggggcgagttttttgaaagcggaattttttgatatagattgttttgtagcgttattttttggtagattttggtattgttttagtattttattttattttatagtaggggaatttgtaaatggttaagtgtttagttttgattggttttcgtttgatttacgtgttagaatggggttggggatagtgatttgtgtagagtttttgtggattcgagtttttggtgaggtattttagagaataatattgtttggtttagggttagtttttttgtttgaggtttggttagttaaggtggtttaggaatttattgtaggttaggtgcggtggtttacgtttgtaattttagtattttggaatgttgaagtaggaagatcgtttgagttttaggagtttgagattagtttgggtaatacggcgaaatttggtttttatagaaattagttaggtgtggtggcggacgtttgtagttttagtaattcgggaggttgaggtgggaggattatttgagtttagggaagtcgaggttttagtgagtcgtgattatgttattgtattttagcgtgggtgatcgagtgagatttttttttaaaaaataaaattaaaaagaaattatagtaacgtgaaggttaaggttaattttttaaatattagaattttgataatggttgtagtagtttttaaggagatatggtgtgtggttagtttttttagggttgtgtggatagttttttgtgtatttttttgggtgatttatagtattaaagggagaaaggaggtagtaattgtttagtatttgatatgtgtttgaatatttcgtaatcgtaattttgtgttaggtagtggtattattttttttttttagatgaagaaatcgaggtatcgagataaaaagtaatttgtttaaggtaatttaggaagttgtaaaattaattaatatatatggaatgtgtattatttgttaggtttatttaatattttatttgattttttagatatttatttgatgtaggtattatttttagttttaattgtgagatttagaggggagaaataatttgtttaaagttgtatttggttagtaagtgggagagttggggttgcgttaaggagtcggatgttagagtttatgttgtaatattattattcggttttttgtattttgttgtgttttatttggtatttgt

SEQ ID NO: 1300 - DNA, 15592 bp, Artificial Sequence
  chemically treated genomic DNA (Homo sapiens)
ataggtgttaggtgaggtatagtaaggtgtagggggtcgggtagtggtgttatagtatggattttggtattcgattttttggcgtaattttagtttttttatttattaattaagtgtaattttggataagttattttttttttttgaattttataattggagttgggagtggtatttatattagatgggtatttggaaggttagatgagatattaaatgagtttagtagataatatatattttatatgtgttggttggttttataattttttaaattgttttgagtaagttattttttatttcggtgtttcggtttttttatttaaaaaggggagatggtgttattgtttggtataggattgcgattacgaagtgtttaagtatatgttaagtgttgaataattattattttttttttttttttgatgttgtgagttatttaggaaaatatataaaaagttgtttatatagttttggaggggttggttatatattatgtttttttgaaagttattgtaattattgttaggattttgatgtttgaaaagttagttttaatttttacgttgttgtgatttttttttggttttgttttttgagaaaagattttattcggttatttacgttggagtgtagtggtatgattacggtttattgaagtttcgatttttttgggtttaggtgatttttttattttagtttttcgagttgttgggattataggcgttcgttattatatttggttaatttttgtaaagattaggtttcgtcgtgttgtttaggttggttttaaatttttggggtttaagcgatttttttgttttagtattttaaagtgttgggattataggcgtgagttatcgtatttggtttgtagtgaatttttgggttattttggttggttagattttaggtaaaaaaattgattttgaattagatagtattgttttttaagatgttttattagaaattcgaatttataagggttttatatagattattgtttttagttttattttaatacgtgagttaagcgggagttaattaaagttaagtatttggttatttgtaaatttttttgttataggatggagtgagatattaaaataatattaggatttgttaaaaggtggcgttgtagggtagtttgtgttaaaggatttcgtttttaggagattcgttttaggtaagttttatttatgttttttagtgtaaaaagtacgggagagggaggttttagagatgagggtagtgttttttttaaggaggtttttaaattttcggaggacggtatagtcgagaaagggtatgggtttacgtgtgttgggtgatcgggatatttagatttgtttttttattatttgtaaaatgagtgtagtgagttaggttagtggtttttaaatttgaaatttgattagaattttttaggaatttgtggagtaaaagttttagggtgggtaggagtttgcgttttgattaggttttttaggtagttatgcgtttagttagggattttttattttgggatagtttttagaggggtttggatgaggttaaattaggaggaagaggggataagttttggttttagtggttttatagaagtttagtattaggagttaggtggtttgggattgggtattttatttaggataattttattatgggttatggagatggtaaagttaggtattttttttttttttttttttttgagacggagtttcgttttgttgtttaggttggagtgtagtggtacgatttttgtttattgtaagtttcgttttttgggtttacgtttttttttgttttagtttttcgtgtagttgggattgtaggcgtttattattatgttttattaattttttgtatttttagtagagacggggttttatcgtgttagttaggatggtttcgattttttgatttcgtgattcgttcgttttagttttttaaagtgttgggattataggtgtgagttattgcgttcggttttatttatttatttttttgagatagagttttattttgtcgtttaggttggagtgttatggtatgattttggtttattgtaattttcgtttttcgggtttaagtgatttttttgttttagtttttagaatagttggaattataggtattcgttattatatttggttgatttttgtatttttagtagagatggggttttattaggttggttaggttggttttaaatttttgattttaagtgatttgtttatttcggttttttaaggtgttgggattataggtgtgagttattgtatttagtttagagttaagtattttataaagtgtttggggagtacgggtttagaggtgggttggttgagtggggtttttgtagggttgtgaatttttttaagtatttcgttttttatttagtaagtttttttagtttttgttttttttttgtaggtttttattttaggggattttaatgtcgggataagttttatttttagtttattggggaggaagggtagttggaagtgaggtcggataggttgttttttcgtcgttttttaaatgagtttttgttacgatttaggtttttatttacgtattttcggttttgttgataaagtttatgtttttagtataattatattttaataaaatagaatggatttttttttaattggtaatttagtgaattttttaataagtttggtatgtaggcggtttttttatttttgagttaggtttgtttatagtatatttgaagggttttggaggtttatttaaggttagggttttttgggttggattggttttttagatttttaggagaggtttagggatttttgtttttttatatttgattttattttgtttttttaggaataataggttatagggggttagggaggtgattggggtagaaagtgatgtggatttggaattgagattggggttgtaatgtaagtagtttgggttaggtatggtggtttatatttgtaattttagtattttgggaggttaaagcgggaggattatttgaatttaggagtttaagattagtttgggaagtaaagtgagatttggttttaaaataaaataaaataaaataaaatatttttttattattatattgtgataatatattttttattattatattatgtattgtgatgtgtatttgtagtttagttatgtgggaagttgaggcgggaggatggtttgagattaggtttggggttgtagtgagttatgattgcgtttttgtattttagattgggtgatagagtaagaatttgttaaaaaggaaagggaaaaaaaggataggaaagaaaagagggagggaggtagggagggagggatagagggagggagggaggttggggtgagtatttggagttggaattaggagaggttataatcgaggttgtgggttataattaggttgaagtcgagtgttgagattggggttgaggttaatggaggtttattgggaaatggggtaatggtgattttttggaagaggttgtaggtttagagattaggaattggttattagcgttaggttgggatagaggttaggagaaatgagacgaattgaggtagaaggttttttttttattttttattttttttagtgtatagttgaggttattatagggttagttgtgtttatagaggggtgttataatttaatttattaggttttagtaggtttttcgtaggcgttggggtttcggttttttcgggttagtagcgtggagttttagtatttttttcgggttttttttggaagcgtggattttggagtttttagtgtttgaattgtagtttttttttttaggagttgtgtgattttagaaataagtttattttttagaaattgttttttttaattttaatatgggaagtattgtattttttttggagaagaattgggaggagtaaatgaaggtatttagtatttaggaggtatttattaaggttagtttttttttttttaggggattatgggaaaggttgggttagtattagagttaaggttgggttggaataggaggtagcgaggatgttagatgaagttttttttatatacggttgttatttagatatatttgttttcgtttatttttttgtttagtttcgaagagtttaggttgtttttatcggtggggtgggtttttggttagtaggttttttttttttgttggtttatgtttttttgttggtttacgtttttttgtttttttaagtagtaattaatttattttttttttttaagtagcgatcgtatttttttttttgagttttgagagttttatttagatttttaattttttttttcgttttgaaggttatatagtaagttatgggattttttaaaagcgagggcgggaaggaaagttggagattttttagttaagtttttttgttttgtaaggggttgttttaaggtttttagtaagttaggtaaagtaatgttttgttttgggtcgtttagggttttgtagttttatatttatttatttttaggagggtggggagaaaggtaagggtgagggtagggagttgggggtatagattttatgtttatttagatatttttttgaggggaggtttagggatgtgggtaaatagggggtagttgttttgagttggtatagttagagatggtttttaggagggaagtagaggttttgaattttgaattaaatataagagcgtaattatagttatgcgttagttagttatggggatgtattttgagaaatgtgttattaggtgatagagtgaatttaaatttgaatagtttaggttattataaatttaggttatatggtatagtttattgtttttaggttataaatttggattatatgtgattgtattaaatattgtaggttattgtaatatatacggaggttgaggtaggagaatggcgtgaattcgggaggcggagtttgtagtgagtcgagattacgttattgtattttagtttgggcgataaagcgagattttgttttaaagaaaagaaaagaaaagaaaacgtaaagtaggttaagtatggtggtttatatttgtaattttagtattttgggaggttaaggtgagagaattgtttgagtttaggaatttaagattagtttgggtaatataagacgattttatttttataaaaatttaaaaattagttaggtgtggtggtgtatgtttgtggttttagttatttgggaggttgaggtgagaggattattcggttttgggaggttgaggttgtagtgagttaggattatgttattatataattatgaaagaaagaaaaggtgtagtaaaaatatagtattataattttatgggaggttaggcgtagtggtttacgtttgtaattttagtattttgggagatcgaggtggtagattatttgaggttaggagttcgagattagtttggttaatatggcgaaatttcgtttttattaaaaatataaaaattagtcgggtgtggtggtatatgtttgtagttttagttatttaggaggttgaggtaggagaattatttgaattcgggaggtagaggttgtagtgagttaagattgtattattgtattttagtttgggggatagagcgagattttattttaaaataataataataataataataataattttatggtagtattattgtgtacgtggtttattattgtgtggtgtgtgattggatattaatttattttgttttatgataattgtttgattttatttttttttttatttttagatgaagaaattgaggtatagagaggttaagaaatttgtttgggtttatattgttagtaaataggagaatcgggatttgaatttggagggtagtaggttaatttttagttatttttgtaggttaaaaggtttatcgaagagaaagaagtaagaaacgatggaatttggagttaggatgaggtttggagtttttattattgttttagtcgattgcgttttttatttttgttaatattttagcgtttagttattgtttggattggaagtttgggggttttatagattagagtttaaattttatttttgattttttagttaatcgttttgtggttatggttgattttggtttttggagttttggtaaaggtatgtgtgatacgatttttttttatgggggcgtcgtgaggttttaaaggaggtgtttttggtataggtgagtgtttttttaattttatttattcgttatttttaaatttaagttttttatttttttagcggttttttgttaatgtttggtatattttgagttgtcgtttatatagaaaggaaattttttaggaggtgataatagtagatttattttggtatcgtggaaattgaggtataggttaaggaagtgatttattcgtagtttttatttcggggaagagggtagggaataaatatagtagttttgttttggttgtttttttgaaagttttggtttagagggttttttaggaaggttagtttcggggttaggtttgtgatattttttttttgagatgtttgttaaaattgagacgtcggggttcggtttttttcgtgtgatttcgttaggtatgaggtacggtttgggtatttgaatgtgttttttacgggattttgaggtttagttaggttaggagtaacggttttttagtttttaggaaaggggtttcgattaataacgttgttattgaggttttttagtttattgtttggatttcggtatttggaaaggtattttaaatgtattttaaatatataggagtggtttagattttaaggaatatttatttttttttgattttcgtttatcgtgaaattttttgtagagtggattagttttggtataataagtgaattattttttttaattttttttttgggttaagtttgaatatttaaggttatttaaggttagatatattaggatttttaaggtagagtgtatttatttattttagatttatatatatataaaagtaggtatattttaaattatttgtgttttttatgaacgtagaatatatagacgtatatataagtatgtttatatatgtataagaaaatgtatattcgtataagtacgtatatatacgcgcgtatacgtatatatatatatatacgtatatatatatatattaggttttttttgttatcggttttagtaattattcggtgtagagtcgtggagggtagggttgataaattttcggtggaaagggtagggttttttttttttatttttattttttgtttttagaattttttcggggaatttttttatatttggttttagttgatggagacggacgattttatttgtgggtttagtatttaggtgatattatagttcgtatgtataacgagtacgtagcgtttgtggttggtggtttttaaattagatgtttttttttttttgttttttttattttttttttttttttatatttattaagggtagggtttggttttttttttttattttttataattatgatagattggggtttaaattttagtttagttattttaatttttttttttttatttttatgtttttatttgtaataggattttattttgttatttaggttggagcgcggtggtataattatagtttatattagttttaaattttggggtttaagtgatttttttattttagtttttagaatagttggtggtataggtatatattattatgtttagttaatttttttgtattttttgaagagataaggtttttttttgttgattaggttggttttgaatttttattttagttttttaaagtattaggattatttggttttattttaatttttttgtattttagtttttttatttgtaaagtggggatagtgttaatatttagtttataggatagttgtgataattaaattgaagaatatatggaaatttttggagagatcgtttattatagttaattttttagtttatgttattttaagtgttagtttgggttttttattttttttggtttttgtttgtttttttttgtttttcgtttttataggattttcggtaggttttgaggttattttagtttgagttgtatttgttttagtgaaattggatttagggaaaattttgaggtgaaattttagtaagtgggatgatagttgggaatggattttagaaattgttaagggttatttaatatgattttttatttaaggtgggaattgagaggaagattttatttagattttaagatagggtcgtggagatattagttttttttagaatttaattttaagaaaataggttgtgttttattgttaggttgagtatgttgttgggtgtagagggtgtggagggtggttgggttgtagttttaggtttggggtttggtaagggcggggcgatcgttttaggttttgaaatgagtatagggatttttttgaatggtgtaattgaaattgttgttttgtgaaggggtaaggtagtgttaggtttggggttttttgtttatttaggttaggtttcggttttggttagtttaatcgggttttttgggtttattttggggtttgaggatgagttttggttaaagtttatatattggttttttgtgtgtttggagttaggagagtttaatggttatagttcgagttattgattatttgtttttttttttagttttacgtttgtatttgtaaaatgggtagtttggtttgggaacgtttattttagtagattttttagggaggagtttggttttagtatattgtttaaggtcgttgtgattttacgattttagttttacggtagggtggttttttttttttttttttagtattggggagagtatgagttaattgtttagagggcggatatatagggtcgatttcgtgttatttaggtttgtttgtattttttagttttgattatttttgtgttagtttttaaatttaggttacggttttttttatcgtagatttttttgttcgtaaacgaaaaatagtttttaaaataaatttatgttaatgagttgttgtagggttaggttgtatatttgtttagtagaagttttattgtagattttattaataattttgttcgtttcggtagttttcgatttttgaggttgtgggtggggggaagtagttaaatttagtttgaaattttattttaaaataatgaggcgatatttttggtcgatgtagaatatttatttttttgtttatttttttaaaatataggttcgggagagaggtttagtttgtaggggtgggtggagaggggtaggggttatcgaggaaacgttgtagtttcgttttttttttggttttaatttaaggtaaattacgtttaagtagttttagtatttgggggagtttagggaggttttatttcgtagtaataaagggtgaggggttttttgttgataaattgttttttcgttagcgttcggtttttggtttttagttttgatttttgtttttttggggtgtttttagttataggttggtggcgtttagtttggggagcgagggttttcgaaagtttggaagtgtggtttttttttttgatgttcgttaattttcggttacgttaaggtaggcggttgttttttttgtcgtcgtttgtaaacgattagaatcgtttcgttttgggagcgggtcgggtaggtggttcgtagtagggtttgtcgtttagtcggtttcgcgggggtggaatttttaagaaaattgagttttcggaaaggttggttttttttgttttagatttaattttagggagatgattcgggttaggtttcggggtcggcgggaggtagggggagggtttgtcgtattcggtttaggaaattattcgtgaatttcgttgggggaaggcgagttttcgatattgggggattgtttggatcggagggcgggggattagggagaggcgtagatatagggcgagatttttatagagggtagcgtagagatagagagagggagagaaaagttagaggtagagatataaacgcgggtagtcgaatacggaggtaggcggggaacggaaagagacgggtagattaggggaaagtgagcggcggaaacggagcgacggagagatagatatacggacgtggggatcgaagtagagggggtcgcgggaggcggaaacgtttagagtcgagaggcgcggcgcggcgaggttcgggtacggtcgggggatatgcgagttcggttcgttcggttacgtatttttttttttcgttttttttttttttcggtcgcggaaatttcgatttagaaacggaattttggggcgagtttggggacgggtttcggacgcggcggtgtttttcggttatttcgtgtcgcgtttacgtttttagcgtcggcgttcggaggcgttcgttaggttttttagggtttttgagttcggcggcggcgtttttattcggtgttcgcggtcgtcggacgcgtcgggggacgtagtttcgggttgggggcgcggtattgttttcgcggtcgaagtttttggaagtcgggcgttcgcgtgtcgattcgggcgggatttatcgcgcgcgttcgtcggttttgcggagttgggtgcgggggtcgcgggttcgggcgttttaggaggttcggcgaggcggtcggtagggcggggggcggtttcgcgacgttcggttgggttgcgttgcgcgtgtttgcggtttcgggcgggcgcgcggcgcgggggagcggtttcgacgttagggtggttttttttaaatagggcgcgagggcggcggtagcggggagggtcgcgcgtagaaagagcgggcgggcgcgcgcggttttttttttcgggtgcgtaggagggggcgtcgcggcggtaggggtttcgggtttttttttggttcgttcgtttcgggttgagtttcggcgcgtttcgacggcgtggtggggcggtcgggacgtttggtcggcgttcgagaggtagggtagtttagtcgggcgttttggttcgtttttaagcgtttttttcgggtttttttgcgtttttatttttttcgttcgatttttatcgagtttgggtcgttaggtcgtgttaggtttcggggtgataaagatggatgtgttttttttgtgggtatcgggtattgtagatttgtttcgagagtggggcgttttagttcgtcgcgtttcggtattaggagtttttagttttgcggtgtattttatttcgttcgtttcggtatgcgattcggtttaagttcgtgttgttggtagtttgggttgtttagttttgtttagtgttattttagtgtcgttttcggttttacgtttttggtttaagtatttcgaaaagttttagggatttattaggaattaaaaagttagtaaatgaatttatttttttgatttttgggaagagtggagtttttggttttagtttttagttttatttcgggggtttttatttaattagtgggtatttgggtggattgcggtcgtattttttttattttgtgtgtttaataacggggtgagaaaataattttgtttttggaaagtggtggtttagggatattattgggatacgattgtaggatttggggattttgttttatagtatagttatttgtgtttatgtgttttatttagtttggttggaaatttttagatagatatagttttgtttgtttgatttatgaggttgtcgggtattttgggtggtttttagtggtttgttgggaattttttggtgtattttagtttattcgtattttttatatttagtttgtatttgcgttttttagttgttgtttgcgtttttttttttgttcggaattttttttttttttttttatttttggtaaatatttttttagttttagattggaaagtttttttaagattttttgggagtattttttttttttagtgtgattttggagtataggatgagaatttttgtttatgttaatttttttttagaataattgtgtatattttttgggtaaatatttttttagttttagattggaaagtttttttaagattttttgggagtattttttttttttagtgtgattttggagtataggatgagaatttttgtttatgttaatttttttttagaatagttgtgtatattttttttttttattagattttgagggtaggaatcgtgtttattttagtgtttttattgtttatgggtaggttaggtgagatgtataatgtatttggttgaatgaagttgttgttgttgttgttgttgttgttattattattattattagagatagaattttgtttttgttgttttggttgaaatgtaatggcgtgatttcggtttattgtaatttttgttttttaggttttagtaatttttagtttttcgagtagttgggattatagacgtttattattacgtttagttagtttttgtatttttagtagagatggggttttgttatgttgtttaggttggtttttaatttttggttttaagtgattttttcgttttagttttttaaagtgttgggattataggtatgaattattacgtttagcgaataaagtaattattattttttattaatgtagtatagataggtttttttttaatggtaattatgatcgttataatagtttatatatattgagtattttattatgtgttttattttattgtaagttgttgttatttttataataaatttatgaggtaagtattgtttttgttttaaaagtgttaggcgtagtggtttatgtttgtaattttagtattttgggaggttaaggtaggaggattatttgaggttaggagttcgagattagtttggttaatatggcgaaattttttttttattaaaaatataaaaattagttaggtgtggtggcgtgtgtttgtagttttagttattcgggaggttgaggtaggagaattatttgaatttgagaggcggaggttgtagtgagtcgagatcgtattattgtattttagtttgggaggtagagtgagattttattttaaataaataaataaataaataaataaataaataaaataataaaagtgaaaaaaatttcgaggttggaggattatttgattttaggagtttgaggttgtagtgagttatgattgtgttattgtattttagtttggataatattgtagaaggttaattgtggaatttaatgagtttgttattttagtaaggttttgttttaaaaaaaaaaaaaaaaagtgaaaaaaggaacgttaagagaaaggttaagtaattcgtttaaagttatatagtaagagtttatgttagttagtgtttgttggataattatatattatgtacggtagaaattagttttattgtattgtatatagtagatatttaggaaatatttattattttgtagttaaagtttattttcgttattttttatgtagatttcgagtagggtagaaagtagagttttatattttgtaagaatttatttttatattgtagaaagttaattgtggagtttgatgagttggttagattatatatagagttaggagtagaagttataatttttagttagtgtttttgatagggtagtttattattttttaaatatcgggaggtttaagaataatattaattttttaattagggataaagggtttggagttgagttattatttgtttggtgacgggaaagttatagtgtgggtagggggtttgggaagtaatttggtagtaatatttatttattttgtgttaggtattatgttggttattttgtttgttttattttttttaatttttattatagttttattattgtttttattttataggtaagaaaaatcgaggtattaaaatgtgttattatttgtttaagattatattgttagtgattaataaagtttggatttgagtttagatttgttaatattaaagtttatgtttttttgtttattatattttttttattttttcggttgttttagtgtttttttttattaggttgtagtagggatgttgtattgaagatggattttaggggttttagcgggaaaggtagaatttgttacgttagagtgttttagttcgagtagatgtatttggttggtagtggtgttttagttgtttttataggtttggttggtatagggtatgggtttgaggttagagttttttggttttgggttagttttttggggtcgaggtaatgtggggtttagagttggggtttagggttaaaagtttttttttttagtttattagtaaatatttgggtttaggaaaatgatcgatttggaatgtgattgagttgtggggagttgtttttttttagagttcgggaatgtgagtttttttttgtagggtacggatttagtttagttgttttttttaattttgttagtttggttttaacgggggtttaaatttttgtattttcgttggagaaatagaatgaaaataagtaaaaggtttgtttttttagtttagtttattgaatagagggttggtatatagtttttttttttttatgataaagatgagagcgtttatatttttaggtatggagttgggaggagttattcggatttattaggggaggtttagggtttatattgtttttgtatcgttttttgattttgtgttagttgttttatatttgggttttggtttttttatttgtaaaatgtagttagtagtgttatgtattttatagatttgttgtttggagttatttatttatttaataaatatttattgtgtttgttatgtgttagatatgtatagaggtgttgaggatataataatagattagattaataaggttttagtttttaaggagtttatgttttgttatatttaggtagattgtgtaatagataaatagatgagtggattttatataattaatgtgttttgaaggttttaggtttagttgtttaatatttatttaaaagagttaggcgtgatggtttacgtttgtaattttagtattttaggaggtcgagttgggtggattatttgaggttaggagtttaagattagtttggttaatatggtgaaatttcgtttttaataaaaagataaaaattagttcggtgtggtggtacgtgtttgtaattttagttatttgggaggttaaggtaggataattgtttgaatttgggaggcggaggttgtagtgaatcgagattatgttagagtattttagtttgggtgatggagtgagattttgtttcgaaaaataattattataataatatttatttaaaagaaaaaaaggagaggttaggcgtggtggtttatgtttgtaattttagtattttgggaggttgaggtaggtggattatttgaggttaggagtttaagattagtttggttaatacggtgaaattttatttttattaaaaatataaaattagttgggtgtggtggtgcgtgtttgtaattttagttatttgggaggtagaggttgtagcgagttgagatcgtattattgtattttagtttgggtgatagagcgagattttgtttttagaaaaaaaaaaagaaaaaaaggagaaaaagtattatgaacgaattaagttagagggggcgatgtgatgggggaggtatgaat

SEQ ID NO: 1301 - DNA, 8277 bp, Artificial Sequence
  chemically treated genomic DNA (Homo sapiens)
ttttaattttattttattttattttatttatttattttttgaaattaagtttattttgttatttagtttggagtgtagtggtgtgatttcggtttattgtaatttttgttttttaggtttaagcgatttttttgttttagttttttaagtagttgggattataggtttgtaacgttatgtttggttaatttttttatttttagtagagattcggttttatcgtgttggttaagttggtttcgaatttttgattttagatgatttatttattttggttttttaaagtgttggaattataggtatgagttattgtatttatttttttttttttaattaaaaaaattatttggtattttgttttatttatgtattaaattaaattttggttagatatagtggtttatgtttgtaattttagtattttgggaggttgaggtgggaggattatttgatattggagtttgagattaggtcgagtagtatttcgagatttcgtttttataaaaaaaaaaaataataataataataataaataaaaagtggaaaaaattttatgttattttgaaaaaaggttgtaagtttgtttatagaggttattataaggttaaatttaagtttagagcgttttttgtttttgtttatttaataaatttgttggatattttttgtttgtagagtattttgagggaatataatagggttttgggaggttataggaggagagttgaaagattatagttaggggtttagggtgtttataggataagtatttttggttaggtagttacgtaagtgtggaaagatcgttagaggaagggaaggaagtgtcgagagtttataaaattttttgtttataattagttttattagaatttttttttgttttgtttcgatatgtttaggagagtatcgttgtaggtttggtttttgtgttgagtttttttttttttttttttttgagatagaattttattttgttttttaggttggagtgtagtggtaggatttcggtttattgtaatttttatttttttggtttaagtgatttttttgttttatttttcggagtagttgggattataggtgtgtgttattatgtttagttaatttttgtatttttagtggagattgggttttattatgttgggttagttggttttgaatttttgattttaggtgattcgtttatcgtagttttttaaagttttgggattagagttatgagttattatgtttggttatcgtgttgggtttttcgaggaggtatttgatagggaagatgagagataaattgagtgttagggaaggggtgttgatagaaaaattataggagagtatataatttttagcgggtgagtttagtgtttgagttgcgggattattttattaatgattttgaatttatttgattgtagttttgaatttttgagtttaaggagtttttttgttttagtttttttttaagtagttgggattattggtatatgttattatgtttagttaattattttatttattttattttattttattttattttattttattttgagatggagttttgtttttgttgtttaggttggagtgtaatggtgtaattttagttcgtcgtaatttttgttttttaggtgtaagcgaatttttttgttttagttttttgagtagttgggattataggtatgtgttattacgtttggttaattttgtatttttagtagagacgggtttttattatgttggttacgttggtttcgaatttttgattttaggtgatttatttgtttcggttttttaaagtattgagattataggtatgagttatcgtatttggttttatttgtggaattagtatttatttggagaggaggtaaatatcgtttattatttttcgtttttttttgttattattgtttttattattattttagaggttattttggtttttaatattatagtttggtttgggtagtttttaagtttcgtataaatgatattttttagaatatgtgttttgtgtttgtttttttttcgttagtgatgtatttggaagattttattgtgtcgttttgtgggataggtttttgttattgttgagtagattttgttgtaaatgtttatttttttttatggaaagatttaagatatatagatggaaattattataggaagggttggtaaggtcgtttatatttagggttggggattttagggtggaggtgggggatagtaaggattagaaggagtaggtgtcggcgggtgatgtgagtttttttttttatagagaagtgaaggtcgggtgtagtggtttatttttgtaattttagcgttttgggaggtcgaggcgggtagattatttgaggttaggagttcgagattagtttgggtaatttggtgaaattttattattataaaaatataaaaaattagtcggacgtggtggtgtacgtttgtaattttagttatttgggaggttgaggtaggagaattgtttgtattcggaaggtgaaggttgtagtgagtcgagattatgttattgtatattagtttgggggatagaaagagattttgttttaaaaaaaaaaaaaagaaaaaaagaagtgaagtatttgttaagtaaattttttagagtaggtggagtggattttatattttttggataataaatgtattggataataaaagtaggaataggttaggtgcggtggtatgtgtttgtagttttaatttattggggaggttaaggtaggaggattgtttgagtttaggagttggaggttgtagtgagttatgattaggtaattgtattttagtttgggtgatagatagagattttgtttttaaaaaaaaaaaaaaaaaaaaaaagggttaggtatagtggtttatgtttgtaattttaatattttgggaggttgaggtgggtggattttttgagtttaggagtttaagattagtttggttaatagggtgatattttttttttattaaaaatataaaattagttaggcgtggtggcgtatatttgtaattttagttatttgggaagttgaggtaggagaatcgtttgaatttggaaggtagaggttgtagtgagtcgagattgtgttattgtattttagtttgggtaataagagcgaaatttcgttttaaataaataaattaacgtttagtatgttttggtttttatttgttagattttaatttttatttttaggagattaggttcggattatgagttgattttggatttaggtaagggtgagttggtgtagttttggtttgttgggaggtataggttgtagtaggttgtttggggttgaggttcgttatttatgaatttatgattttgaatgagttttaaaagttttgggttttttaggttttagggggagtgggagagagaggttttagtttgtttttgggtatgttgttttttttttatttttttgttttaaattttttttttggtaaagttgatagttttaatattattttggagaaaattgagttagttttaaggaataatttaatgaattatttgtttatttgaggattggaatttaagttttatttaaagtttgtgttattttcgttttagttgttattggtttttatttatatatatttaaggatgagtatttaacgtttgtatgtatatttttatgttcgcgtttatttatttatttatttatttatttatttatttattgatttatttatttatttatttatttatttatttatttagtgaatgttgtagttacgatttaaatatttatggtttttgtgtgttaggtattagatggaggggttggggttagagtttttgataattcggttatgttttagtttttttgggatatatattgtggtaaggggagattaaaaaaattaagttaggttaggtacggtggtttatgtttgaattttagtattttgggaggtcgaggcgagtgaattatttgaggttaggagtttaagattagtttggttaatatggagaaatttagtttttaattaaaaaaaaaaaaattaattaggtgtggtggtatatgtttgtaattttagttatttaggagattaacgtaagagaattgtttgaatttaggaggtagaggttgcggtgagtcgagatcgcgttattgtattttagtttgggaaataagagcgagattttattttaaaaaaaaaaaagtgggaggtagaggtaggaggattattagaggttagtagtttgagattattttgggtaatatagtaggattttgtttgtataaaaaaattaaaaaaaatttaatcgggtatggtggtatatattcgtagttttagttattttagaggttgaggtaggaggatcgttggagtttaggagttggaggttgtagtgaattgtgattttattattgcgtttaagtttggataataaagtaagattttgttttaaataataatagtaataataataaagaaaaattaaatgtaatttgcgatgtattagtgataagtgttttgtagaaaaaggaggtaggaagaggttgagaaaggtatgaggtttgttatgtaatgtgaagttattaaggaaggtttttcggaagaggtgatatttgagtagagaaatggaggagagttatggagggaagatggtgaatggggggaatatggttaagattaggaatatggttaaggggggaaagatggttaaggggacgtagtaaatgtaaaggttttgaggtaggagtagtttgatttatttttaaaattcgtggggttcgtgtaggcgacgggaaggataagtgtaaatttttttttttgtttttgtaggtgtgtgtgaatatgagtttgtttatgtttatattttgtaagtttgaagagtttttagaaattgaaagaagaagtaaagttttttttgtattttttttgttttttgtttcgatcgcgataaaagcgattttttttttttagtgtatttaaggcgtagtttggaagtgttagggagtattggaggttatttagttatgggggatatttttattcgttatatcgttttgttgggttttgagaagcgtttcgtatttagttagtattatgtgagtagttggtggagggtatttcgtggggggaatacgggagggatagtacggttatttttgtagttttagggttaattagttttagtgaggattaacggggtagggttttgggtatttggtttttggtttttgagtttggatttatttttttgatttttgggaagatagtttttttggattcgttttgggttttagttttttattgttttcgtttgtgtttttagttaggtttttagttttagttaggagttttttttttgtttttttgttatggttaggtagtttagcgtttttttaggttcgaggtttatttttttaggaagttttttttgattagtttagttattagagagtggtttttttaagagggaggtttggaaattaaagttttttttttttttagttgtttgtagtgttagttagagttttattttttttagtagggtgatattatgataggggttaatagagtttttttatttgtttttaaggaggttggataaatgtttgtttagatatataagtttattgggttttttaattttataggaaggttagggaggaattatatttaggaaattgaagtttgtatggaatatttagttttatgtgttaagattttttttttttttgttatttttttgtgttttgagatagagttttgatttgttgtttaggttagagtgtagtggtacgattttagtttattgtaattttcgttttttaggtttaattggtttttttgttttagtttttagagtagttgggattataggtgtttattattacgtttggttaatttttgtatttttagtagagatagggttttattatgttggttagattggttttaaatttttgattttaagtgatttatttatttgggttttttaaagtgttgggattataggtatgagttatcgtgtttggtttgtttttttgaaatgaggtttggagtgtagtggtgcgattatagtttattgtagtttcgattttttaggtttaagtgatttttttgttttagttttttgagtagttggggttataggcgtatattattatgtttggttagtttttaaaatttttgtggagatgaggttttattatgttgtttaggttaattttgaatttttcggtttaagtaattttttggttttagttttttatagtgttaggattataagcgtgagttatcgtgtttagttatttttttttttttttttgtaatttttagttttgaaattttaaatttatagaaaggttattgggtgttaaaacggtattagttattttaatagttttttatttatttttatttatatttttttttttggggatattttttgaattatttgagagtgagttgaagacgtgtttttttatttttaaatattagttgttgggtattttttaaaattaaggtatttttttatataattataatatacgtgttaaaattaggaaattaatatggataaaatattattatttatttatagattttattgaggttttttcgattattttgtttgttttttgtagtgaaaattttttttaggtttaggatttagttaaggattaatgttatagtttttaattttttttaatttggattagttttttttttttttttttttttttttttggatacggaattttattttgtcgttagattggagtgtagtggtgtaatttcggtttattgtaatttttgttttttgggtttaagagatttttttgttttagttttttgagtagttgggaatataggtgcgcgttattatgtttagttcgtattttttggtagagatagggttttgttatattgattttggattagtttttttttttttttatgagatggagttttattttgttatttaggttggagtgtaatggtataatttttatttattgtatttttcgttttttaggtttaagtaattttcgtgttttagtttttcgagtagttgggattataggtatgcgttattatgttcggttattttttgtatttttagtagagatagggttttattatgttagttaggttgatttcgaatttttgacgttaggtgatttgttcgtttcgattttttaaagtgttgggattataggcgtgagttatcgtgttagcggattttggatcggttttaattagtttttgttttttgtaattttgatgttttgtagagagtagattagttattttgtagaatgttttttagtttgggtttatttttattagatttagtttgtgtatttagggtagtggattttagatgtaattttgttttttttttaatttttttgagagggagtttcgttttgttatttaggttggagtgtagtggtataattttagtttattgtagttttcgtttttcgggtttaagtaatttttttgttttagttttttaagtagttgggattataggtgtttattattattatcgggtaatttttgtgtttttagtagagatagggttttattatattggttaggttggttttgaacgtttgattttaggtgatttatttgttttggttttttaaagtgttgggattatagacgggagttaatatgtttagtttttttgtttttttcgtttttttttttttttttttgtttttttttttttttttttttttttttttgtttttttttttttttttttttttttatttaagttggagtgtagtggtgtaattatagtttattaaagttttgatttttaagttttaagtaatttttttgttttatttggggttataggtgtgcggtattatattcggataatttttgtgtttttagtagatatgggggtttcgttatgttgtttaggttggttttaaatttttggatttaagcgatttttttatttcggtattaaaaagtgttgggattttaggtgtgagttatcgtgtttagtttaggttttatttttatttttaatttatagatgagtttatttgagagaagttgatttttttgttttgggttttaaggttggggcgtggtagtatttgggtttacgtttgtgttttttttgtaatttaggataatcgtaaagatggtttttattttaattttttgggttttttttagtgggtagtgggattttgggtgtatatagtaaagtttttttggaggttgaatggggtttttcgattttggtttttttttagg

SEQ ID NO: 1302 - DNA, 8277 bp, Artificial Sequence
  chemically treated genomic DNA (Homo sapiens)
tttgggggaaagttagagtcgggggattttatttagtttttaaagaggttttgttgtgtgtatttaggattttattatttattggaggaagtttagaggattggggtgaggattatttttgcggttgttttggattgtagaaagggtataaacgtggatttaagtgttgttacgttttagttttgagatttagggtaagagggttagttttttttaaatggatttatttgtaaattggagataaaagtaggatttaggttgggtacggtggtttatatttggaattttagtattttttagtatcgaggtgggaagatcgtttgagtttaagagtttgagattagtttgggtaatatagcgagatttttatatttattaaaaatataaaaattgttcgggtgtggtgtcgtatatttgtggttttaggtgaggtaggagaattgtttgagatttggaggttaaggttttagtgagttatgattgtattattgtattttagtttgggtggggaggggaggggaagggaggggataggaggagaggggaggggaagggaggggataggaggagaggggaggggacgggaggggtaggaaggttgggtatgttggttttcgtttgtaattttagtattttgggaggttaaggtaggtggattatttgaggttaggcgtttaagattagtttgattaatatggtgaaattttgtttttattaaaaatataaaaattattcggtagtggtgatgggtatttgtgattttagttatttgggaggttgggataggagaattgtttgaattcgggaggcggaggttgtagtgagttgaggttgtgttattgtattttagtttgggtgatagagcgagatttttttttaaaaaaattaaaaagaagatagaattgtatttaagatttattgttttggatatataaattgaatttaatgaagataaatttaaattaagggatattttataaggtaattggtttgttttttgtaaaatattaaagttgtaaaagataaagattgattaagatcgatttagaattcgttggtacggtggtttacgtttgtaattttagtattttgggaggtcgaggcgggtagattatttgacgttaggagttcgagattagtttggttaatatggtgaaattttgtttttattaaaaatataaaaagtagtcgggtatggtggcgtatgtttgtaattttagttattcgggaggttgaggtacgagaattgtttgaatttgggaggcggaggatgtagtgagtggagattgtgttattgtattttagtttgggtgatagagtaagattttattttataaaaaaaaaaaaagattgatttagaattaatatggtaaaattttgtttttattaaaaaatgcgagttgggtatggtggcgcgtatttgtatttttagttatttaggaggttgaggtaggagaattttttgaatttaggaggtagaggttgtaatgagtcgagattgtattattgtattttagtttggcgatagagtgagatttcgtgtttaaaaaaagaaaaagaaaaagaaaaaagattgatttagattaaagaaggttaaaggttatgatattgatttttgattggattttagatttgaaaaaagtttttattgtagaggataagtaggataatcggggaaattttagtaaagtttgtgggtggataatggtgttttgtttatgttaattttttgattttgatacgtgtgttgtgattatgtaagagaatgttttgattttaagaaatgtttaataattagtatttagaggtaaagaaatacgtttttaatttatttttaaataatttagaaaatatttttagaaagagaggtgtggatgaaggtgagtgaaagattattggagtgattggtatcgttttgatatttagtagtttttttgtaaatttgaaattttaaaattgaaagttataaagaaaaggagaaaagtgattaggtacggtagtttacgtttgtaattttagtattgtgggaggttgagattagagggttgtttaagtcgaggagtttaagattagtttggataatatagtgaaattttatttttataaaaattttaaaaattagttaggtatggtggtgtgcgtttgtagttttagttatttaaggggttgaggtaggaggattatttgggtttgggaggtcgaggttgtagtgaattatgatcgtattattgtattttagattttattttaaaaaaataggttaggtacggtggtttatgtttgtaattttagtattttgggaggtttaggtgggtggattatttgaggttaggagtttgagattagtttggttaatatggtgaaattttgtttttattaaaaatataaaaattagttaggcgtggtggtgggtatttgtaattttaattattttggaggttgaggtaggagaattagttgaatttggaaggcggaggttgtagtgagttgagatcgtgttattgtattttggtttgggtaatagattaagattttgttttaaaatataaaaaaataataaaaaagagaaaggttttggtatataggattaaatgttttatataagttttaattttttaaatgtagtttttttttggtttttttatgggattaggggatttagtggatttgtgtgtttgagtaggtatttgtttagtttttttggggatagatgggaggattttattggtttttgttatggtgttattttattggagaggataagattttaattgatattataggtagttggggagagagagagttttagtttttaggttttttttttgggagggttattttttgatagttgggttagttagggaaggttttttggaggagtgggtttcggatttgagagagcgttgggttgtttggttatggtaggggagtagaaagaggatttttggttaaggttgagggtttggttggggatataggcggggatagtaaagggttggggtttagggcgggtttaagggaattgtttttttagggattagaggggtagatttaggtttaaagattagggattaggtgtttaagattttgtttcgttagtttttattggagttggttggttttgggattgtaagggtggtcgtgttgtttttttcgtattttttttacgggatgttttttattagttatttatatagtgttggttgggtacgaagcgttttttaaagtttagtagggcgatgtgacggatgaaggtgttttttatgattgggtggtttttagtgttttttggtatttttaggttgcgttttaaatgtattggaaagaggaagtcgtttttgtcgcggtcgggatagggggtagggagggtatagaaagggttttgtttttttttttagtttttggggattttttaggtttgtagggtgtaaatatgggtagatttatgtttatatatatttgtagggataaggaaaagggtttatatttgtttttttcgtcgtttgtacgggttttacgggttttgggggtgaattaagttgtttttgttttagggtttttgtatttgttgcgtttttttgattatttttttttttttgattatatttttggttttgattatgttttttttatttattattttttttttataatttttttttatttttttgtttaaatgttatttttttcgagaagttttttttgataattttatattgtatagtaaattttatattttttttagtttttttttgttttttttttttgtagagtatttattattgatgtatcgtaaattgtatttaatttttttttattattattgttattgttatttgagatagggttttgttttgttatttaggtttaagcgtagtggtgggattatagtttattgtagtttttaatttttgggttttagcgatttttttgttttagtttttggagtagttgggattacgggtgtgtgttattatgttcggttaaattttttttaatttttttgtatagatagggttttgttatgttgtttaggatggttttaaattattggtttttagtgatttttttgtttttgttttttatttttttttttttgagatggagtttcgtttttgttttttaggttggagtgtaatggcgcgatttcggtttatcgtaatttttgttttttgggtttaagtaatttttttgcgttagttttttgagtagttgggattataggtatgtgttattatatttggttaatttttttttttttaattagagattgggtttttttatgttggttaggttggttttgaatttttgattttaggtaatttattcgtttcggttttttaaagtgttgggatttaggtatgagttatcgtgtttggtttgatttaatttttttagtttttttttattataatgtgtgttttaggaaagttagggtatgatcgggttattaggggttttagttttagtttttttatttagtgtttggtatatagaggttataaatatttggatcgtgattgtaatatttattgagtgaatgaatgagtgagtgaatgaatgaatgagttaatgaatgagtgaatgaatgaatgaatgagtgaatgaacgcgggtatgggagtgtgtatgtaagcgttagatgtttatttttgggtgtgtgtggatgagggttagtgatagttgggacgaaaatggtatagattttgagtgagatttgagttttaatttttaagtaagtaaatggtttattgaattgttttttagggttgatttagttttttttagagtgatattaagattgttagttttgttaggaaggggatttgggataaagaggtgaggagggggtagtatgtttagggataggttgaggttttttttttttattttttttagagtttgggaggtttagagtttttggagtttatttaaggttatgagtttatgagtggcgggttttagttttaggtagtttgttgtagtttgtgttttttagtaggttagggttgtattaatttatttttgtttgagtttagggttagtttatggttcggatttgattttttgggggtgagggttgaggtttggtagatgaaagttaagatatgttgggcgttaatttatttgtttgaagcgaagtttcgtttttgttgtttaagttggagtgtagtggtataatttcggtttattgtaatttttgttttttaggtttaagcgatttttttgttttagttttttaagtagttgggattataggtgtgcgttattacgtttggttaattttgtatttttagtagagaaggggtattattttgttggttaggttggttttgaatttttgagtttaggagatttatttattttagttttttaaagtgttgggattataggtatgagttattgtgtttggttttttttttttttttttttttttttaaagatagggtttttatttgttatttaggttggagtgtagttgtttggttataatttattgtagtttttaatttttgggtttaagtagtttttttgttttggtttttttagtaggttgggattataggtatatgttatcgtatttggtttgtttttgtttttattatttagtgtatttattatttaagaggtgtagggtttattttatttgttttgaaagatttgtttggtaagtgttttattttttttttttttttttttttttttgagatagagtttttttttgttttttaggttggtatgtagtggtatgatttcggtttattgtaatttttatttttcgggtataagtaatttttttgttttagttttttaaatagttgggattataggcgtgtattattacgttcggttaattttttgtatttttatagtgatggggttttattaaattgtttaggttggtttcgaatttttgattttaagtgatttgttcgtttcgattttttaaagcgttgggattataggagtgagttattgtattcggtttttatttttttatagagaagaaagtttatattattcgtcggtatttgttttttttggtttttattgttttttatttttattttgaggtttttagttttgggtgtgaacggttttgttagttttttttatgatgatttttatttgtatattttggatttttttatgaagagagataggtatttgtaataggatttatttagtaatgataaggatttgttttatagggcgatatagtggaattttttagatatattattgacggaaggaaggtaggtatagagtatatgttttggaggatgttatttatacgaggtttgaaaattgtttaagttaggttgtggtgttggaagttagggtgatttttggaatgatggtggggatagtggtgataggagagagcgggaggtggtgggcgatgtttgttttttttttagatagatgttagttttataagtggggttaggtgcggtggtttatgtttgtaattttagtattttgggaggtcgaggtaggtggattatttgaggttaggggttcgagattagcgtggttaatatggtgaaaattcgtttttattaaaaatataaaattagttaggcgtggtggtatatgtttgtaattttagttatttaggaggttgaggtaggagaattcgtttgtatttgggaggtagaagttgcggcgagttgagattgtattattgtattttagtttgggtaataaggataaaattttattttaaaataaaataaaataaaataaaataaaataaaataaataaaataattagttgggtatggtggtatgtgttagtagttttagttatttgggaggaggttgaggtagaaggattttttgagtttaggagtttaaggttgtagttagataagtttaaggttattggtagggtggtttcgtagtttaggtattgggtttattcgttgaaagttgtgtgtttttttgtaatttttttattaatattttttttttgatatttaatttgttttttattttttttgttaaatgttttttcgaaaggtttagtacggtagttaggtatggtggtttatagttttaattttagaattttgggaggttacggtgggcggattatttgaggttaggagtttaagattagttggtttaatatggtgaaatttagtttttattaaaaatataaaaattagttgggtatggtggtatatatttgtaattttagttatttcggagggtaagataggagaattatttgaattagggaggtggaggttgtagtgagtcgagattttgttattgtattttagtttgggaagtagagtgagattttgttttaggaaaaaaaaaaaaaaaaggtttagtatagaggttagatttgtagcggtgtttttttgggtatgtcgaggtagggtagaggaaggttttagtggggttggttgtaagtagagaattttgtgggttttcggtatttttttttttttttttagcggtttttttatatttgcgtaattgtttggttaagggtatttgttttgtggatattttgagtttttggttgtgattttttaattttttttttgtggttttttaagattttgttatgtttttttaaagtgttttgtagataggaggtatttagtaagtttgttggatgagtagaggtaggaagcgttttgaatttgagtttgattttgtaatgatttttgtaagtaggtttatagtttttttttaggatgatataggattttttttattttttatttattattattattattattttttttttttgtagagacggggtttcgagatgttgttcggtttggttttaagttttagtattaagtggtttttttattttagttttttaaaatgttgggattataggtataagttattgtgtttggttaggatttaatttaatgtatggatgaaataaggtattaaataatttttttaattaaaaaaaaaaagataggtgtagtggtttatgtttgtaattttagtattttgggaggttaaggtgggtgggttatttgaggttaggagttcgggattagtttggttaatacggtgaaatcgggtttttattaaaaataaaaaaattagttaggtatggcgttgtaagtttataattttagttatttgggaggttgaggtagaagaatcgtttgaatttgggaggtagaggttgtagtgagtcgagattatattattgtattttaggttgggtaatagagtagatttggttttaaaaaataaataaataaaataaaataaaataaagttaagg

SEQ ID NO: 1303 - DNA, 5518 bp, Artificial Sequence
  chemically treated genomic DNA (Homo sapiens)
ttaattaatagaatatggtaaaggtgaagggatttttgtagagatgattaatatttttaagtagttggttttaaattaattaaaagggagaatattttgggtgggtttggtttaattaggtgatttttttaaaagaaggtttagaggtaagagatttaatgaagtagagattttttttgtttttattgttggttttgaagaaggaagtttttatgaattttatagttatagatgaattttattaataaattaagggagtttggtagtagatgttgttaagtttttagatgagaaagtagtttagataatatttcgagtttagttttgtgagattttgagtatagggtttaattaagtcgtgtttagatttttgatttatgaaaattgtgatatagtatatgtgtgttattttaagttattaagtttgtggtaatttgttatgtagtaacggaaaattaatttaacgatagattagataggattaatttgtttttttggagaaagacgattttaagttttgaggtttttaatagtattgttgaataataggatttttgttgatttttttgtattttttatgtgagatttaggttaagtttatatttaataaatgaggttttttttttgttttttttagggttttttgttttgtatttaatgaaattatttatttaatgttagagttgagggtaaaaaagtgtatttttttttttattagtttaaatgtattttattttatgtaattaatatgatattgataaattttataaaattatatttttttaagtaggatttagtttttttattttttagtttatttaattaattagttaatgattacggagtagttattacgtgttaaatatggcgaaagattgaaggatagtggagagttggttttattttttgaggagtttaagaaagaagttttatgtattagaaaaagttaaagagtgatagaatattaaaatttaaatgtaggaatgaaaaagtattttttgagtgtttaggaataatgagttttattttgattttataggttttttttttagaaaaaaaaggagggttttgggagtgtttttggtttttagttgaataaatatatgtaatagtagtttgtagtgttaattaattatatgtaaattttgtttattcggaattttggaataattttgaaaatatcgagatgaaattgagttatttaattaatgttttaataaattttatttaataagtaatgtttattgaatatttgttatatgttaagttttgtattagatatcgagaatttagtggtgtgtgtgttagaatattttaaattataattaatagaaaatttgatatgaatgatttaaataataaataaatttattatttaattaaataagaaattttaaggtagattagttttagatttgtagaaaacgttatttttattttttaagagatggagttttgtttagttatttaggttggaatgtagtggcgtgattattatttattgtagtttttgaagttttgagtttaaataatttttttattttagttttttgagaagttggggttataggtatgtgttattatgtttggttaatttttagtgtttagtgtttttttgtagagatggggtttggttttattgtttaggttggtttttaatttttgattttaagggatttttttatttaagtgttgggattatagatgtgagttattgtgtttagttagatttgtagaaaatagataatgtaatatattttattagtataattaagtatttgagttttttgtaattttttattttttttttttttagataatggtttgtttttagttgtttttttttatgattataagatagttgttatattttagatatattttataatgttgtttagtagagaaataagtgttgtttttttttatgtgttttattttttattattggggaagaaattttttttagaaatttttagtagatttttttttttgaagcgtatggttttaggaaattggaggtttgaatagaattggggttttattaaaaggaggaaggcgaatgaatagtggttgaatagatcgtttattaatagtattaagtaatgattaaatagattgtttttgtattgagggatagaaataatgttatagatgatatataattataaattgtaataaatatatgattagagagaatcgtgtatatagtaagtttatggatttagaaaggttatttattgaggaagtgaaagatgagtaggaattagttaggtaggtttgggggaagagtgttatacgggcggaggaagaggttggtttatatgaaattatgaaaggaggtttgtgtagttggagtttttgggagaggaggaggggaaatgatttggaatgggtatagggtagtaggtagggggttttttgtagtatgggaaggagttcgggttatattttgagagtagtgtaaagttatggaaggtgtaaaaataggggttatgaagtgatttgatttgtgtttttaaaagtttaatttggatggagaggtaaagaaatgttaaaagattattatgtttatttgggagttgatagtggtttggtttgagtggtgataggagaaggggagggaaagtggatgaaatggagtatgaatggttttgttagtgttttgggggatataaatatgggttagtttaggatttttttttgaggtatattatttgaggtgttaagattatttgaggtgttaagatttgtatgtatatatattggtgaagagtgattaagggttatatgggaggtgcggagaaggagatgtaggagtttagaaggcgagattatgggtttgagcgtttttaggtaggattgattttagggtagtgtgttaaggagagtgttattttagtaggttttcgaaggttatgtaaggtgggtttgaaggtgtagatatgggagagggtagtttagaaagaggaattagtataagtcgtatagatgtaggaatgaaggtatagcgggagaagagtaagtagtagagtttgtatgggattgtgaaggaaagttttggggataaggttagaaaagttttggtagttagattaaggagagttttgagtgttagggtgggataataggagggtaaaaatattttttaaaaatgaagtttaatttagttataaatttatttggtttttttaggaataattaatgtgttatttaagttttgattatttatttattagatggaatagtaatatttttttttgttattattgttatttgtaggttatttattaatgatttttaattttttttagaatgtatttttttattatgtattgagtatttgtgttagagattttagaatgaaaaggtatggttttaatttttaaggagtttatgaattgagtagataaagagataaattgtagtaagtatgatgtaagtttttgggtaaaggtggtataaaggagaggaaaatttttttattattcggagttgggggttagatttagtatagttggtgatatttaaattgggttttgaaagatgagtaggagtttgttaggtaaagaagcgagttgggaaggttttgtaaatataggaaaataatttggataaagatatatatgtttttttaatttttatatttttaattttataagtattgtggagtatatatttttaagttttatttttaggtttttaggggaagtttggtgataatgagtgagtttttttagttgttataaaataagagtttgtatttaagtatttgatttttataaatatgtattttatttaaaaagaagtttggattttagtaagttaaattggttatattttttatttttagttatttttttgggaggttttattgatttttatttttttggaaaagtaaggaaagaatttttaaatttgtttttttagagattagtaaatttattagttattagtgtaggatttttatttttttaattttttattggaagatgggagaagttataatttattgttatgtggtttttaattttgatatttgtaggaaattggttttttttgaattttatgaatgtttataaaagttatttcggttgggtacggtggtttatttttgtaattttagtattttgaggggaggtcgaggaggtcgaattatttgaggttaggagttcgagattattagtttggttaatatggtgaaattttatttttattaaaaatataaaaattagtagggcgtggtggtaggtttttgtaattttagttatttaggaggttgaggtaggagaattgtttgaatttaggaggtagaggttgtaatgagttgagatcgtgttattgtattttagtttgggtaataagagtgaaatttcgttttaaaaaaaaaaaaaaaaagttattttaggtttagattagatggatttttaaagattattttgttttaaaaatttgttaatgataattttagtttaagataaatattaatatattaatatagtttatgggattataaaaaagtgagtaaggaatttatttaagattggaaagaattatttttttatttgatatttttatttaataagggtgtggaaattaaggtttagtgatataggattttttttttattattttgtaagttaggaatttttggttggtgatattttgtttaggttttagtgggttatattatttgttgtaggagatggtttgtttattcggtttgggtggggagttttattgagtgatgaaaatagtttttagtggagaggggatgtaggggtggtttttttatttaaaggtaggaaagtttttttagtgtaggtgagtttggggtttttatgggtttagaataggggaggggtaggatataggtagtattggaaaaggtaatatttaattggttaaaaggtattagttagaaataattaattgggaaagagtagataaataggaatagaagtttttattttaggttacgggttttatttgggattagtagtttagttttttagtttttaggttgtttttggtttgaaggtggggttttattagggatttgtttttatttgtttaggtatttggttgttttttgttattattattagggaggtgtttttatttgttaaggttattttggttttagaagtagagttttggttagaagttgttatagaataggggtgggagagagaagaggagttgggtgatagagtagaagtattttggggaattgattttttaggtagtagttgatgtatttttttttttttttatattttatttttattcgttttttttttttttgttgtttttttttttttttttatggtagggttatgagttagttgttaaaaggtggggatattttttgatgtatttgtaatattgagaagttattttaagggaggttgggttttattttatttatttggtttagaaagtgaatattttgggggttattaaggtagttttgttaggggagacgttttaatttgttttttttttgttttttggtagt

SEQ ID NO: 1304 - DNA, 5518 bp, Artificial Sequence
  chemically treated genomic DNA (Homo sapiens)
gttgttaggagatagagagaagataggttggagcgttttttttagtagggttgttttagtggtttttaaggtgtttattttttgggttagatgagtagaatggggtttagttttttttaagataattttttagtgttgtaaatgtattaggaaatgtttttattttttggtaattgatttataattttattatgagagagaaaaggaaagtagtagagagagagagggcgagtaggggtggagtgtggaggagagaggaagtatattagttgttgtttgaaggattagttttttaaaatgtttttgttttgttatttagtttttttttttttttttatttttgttttgtggtagtttttggttaaagttttgtttttagagttagggtaattttggtaggtagaggtatttttttggtgataatgataggaggtagttaaatgtttaggtagataggggtaggtttttggtgaaattttatttttaagttaaaaatagtttgaaggttgaaagattaggttattggttttaaatgaaattcgtgatttagagtgagaatttttgtttttgtttgtttgtttttttttaattaattatttttgattaatgttttttaattaattgaatgttgttttttttagtattatttatgttttgttttttttttattttgagtttataaaagttttagatttatttgtattggggggatttttttgtttttgggtaggggaattatttttgtattttttttttattgaaagttgtttttattatttaataaaattttttatttaggtcgagtgggtaggttattttttgtagtaggtagtgtggtttattgaggtttgggtagggtgttattagttagaggtttttggtttataaagtgatggagaaaaaattttgtgttattgggttttgatttttatatttttgttaaatgggagtgttagatgagaggataattttttttagttttgaatgaattttttgtttatttttttgtaattttataggttgtattaatatgttagtgtttattttgagttgaaattattattaataaatttttgagataggataatttttggagatttatttgatttgggtttgaaataattttttttttttttttttgagacggagttttatttttgttgtttaggttggaatgtagtgatacgattttagtttattgtaatttttgttttttgggtttaagtaatttttttgttttagttttttgagtagttgggattataggagtttgttattacgttttgttaatttttgtatttttagtagagatggggttttattatgttggttaggttgatggtttcgaatttttgattttagatgattcggttttttcggtttttttttaaagtgttgggattataggagtgagttatcgtgtttagtcgaaataatttttatgaatatttatgaagtttagaggggattaattttttgtaaatgttaaaattgggagttatatgatagtgaattatgattttttttattttttagtgaaaaattgaagagatgaaagttttgtattgatgattaatggatttattagtttttgaaaaaatagatttaagagttttttttttgtttttttagaaaagtaaaaattagtaaaattttttagaggaataattgggggtaaagggtatagttaatttggtttgttaaaatttaggtttttttttaggtaaaatgtatgtttatgggggttaaatatttagatgtaaatttttgttttgtagtaattgaaagaatttatttattattattaagttttttttaaaagtttgaaaataaaatttaaaaatgtatattttatagtgtttgtaggattgaaggtgtgagaattaagaagatatgtgtgtttttgtttagattgtttttttgtgtttataaggtttttttagttcgtttttttgtttggtaaatttttatttattttttaaagtttagtttaaatgttattaattgtgttaaatttagtttttaatttcgggtagtaggagaattttttttttttttgtattatttttatttaaaaatttgtattatatttattgtaatttatttttttatttgtttaatttatgggttttttggaagttgggattatgtttttttattttaggatttttagtatagatatttaatatatgatgaagggatatattttaaaagaaattagaaattattggtaaatgatttgtaggtagtagtgatggtagaaagaggtattgttattttatttagtgaataaataattaggatttgaatagtatattaattatttttgagaaaattaaatggatttgtagttaaattagattttatttttaaaaaatgtttttgtttttttattattttattttgatatttagaattttttttaatttgattgttaagatttttttagttttatttttagaatttttttttataattttatataaattttgttgtttatttttttttcgttatgtttttatttttgtatttgtgcgatttgtgttagtttttttttttaggttgtttttttttatgtttgtatttttaaatttattttgtatagttttcgaaggtttgttaaaatagtattttttttaatatattgttttgaaattagttttgtttgaaagcgtttaaatttatgatttcgttttttgaatttttgtattttttttttcgtattttttatgtggtttttaattattttttattaatgtatgtgtatgtaagttttagtattttagatagttttagtattttaaatagtgtgttttaggaggaagttttgggttaatttatgtttgtattttttagggtattagtaaagttatttatgttttattttatttatttttttttttttttttttgttattatttaggttaagttattattaatttttaggtgaatatgatagttttttaatatttttttgtttttttatttagattgagtttttaaaaatataagttagattattttatggtttttgtttttatattttttatggttttgtattgtttttaggatataattcgaatttttttttatgttgtaggaagttttttgtttgttgttttgtgtttattttaggttatttttttttttttttttttaagaattttagttatataggtttttttttatggttttatatgagttagttttttttttcgttcgtgtaatattttttttttaagtttgtttggttagtttttatttattttttatttttttaatgagtggtttttttagatttatgaatttgttatgtgtacggttttttttgattatgtatttgttatagtttgtaattgtatgttatttgtgatattgtttttgttttttaatgtaggggtagtttatttagttattatttggtgttgttagtagacggtttgtttagttattgtttattcgtttttttttttttggtagaattttagttttgtttaagtttttagttttttgaagttatgcgttttaggagggaaagtttgttaagaatttttgggaaagattttttttttagtgataaaaaataaaatatatgagaagaaatagtatttgtttttttattagatagtattgtgagatgtgtttggaatatggtagttgttttataattatgaggggagataattaagaataagttattgtttgaaagaaaagagaatggaaaattataaagagtttagatgtttagttatgttgatgagatgtgttgtattatttgttttttgtaaatttggttgggtataatggtttatatttgtaattttaatatttaggtgggaagattttttgaggttaggagttagagattagtttgggtaatgaagttagattttatttttatagaaaaatattaaatattaaaaattagttaggtatggtggtatatgtttgtagttttagttttttaggaggttaaggtgggaggattatttgagtttaggattttaaaggttgtagtgagtgatgattacgttattgtattttagtttaggtgattgagtaagattttattttttaaaagataaaaataacgttttttataagtttgaaattgatttattttggaattttttgtttggttagataataagtttgtttattgtttaagttatttatattaagttttttattagttatggtttaaaatgttttgatatatatattattggattttcggtatttagtatagggtttggtatatagtaggtgtttaataaatattatttgttaaataaaatttgttgaggtattggttgggtaatttagttttatttcgatgtttttaaaattattttaaaatttcgaataagtaagatttgtatatgattggttaatattataaattattgttgtatgtatttatttagttggaagttaagaatatttttaagattttttttttttttttgaggaagaagtttgtaaaattaaaataaaatttattatttttgggtatttaggaaatatttttttatttttatatttagattttagtgttttattattttttaattttttttggtatatgagattttttttttaagttttttaaaggatagagttaattttttattgttttttagtttttcgttatgtttagtacgtagtagttgtttcgtgattattggttaattaattaaatgaattgaaaaatgagaaaattgaattttatttggaaaaatataattttgtaaagtttgttagtattatgttagttgtataaagtgaggtatatttagattagtagggaaaagaatgtatttttttgtttttaattttaatattgagtagatagttttattgagtataagataggaaattttgaaggaggtagggaggagattttatttattagatataaatttggtttggattttatatgaaggatatagaaaagttaataggggttttgttgtttagtaatgttattgaaagttttagggtttgaaatcgtttttttttaggaaggtaagttagttttgtttaatttgtcgttgggttggtttttcgttgttgtatgataaattattataaatttaatggtttaaaataatatatatgtattatgttatagtttttatgggttaggagtttgggtacggtttagttgggttttgtgtttagggttttataaggttgagttcgaggtgttatttaggttgtttttttatttggagatttgatagtatttgttgttaagtttttttggtttgttggtggaatttatttgtagttatagaatttatgaaagtttttttttttaaggttagtaatggaggtagagagaatttttgttttattaagttttttatttttagatttttttttaaaggagttatttgattaggttaggtttatttagaatatttttttttttgattaatttaaagttaattgtttagggatgttaattatttttgtaaaaatttttttatttttgttatgttttattgattaa

SEQ ID NO: 1305 - DNA, 8030 bp, Artificial Sequence
  chemically treated genomic DNA (Homo sapiens)
tgatgtgaggtttaaattttattttgtcggttattaagtaagtcgttttggtttatttttttaatttcgtaaagtttgggtttttttatttttcggtggggataagaatattattattttatgggggttggtgtgaggattaggtaataataattagagttaatatggattaagttaggttgtgggttaggtattgtattaagggttttgtaaatgttagttttcgtgttttttttggtaattttacggtgtaggggtggttatatagttaatttttagagtgatttggttgttatcgtatttatgatggtggagaggagatttaggatttttagtttttgggggaagttttttttgagtgtagtttagattttggttgatagggttgtttggagaggttgtttgagttagtaggttgcgcgttttgtttggttagttgtaatttgattttcgatttggtcgggtttttttagtgcggtttatagtatttaattttttttaggtggcgttgcggagcggggattcggttgttgatcgcggcgttttttggcggtttgttttcgttaatatttagattaagcgtagagtcggtttcgttagggaagtgcgcgtttcggtgttttcgcgtgatgagagcggatgatagattgcgggaaaaagttagaatgtaacgttagttgtatgatagagaggattaagttgtgtagtagagggagatagaaaagggagggattaagttatagtaaggaatgatcgttaataatattaacgtttagaatttattgattatttgttatgcgcgagttattgttttaaatatttggtatttatttttttagttaatatatttttagtaagtgcgtgttttaagaatagtgtttgtgttttatttagggtttagtatatagtgggtgtttggtatatagtaggtttttaatatatttggaaatgaataatataataattttgtaatttttttttttaattaataatgtagaggtaaatattatttttatttagaaaattgaataatggtcggagagtttgtataattaatgcgtgatatagcgagggtatacgaggtttagatttagtttagtcgtgtgttagggttttttagagaagagaagattttttgtttttagggagtttgttgtttaattggttacgtttatattttttttgtttgggtggtatgttagggatggttatttatggtttagggaggaggtttagtgaagttttttttataaattataaagggagatatatgtgggttaagattggggaatttagtgtgtgagggatttttaggaattttatattgtttaattagggatttttttttttttattttggagagtggttgatgtaggtagtggggatttgttgagtatttataatgagtttttaagggtattttttggttttgtagaagaggtttattttttttttattatagagttttagtttttatggttggagtttttagttttagtcgttggttgtttaaaggagagtttttttatgtttaaaatgggggttatggtttattttgtatattttagtatttgtatgaggaaggattgaaaagtgttgtgtatttttgtgattcgtatatttagtttttatttaggttttggggattttttaggtatggttttggtgtattagatttttttttggagatgtgattatgaatgggtattagtaagtggtgttatgtagagatgtttttttttgaatggtttttggtatttgttttttgagtttttgagaatatatatattttttggtattttatggtttttattattgttaggttgttattgaattgtcgtttgtatttggttgtttttggtaattttttttttttttttaatttattgttttaagtttttgagttggtaggaagagaggattaggttttttttatattttttttgtgaataaaatatgttagtgttaatgtatagattttgagttattaattttaattatttaatggtttttttttttttttggtttatttataggttgtgggatgtggaggttattaaaaattaggtttttataagtgagaggttattttaggtatttttttgtatttatttaaaaaagattttatttatatttgtttaatggaacgtgtgaagagtttggttttttttttaggttatttttttgttttattttttttttgtagtaggagtagtaagagttcggttttggagtgggagtagaaggtataggtattgttgtagcggtaggataggagtttattgttgatagagtgtttggttttaaattatattgtattagagttcgggtataaaattggtagtagcgttttgtgtatgaggagatagagaaatatttgtatttagtagaattacgggtagggatagaagaaaaggagagaaagaggggaggaggggaagagttggttcgtcgcgggtttttttttggatatttttgttttttaggtgtagaggtggttttttagtggttgagttagggttataggaggttttttggggggttgggggggtcggggtttggagggtaagttatgaaaatatttgggaaggtaaatttgagggtttaatttatttgaaatatatatatatagatatatatattgaaaacgattaaaaaaggaataagaaatgtttatgtgtttaggtatttttatatagttttttattaatttttattataattttattaggtaagattgttttatagattggtgaagaagaaaggtttaaaaaggatatgttattttgtttgagtttatttattataaatgtatttgtgtttatatttatttgttatcgattgtaatttaaatatttaaatatatttttttatagttataatgttattattatatatattatatggttttttatagatataatataaatgtatttatatttgtttatgcgagttgtatgtgtttatatataaatatgtgtttttaattataggtatatattatatatatagtttatataattatttataaattttgtattatgtttgtttgttaaaattgttttgttattttttgttttttttgattaattgtaggttaatgtttttttttttttttagttatggttgtgtgtttgtatttgttggtatttatagatatttgtattaataattttgttttgtgttttattttattttttagtttgggagtttcgagatattagtaatttattagatttattgtttgtattatttttagttttttgggtgtgaattttttatgatgtggaggttttgagttgttttttatagtttacgatttgtagttttggtttgtgagttgatagagtaggttttgtagagttattgattttaagttgtttttatataatgttttagtttaggatttttgtattacgtgggtagtttatatcggggttttatattagtgtagagggtaggtttgaggttgatttggtatatacgttttttgttttatttatggattgtgagaggattttagtttttgtcgtgattttaggttgatggttgagaaattttgtttttataattagttttgatatttattttatattgagaatttagatttgattttttgttaatagtaggatttgtggtttgtatttagttttagatttggtattaaaattttagtttaataatgtatatttaattttggtttttttatgggttgttggttacgtttttttttttttggtatagatttttgatttttttttttgattttatttaaaaattatgtttttttgttttttttagttgggatttgtatgtttaaagtagtttaaaataattttttgttttgtatgtatgaatacgagtgtgtgagcgtgtgtagttggtagggagttattgggtgtggttgtgttaatgatttttgtggatttttttttagagaagtttttttagaattaaatatttatatttgttaggagttgtagttattgattggtagcgttttatttatttattgaatattggttgagtatttgtaatgtgttaggtacgttgttagttaaggaggtagttattaaatatatagataaataaataaatgtgagatgataatagttatgagtgttttgtagtagacgtgtagggatttgtgagagaatgtagtagggagggttttaatttagggtgtgtggttagggaaggtttcgttaaagatgtagtttttaagttgagatgtaaaggaggtagtgaagagttttttttagtagagggaatattatgagtataggttttggggcggacgttttagaatattttagaaacggaaaggaggttagtgagaaaaagggagtttaggagtagaggttggggaaggttgtagggttttaggggtattggaggtaggtagggtaaggattttggattttattttgagtatagggtgatggggtaggagagtttaagtagggagggtgaaatttattttgattggtagttttgtgaaagaggattggttgggtatggagatttaaggatgaggaaaggatattttagagtgttagggcgcgtaaattaaattttatattttaggaagatagaggttagaggaattaggagggttttttggaggaggtggtatttattttgggtttaagagattataggaaaatggaggttagtattttaggtttggggaagagtttgggtaaaggtttggtagtaagagaataaaggtggggtttgatgggttagaggataagtgattttttaaggttataagatattttgatggttgggattttatttttgatggagtaaggtttttgatatttaattgaggtttggcgttaaggattgatattaaggaagtggatttttgtaaatttggtattcgagggtttatttttttaatttttgtgtagttgggaggtgaggtaagaggaagtgtgggttataggttaggtttagagagtttggaggaggagtttttgttagattggagagaagtaggtttgagtttttttaaaggtagtttttggggatttttaggattataggttgagacgagacgtagggtggttggaggaagtgagaggtgaatttagtttgggattggttgggcgagattttttatttgttttttgggattatcgtttattatggttgtggtttagtagttgcgggtcgagaggtgagtgtcggggtgtggtcgttttcgggtttttttattgttttttataggttttagggataaaggttagtttttttgtagtttttgattaatatgagaggttggggttgagttagaatttaaatatttagaaatgtaattttttagaattgttttaacgaaattttgagttgtggtttattatttttagatataaatgagaatattgaggttttaagagtgggagtgatttgtttacggttatataacgagtgatcggtagtgtttggagaggaatgtaggtgttttgggttttaggttggggttttttgttttatatggtgattagtaatgattttttattttttgcgtaaatagaatttatagaatttggtttgttttttcgttaattagggtttgttttaaatgttattttttttaagaagtttttttgatagtttttattttattgttgtttgattttttgttttattttttttttttgtttggtttttatattataggaataatattatatgtttatttattatttttttttgaacgttggtttttttatgagaagtaagttttacgaggttgtgttcgttttgatcgttgttgtattattaggaggtagtttatttttattgagtattaggattaagggtttaataaatgttgttgaatgaatgaataaatgaatgaatgaatgggtggatttttgagacggaaaaggttttagatttttttagtttaattttgttattgtatagattggaaatttgaggtttagggaggataagagatttatttagggttatagagagtgattggtaaggttggggtttggagtacggttttattagtatttagtttcgtcgtttgggaagtatttttagaatttttttttagtagttaggtttgagttttaagttgcgggggttttgaggacgtaaagtttggtttttgtattttttggattggaatagtaggtgatttttgttatttacgtggaggttatttagggggttattagagataggttaggttggtgtgtgtttacgcggggaatagaaggtttatgttggggtttggggttggaagtagaatttgaagcgtgggttggggtaagggtagtagaagtaaatgtttataggggagtttacgtggtttttttgagttttagagcggggtgtaggagttgggtaaggttggtcgatttgaatttttttttttttttatatgtttttgggggatttagtcgtacgtaaattcgaatttttcggaagtagtagttgtttgaggtttgggtattttttgttttttggggtatagggtttaggggatgatacggagagttgattagtaggattgtgtatttttttttttattttttgtttttttttagttgttttagtttttagagggggagggattgttttttatgaggttttgagttaggtattaggggtatgggggttttttgtatttcgaaggttttatttgaaagcgagtttggattgttttgtttaaggttaaagtagagagtataaggagagggcgtaggttcgcgtagcggggattttttagaattttaaggtgagatatttaaagatggggagggttgttttaggggtggtaagttcggttttaatagatatgttttgagtatttattatgtgttaggtgttagaaaatttgttttggttgttttttaagggtttttttaatttcggttttttttagggtaggttttaaaattttttttaggttaggttttaaagtttgtgaattgtgcgagtgtgttttgagttagaatatttcggtttagtagggtttgggtgaggtttttaagggagcggatattttaggggattttcggttgggtttgttgttttttttgttcgttttataggtagttaggttatttttatgttgtttattaaaaaattttataattgtagacgacggtagtggtcgtgtattgagtagtattgagtatttattgtatgtcgggttttgttttgggtattgggatgtagggtgagtagagtttttgtttttatggagattttagggttgtgtttgttatagatgggattgtatgattattcggagatataagtattttttttgtttttattttatagaggagggaaggagcggagtatagttaggaatttttttaagggagtttgatttttttgtttttagtgttgcgtttatgtttcgagtatttgttaatgtttgttttgtttgattttttttttagtttttattattttagggaaaattcgaggtttttttgcgaggtattaaggtatttcgtgagcgggttttgtttgttttttcgattggttttttattacgttttattttttgttttgtgttttagttatgtttagtaatttgcggttttttgaattgagtagttttatttagggtatatgttgattttgtttatatttgtgatttagggtttaggatagggtttggtatggagatgtttgatgttttatttttaggtgaatttgtgtaattgatagtaatgtgttagattataatttggttattgttatatggttattagttttttatttttatatttaatatggttattagttttttatttttgtatttagtatggtcgttagttttttatttttgtatttaaggtttgggttgtgttttgttattttcgtatttttagggttagtggttggatttggtttgggaaggggtgttgagagacgaatgttggttttataatattagtttgttttgtattttattttatattcggtgggtttataaaatatattagggtgataagtaggatttttttttttttttttcgtatagt

SEQ ID NO: 1306 - DNA, 8030 bp, Artificial Sequence
  chemically treated genomic DNA (Homo sapiens)
attgtgcgaaggaggggaaaagagattttgtttattattttgatgtgttttgtgggtttatcgggtatgaggtagagtgtaaagtaaattaatgttgtgaagttaatattcgttttttagtatttttttttaggttaggtttagttattgattttgggaatacggagataataagatatagtttaggttttgagtgtaggaatgggaagttggcggttatattgagtgtaggaatgggaagttggtggttatattgagtgtaggaatgggaagttggtgattatatagtaatagttaaattatagtttaatatattgttgttaattgtatagatttatttgggaataaggtattaaatatttttatattaggttttgttttaggttttgggttatagatgtaaataaagttaatatgtgttttggatggagttgtttagtttagggaatcgtaggttgttgagtatggttggagtatagagtaggaggtggaacgtgatgagagattagtcggagagataggtagggttcgtttacgaggtgttttgatgtttcgtagagggatttcgagttttttttggggtggtgggggttgaggaaggagttaagtaggatagatattggtagatgttcgaggtataggcgtagtattggggataagaagattaagtttttttgggaagatttttagttgtgtttcgtttttttttttttttgtaaaatggggataggagaagtatttatgttttcgggtggttatgtagttttatttgtaataaatatagttttaaaatttttatgagggtaaggattttgtttattttatattttagtgtttagaatagagttcggtatatagtaggtgtttagtattgtttaatatacggttattatcgtcgtttgtaattatagagttttttgatgggtagtatgagaatggtttggttgtttgtggggcgggtaagaagagtagtaaatttaatcggaagttttttggaatattcgtttttttggggattttatttaggttttattgggtcgggatgttttggtttaagatatattcgtatagtttatagattttggagtttggtttgggggaggttttggagtttgttttgggggaggtcgaggttggaagaatttttggagggtagttagggtaggttttttggtatttggtatatagtaggtgtttaaaatatgtttgttggaatcgaatttgttatttttaaggtagttttttttatttttggatgttttattttggggttttagaaagttttcgttgcgcgaatttgcgttttttttttgtattttttgttttgattttaagtagaataatttaggttcgtttttagataagattttcgaggtatagggagtttttatgtttttagtatttggtttaaggttttatgaaaagtagtttttttttttttgagggttaaggtagttgaaaggggatagggagtgggggagggagtgtatagttttgttggttagtttttcgtgttattttttgaattttgtattttagaaagtaggaagtgtttaagttttaaatagttgttgttttcggaagattcgagtttgcgtgcggttgggttttttaggagtatgtgaggggaggaaggaatttaggtcggttagttttatttagtttttgtatttcgttttgaggtttaggaaggttacgtggatttttttgtaggtatttgtttttgttgtttttgttttaatttacgttttaggttttatttttagttttaggttttaatatgggttttttgtttttcgcgtaggtatatattagtttggtttgtttttggtgattttttgagtggtttttacgtaggtaatagaggttatttgttgttttaatttagggggtgtaggggttaggttttgcgtttttagggttttcgtagtttagagtttagatttggttattgaggaaaaattttgaaaatgttttttaagcgacgaggttagatgttggtgaggtcgtgttttaagttttaattttgttagttattttttgtgattttgagtaagttttttattttttttgggttttagatttttaatttgtataatggtaaggttggattagaagaatttaagatttttttcgttttaaagatttatttatttatttatttatttatttatttatttagtaatatttattgagtttttggttttggtgtttaatagggatgagttattttttagtgatatagtagcgattaaaacggatatagtttcgtggagtttgttttttatgggggagttaacgtttaagaaaaaataataaatgagtatataatattatttttgtaatataagaattaggtagaaaagggaaatagggtaaagggttagatagtaatgaggtaggggttgttaggaaggttttttggaggaggtgatatttgaggtaagttttgattagcggaagaataagttagattttgtgaattttgtttgcgtagaagatggaaagttattgttgattattatgtgaagtaaagggttttagtttgggatttaggatatttgtatttttttttagatattgtcggttattcgttgtgtgatcgtgggtaagttatttttatttttggagttttagtgtttttatttgtgtttgagggtggtgagttatagtttaaagtttcgttaaagtagttttgagaggttgtatttttgagtatttgggttttgatttaattttagttttttatgttgattagggattgtagaaggattggtttttgtttttaaggtttatgaggagtagtgagaaggttcgggggcggttatatttcggtatttatttttcggttcgtagttgttgggttatagttatggtgggcgatggttttagggagtaggtggagagtttcgtttagttagttttaggttgagtttattttttattttttttagttattttgcgtttcgttttagtttgtggttttgggagtttttaggagttgtttttggggaggtttaggtttgtttttttttagtttggtagaggttttttttttaggttttttgggtttagtttgtggtttatatttttttttattttattttttagttgtatagaaattgaggaagtggattttcgggtgttaggtttgtaggaatttatttttttgatgttagtttttggcgttaagttttagttgggtattagaagttttgttttattagagatggggttttagttattagggtgttttgtgattttgaggagttatttattttttggtttattaagttttatttttatttttttattgttaagtttttgtttaaatttttttttaggtttagaatgttggtttttatttttttgtgattttttaggtttagagtaaatgttattttttttaggaagtttttttggtttttttggtttttgtttttttagagtgtgaagtttggtttgcgcgttttggtattttgggatattttttttttatttttagatttttatgtttagttaatttttttttatagggttgttaattagagtgagttttattttttttgtttaaatttttttgttttattattttgtgtttaggataaagtttagagtttttgttttgtttgtttttaatgtttttgaggttttgtagttttttttagtttttgtttttgagtttttttttttttattggtttttttttcgtttttagaatgttttaagacgttcgttttaaggtttatgtttatggtgttttttttgttggaaaaagttttttattgttttttttgtattttagtttagaagttatatttttagcgaggttttttttgattatatattttaaattaaggttttttttattatatttttttataggtttttgtacgtttattgtagagtatttataattattgttattttatatttgtttgtttatttgtatgtttaatgattgtttttttggttagtagcgtgtttggtatattgtaagtgtttaattaatatttagtgaatgaatgaaacgttgttagttagtgattgtagtttttaataggtatgggtatttgattttgaagggatttttttgagaagaggtttataggagttattggtatagttatatttagtaattttttgttagttatatacgtttatatattcgtatttatatatgtagagtagaaagttgttttaaattattttaaatatataagttttagttaaaaaaaataagaaagtataatttttaggtaggattaaagagaggggttaggaatttatattagggggagaggaacgtggttaatagtttatgggaaaattaagattggatatgtattgttgggttgagattttaatgttaaatttgggattaggtataggttataggttttgttgttagtagaaagttaaatttgagtttttagtgtaaagtgggtgttagaattgattatgggaatagagttttttagttattagtttagagttacggtaggagttgaggtttttttatagtttatgggtggaataagggacgtgtgtattagattagttttaagtttgttttttgtattggtgtaaggtttcgatataagttatttacgtggtgtagaaattttaagttgaggtattatataaaaatagtttggagttagtgattttgtagggtttattttgttaatttatagattaaaattataaatcgtgagttgtgaaagatagtttagagtttttatattatgaagaatttatatttaaagaattagaaataatataaataataagtttgatgagttgttggtgtttcggggtttttaggttagaggatgaaatgaaatatagagtagggttattagtgtaggtgtttgtaagtattaataggtgtaagtatatagttataattgagggaagaggaggatattggtttatagttggttaggaaggataggaagtggtaaaataattttagtaagtaagtatgatatagaatttgtaggtgattgtgtaaattgtgtgtgtagtatatgtttatagttggaaatatatatttgtgtataaatatatatagttcgtataggtaagtgtaagtgtatttgtgttgtgtttataaaagattatataatgtgtatagtggtggtattgtggttgtgagagaatgtgtttagatgtttaggttgtagtcggtgataaatgagtataaatataagtatatttataataggtgaatttaggtaagataatatgttttttttgaattttttttttttattaatttgtgaaatagttttgtttaatggagttgtagtaggaattaatagaaaattgtataaaagtgtttagatatatggatattttttattttttttttaatcgtttttagtgtgtatatttgtatgtgtgtgttttaggtgggttaagtttttaagtttatttttttaggtatttttatggtttgttttttaaatttcggtttttttaattttttaagaaattttttgtggttttgatttagttattgggaagttatttttgtatttgggggataaagatgtttagggaagagttcgcgacgggttagtttttttttttttttttttttttttttttttttttttgtttttgttcgtggttttgttgaatataggtatttttttgtttttttatatatagaacgttgttgttaattttatgttcgagttttgatatagtgtaatttgaggttaggtattttgttagtaatgggtttttgttttgtcgttgtagtaatgtttgtattttttatttttattttagaatcgggtttttgttgtttttgttgtagggggagaatgaggtagagggatgatttggaagaggagttaagttttttatacgttttattaaataagtatggatggaattttttttggataagtgtaaagaaatgtttgaagtgattttttatttatggagatttgatttttgataatttttatattttatagtttgtgaataaattaaaaaaagagaaaagttattgaatggttagaattgatagtttaaagtttatgtattgatattggtatattttatttatagaagaaatataaaaggagtttggttttttttttttgttaatttaagaatttgaagtagtgagttaggggaaggaagaaaattattaggggtagttaaatgtaagcgatagtttagtgatagtttgataatgataaagattatggaatattaaaaaatatatatgtttttaagaatttaaaaaataaatattagaggttatttagagaagggtatttttgtataatattatttattaatgtttatttataattatatttttaggaaaaagtttaatatattaagattatgtttgggggatttttagagtttgaatggggattggatgtgcgaattataaaagtgtatagtattttttagtttttttttatgtaggtgttggggtatataagataaattatagtttttattttggatatgaggaaatttttttttgagtagttagcggttggggttgagagttttagttataggaattggaattttgtgatagggaggaggtgagttttttttataggattaggagatatttttgagagtttattataggtatttagtaaatttttattgtttatattagttattttttagggtaagagaaggaaaatttttgattggatagtgtaagatttttggggattttttatatattgaattttttaattttgatttatatgtgtttttttttataatttatgaggggaattttattggattttttttttgagttataaatagttatttttggtatgttatttaggtagggagggtgtagacgtggttaattagatagtaaattttttgaaggtagagggtttttttttttttgagaagttttggtatacggttgagttgggtttaaatttcgtgtgttttcgttgtgttacgtattagttgtgtaaatttttcgattattgtttagttttttaaatggagataatatttgtttttatattattaattggagagaaaaattgtaggattattgtattatttatttttaaatgtgttgagaatttattatgtgttagatatttattgtgtgttaggttttaaatgaaatatagatattgtttttgagatacgtatttattagaggtgtgttaattaagggaatgaatattagatgtttaggatagtggttcgcgtatagtaggtggttaataaattttagacgttaatgttattgacgattattttttgttgtggtttggttttttttttttttgtttttttttgttgtatagtttggttttttttgttatataattaacgttatattttaattttttttcgtaatttgttattcgtttttattacgcgggggtatcgggacgcgtatttttttggcggaatcggttttgcgtttaatttaaatgttgacgggaatagatcgttagggggcgtcgcgattagtagtcgagttttcgtttcgtagcgttatttagaggaggttgaatgttataagtcgtattagaaggattcggttaagtcgagagttaagttgtagttggttaggtagagcgcgtagtttgttggtttagataatttttttagatagttttattagttagaatttgagttgtatttaggggaagttttttttaggggttaagaattttgaattttttttttattattataaatacggtaatagttaagttattttgagagttgattgtgtaattatttttatatcgtgaaattgttaggaggagtacgagagttagtatttgtaaagtttttagtatagtgtttggtttatagtttggtttggtttatgttggttttgattgttgttatttaatttttatattaatttttataaaatagtggtatttttatttttatcgggagataaggaaatttaggttttacgggattaggaaaataaattaaagcggtttgtttaatgatcggtagagtaagatttggattttatatta

SEQ ID NO: 1307 - DNA, 19653 bp, Artificial Sequence
  chemically treated genomic DNA (Homo sapiens)
ttgttttattggtgatagtttatttttttggttttttttttatttttttgattttttttttttagttttatttagtgtaggggagatttaggattttttttagtttattattttttttttagttagaatttgtttttgggtgattttaattaaatagttttaaatacgttttatagtttgataatttttaaatgtatagttttagttttgaaattggttttgaaatttagatttgtatattaatttattttttttattttttaatttcgatgttttataagaatgttaaattgaatttgttataaatggagttaatgtatatagcgttattttttattaaatttgtgttttttttattttattatggggtaggaattatttttgatttttttttttttttttaatttttacgtttaaggtagaggttaatatatttgaaatttgtttattttattttatttttattattttaattttggtgtaagttattatttttttttgtttaggagattttagtgattttttttttgttatattttgtttttttttatttttttatttgtatatgatttattttgatatatgagttagagtgagttttttgattgaagagatagataaagagtaaatttttttttttttttttttagatttttgaattttagtgtgatttttagagttttattagttatttggtatttacgaattgatttgttagaggaaaacggaagttaatagtgttgagtattatggaagtggaaggagtttgggtttttgatgatattatggagttattatattagttttagaattgtttagttttagattgagtattataaatgtttttatgttttaagttattgatatttaaggttttgttatttgtttttaatgtgtttttatggatatatttttatattataatcgtagaaattttgtttgttttatttaatgttagattttttgggatgaatatagttcgggtagttaggaggtatttaaagaaatttttttttttgtattttaaagtttattttaaattatttattatggttttgtgataatgatttttaaatggttatgttttttgaaaaagttttttttttataaaagaatatttgttgaatgaatgtatggatgaaagaaaatatttgtttgtatttttgttaggttatttatttttgtttttttgtttaatttttttttatatatataattttttttttaattgtttggtttgttattttatttttttttttttaattttatttggttttagattcgtggtttggttttattttgtttattatatttttttggtttacggtagtttaaatttaagtttaggtaaaatgtatggttgtaagttattgtaaaaatttatttgttttttagtttttattttgtgtcgttaaagtttagatttaatggcgtttttttggatgtattatttttttttattgtattttttgttttttttgtggtatttattatgttttattttgtagtgtttttataagtgaatattttttttttttttataatattataaatatttttaagaattggatttatgttttatttttatgtgtttttttaataaatagtagagcgttattatgtaggtgttgtttagggagtttttgttgaataggggtagtagagtatagtaggtaagttatggtttttggagataagaaagttaaagtttatatttattatttgtttgttgtgttaattataggtaagttatttaattttttagagttttagtttttttatttgtaaaatagagatattaatggtattttttttatagagttgttgtatatttttttgaaagagataatatatatagaatatttggtatagaggttgatagagcgtaaatattcgttaagtggttgttattattattaataggtatttttgaatgaatgaatattattatatttatggataatagaaattagtatttttatagaaaattataaattgtgttttatagattatgttggtatattgggattatataaatgtatatatattatggatttttttatatatttataaaggaattttttatttttgtaatattatagtagagattagagtagattgataatgaatttgaagttatttatttgtttgggaaagtaattatgaggaagtggagattgtgtttttatttgtatgttaatgatgttagtttgtttaaatttggaaaatgtaatatttaggttaggatttttagttgttaattttaaaaattatttttagttaattaaaggagaaaggaatttattggtaggattttggtgggggtggggatggggtgtagtttatagaattattaggaaagttggagttttaggtttataaaatggtggtaaatatagatgtaattaaagagacgaaattattgaggatgtcgttataggttttgtgtttttagattatttattgttatattgttggattttgtagttttttatattagttgttgtaatttttgggatttcgatttttgtggaattataaaatcggtatgttttggttattttttttagatggtttatttggtgaattaggtttggttatatttggtttttttagttgttttgaggaggggaggggaaatatttgtttttttaggttttgtagtaagaagtcgggttttgttttttatttgttttgggattatttatttttttaggggtgtttgaatgttaggtgatttttgtaaatatttattagggttattatgaaagagaaatttaatttgaaataggattagaaataaaaggttgagaagtgattttttgaaggattttttagttagttgatagatatttttttttgtaaattttttttttttttaatatatacgaaataatagtaggggtttttttatttttttggtaaagttaaagggagttttttttttttagtaatattaatgatggttagtaaagaaattatacgtggtatagtgatttttttaaaaagtatggtgatgagataaaaatagttgttgttgttagttttttattgataggtttagaaatgggttttttggagtttaatgtggggaggtaaagttttttttttgaatggggtagtagatggtatttttcgttatttttgataaaataacggttggaagaagtagtaggattttatttgggagagattttgttttttgtggttaagtagttaatgtgtttgtaatttttatattttttgtggtgtttttttagaagggtagattgtagaatgttggaaaattttgtttaggaattgggtagaatttatgtaattttgataatttgaaggcgaaagatggtagggtggagtggcgagtatatgttgagaaagttatagattattttttgggagaaatgagaaggtggacggatgttaagttttgatatttgaaaatgttggtggttaaagagtttatttttttttttaatttgatttataaaattaggttagaaaatgtatttttgattgtttttatggtttttatttagttataagttatttttttttttagattatttttagttttaaggtttaatttttatttgttttttgattttttgtttttaagatatttagttaatattattattagttaagtgttaggtttttttttaaggttttgaatttgttatttatttatgattttcgtaggtggattttgtttgtgattggttggtttaaggtagatagggtatttttttttttaagtggagtataagaaaagggatttttggtaataaaattgaaagttttaagatattttttgtaaatattagtgattggagtaaaggttttatggaaaagtaataaggtgaatgtaaatttattaatgaataataaatagtttgatatagagttgaataagatagttttagtattaataattatatgaagtttttaagaaaaatttttttttgagttttataatgtattattttttttacgaaatatatatattttaaatttttagtttaattttttattagtagtattaataaaataaattattttgggtttgatttatttgatataaaataattattaaatgttttttgtatttttttttaaaatttttgacggttttttgtgttaattttaagtttttaaagggtaagaattatgaaatatttgtttttgtagttttatagtttataatatagtatgatttagttgtaggtatttaatttatatatatagttatttttgttatttttttattagttgttgtgtaatgggttagttttatttattagttttttttttatatagtttaaggagttaaggaatatacgtttttattgtttttaaattagatttaaagttttattttaaatgatgtagatgaaggggtttattaaagtgttattgtgaatttaattatgtatatgttgttaaaaattatttaatggatgaataattcggaaaaaaagaatttttattatttatatatatcgtgataaaatagggtagcgttttgtatttgttttaatagtatcgtttgagaaaaaaatttttggtttttatttttttttttttttatttaaaattttaattttattatagttagttgtcgaatcgtttaatagaatgttatattgtttttgtatttttaaaattatacgtttttattgcggacggtatatttttatggtagttatatgtttgaaaaagaattaaatttagaatatttatttggttttttattagttttataatattattaaaaaagaaagaaagaaagaaattttttcgtttttgttttgttacgttgtttttatcgtaagatgtttcgtggaagggagtcgagcggtgggtagaggttgagttttcgataacgagcgttttatattttcgtggtatttttatttgttagtgcgttgttgcggtcgtacgtttgattgatatatgattgtaatggtatttttttatttgatattttttttttttttttttttttttttttttttttttttttttttttttttttttttttttgtgtcgtttaaataatagttttaatttttgtgtgttgtaaatataaaaggtaagttatgtgatagagggatagaagaataaaagtatttggaagtaataggatttttttttagtttttagaaaagtttgagaagaaaggagttttgcgtttttttaaggtaagtaggaaaataagcgttgtcggtttgtttaggaaatcgtttttttttaaatcgagtattttattttttttttagataaagagataatttttaaatattatttaaatttgtattattttaatttgtattaatttgtagtatgttagtattgtgttttttaaatgaacgggtttttgaagtttgtgatagagtagggagttttttagaaaagtttgaaaatattttttggtttgatttaaagagatttttttttttaaattttttgcgtagttagatgtaattttgtgatggtttttatagttgatttcgtgaaagggggttgcgaagtagtaatttgttaatatggatttatggagtttagtattttttttagtatttttattttatttataatgggggtattattaacgtaggtaagattgcgagtttaaaagcgtattgtttatttttattattatttatgtatgttgttgattttttgttagggttttgtcggagtgtttagaatgattttaaataataggtaatatttatttttagttttttgtgttacgttttgtaggaattttgtttttttgtattttttttttagcgtgtaggttttcgtttttatagatgtattggggagtatcgggaggagatgaggatggatttattgtatgattttgattgggtaaaaagttcgaggaaatgtatgttgtttgttttggatttattgtagggggttatttttagttattagttcgtttttgtagtatgatgtttaaggagtgatcgggaaaggatgtttttattagtatagagattaggatttgtaggaatgatttttatttgcgggatatttcgaggttttttttaaattttggaatataagttttttttttaaatgaataattgagttgtaggaggtttgggtataatttttttttgggggacgggaagtttgattgtgtatagaatgttaatgatttagaacgtttagtaattgaggtttattgtaatagataaatttagataagtttttatgagaggtagatttttatttttattgagatttaggtgcgggaaaggaagttatttggtaagatgggagttttttgtatagttttttgtaatttattaataatagatatggttgttgtgaaatatgtttttttttatttttaatattagtgtattttaattataaggagttggtattggtaaattattttaatatataagattaaatattaggtgtatttgaaaatagagagatgattgaaatggggagttgttgtgggtgttaattaaatatagcggggacggtataatgttttttaattgagcgtttaaattagatgtaaatatttgtttattttttttttattagttttattaatttaaggaaattttatggttttgtttgttagtttttattgtaaattggtatatagtttatgtaaaatttttttgattttttttgataattagtttaataagtatcgttgaatgaaaatttgatatttgaataggttaatttataattttggggtatttattagttaagaaagttataaaagatattatggattttattgttgtaaaattttattgtaatttttttttaaaaaaattgcggttagtaaagtatttagttgaattaaaataatttttttagattattatttagattattatatgagagtatttgaatataaaatgtaatgttttgtattatttattttaaaatatatttggtttaggtaacgggagaattggttgaggtttttttacgattgtgtattaagtagttgatatttatagatggaaatgtgtttgtggagtttttaattttaattcgagttttaatgatattgttaagggaaaaataaattattttttaatatatttaataatttttaatttatttatttttttgggtttttgaaaaatgtggtgagttttttggaattatagttattaatggtggttagtaatttttattttaagaatttataatttaagtattattattttttggttaattatttattttattaatttttaaataaatatttattaagtattttttagatgtttagtgttatgttagtttcgatggatgtaaaggtgaatgagatattgttttatattttaatttttagtttatatgttatttttagttagattttggaattgaaatgggtattgttaatgggtaaagtgggtaataatttttttgttataaagaattatttaaaatagttattggtttttagatttatttgaaatgatttttatttattagtgggttttttttttatttatgattaagggatttttttttggttttttttattagattttgggtatacgttatttgtatagttaatacggttagatttttttagtttgggtagaagaatttcggaaaaagatagtagtttattttttttttgtttttttgagtattttgtggaaaggattatatgttgtttttattggggatgggtgtgagtcgtttatttagtagttaatattagggttatttgatgaattatcgaattagaaatatgtatatggaggaagatgtagttattattttttattatttatttgttttatttttagtattaaaataaatgatttttgggtttggtttaaatttaagaggtttttgggaagaagttgttggaaatttttttttaaatttaggtttttattatagttatatagtgttgtttttaaataatttagtatggtgttttattacgtgtttaggttattgggggaaaaaaaaaattttgaaaatagtattattagggtttttgatttggtttttattagtagataatttttcgtggttggattaaaatgtttttgattttttggggtgtttgatttattttagttagtttttagttttttggttagcggttttcgagtttatttttatttttttttatgacggttagtgattgtttttttgtttaggttttttgtattaggttagtagttagtgggagtagaggggatgggaaggtaggtggatagattgtgaagtgttaaggtagagcggggaagtagggttgtgagatagggtgggtgagttttagggtttgggttgttgtggtttgttttggttgtgattagttgttattttttttttgtgtatgatattgtggaatatattaaaatttttttgggatggtatgtttggaatttttttgatgttttattttattaatttattcggataataaaagtaaggttgtaagtttttgaatagttggttggttatatattttttttttttttttcgtataatttaatttagaaaagaatttagttagattggtagtgttatgtttgggtatttgttttttgtaagtttttttttttttattttttttcgttagttttggaatttttttgggtggtatgtggtttttttttttttttgtttattattgtttttagttcgttttttttttttttcgtttgagtttttttttttgttagttggttttttgttttgtttgttttttagatagtttgggttttgttttattcggggagaatagtttatgggatttttttatttttatagtatttttaggatgttatttttggtattagttttgtcgggttgataggattggggggttttttgtagtttcgagtttgaatttatttatagagaggagtagttatatggtttagttgttttttgggttgtcgagagcggggttggagtgatcgggttggtaggaacgagtatattattatagtgattcgaatattttcggtaaaggttttggggtgggagcgttatgggaatgtttggatgtatttcggtttatattaagagaaatgtggttattttttgtttcgggggagagataagcggtttgaaataaagttttttggatttttggttttttttttgttttttttttcggtttgttttttttatatttttttttttttaaatagaaagaaagagagataggatttttaatttggttagtatagattcgaatgtttttatgaaatttatttagtgaaagaaagaggggagaaatatattttgggttgattcgaattaaaaaatgtatggggttttggagatggggcgggattttttttttttttttttttgttttttaagagtagaataatagtttcgttgatgagttgtaaatggaaggaagtggattttttaattagagatttttatttaagagttttaatgtaaatttttttgtgatatttttaaaagatgttgttaatgtttttgggattaaaaggtattaaatagtaagttattaggcggttttttattttttttttttttttgggggttttggtcgttttttttaaattagttaaaatttattaaaggatttaaaaggaaaaatttaaagtagttgaattaaaatgagtttttttttgttagtttgataagaagaaaaaaagaaaggaagaaagggaaagaaagagaagaaagaattaatttttttttattattattttttgggttttaatatgaattattttatataagtttttaggttagaggatttatttaaagacgtttggtagtatgaagggagagggtaaaaatataattatttttttgtttattaaaggttttttttgggaggatattaagagtatttttgtttttttgtttgtttttgttagtggtaatgttttagttggtagtatttatttttcgtttattaggttagtaattatgaatttttgtgtttaattttaggagaaaataaagggtgggaaattttttcgaaatttttatgtgtgtgtagtagggtaggggaggttggaattggaattagtatttttttggttgtgtaggttgtatgttgtaaatttatatatttatatagttgagttgttgaggaagattgtgtcgatggtattatttttgatgttagttttttttgtatttgtaaagttttttttttgtgtttttggtagttatttgtttgttattatttatgtgtattgttttttttattagaggtttttagagtttgatggttaaggatatgttattagagttttatttttagatttatttttaatagtaagaacgtgaaattttggatggggtttgtaatttgaagtaattatttttttgttaggaagagtgttgatttagaaaatttaaagaatgggtaattttcgttggcgatatatttttagtgtttataattaggaatttatttagttggggtttattttatttttatggtaaaatttggatataaatattgattagtagttttaaattgggtataagatttgtaatagataatatttttgttttttttttttttttttttttttttataaaagttaagaattttttagataatttgtttttttttaaggtttggattaattttaatttttttttttaagttatgatttaattaattgtagtattttttaaaaatgaaagggtaataggttaagatatttaagaaagttgataagttgttagaaaatgtttaagggtggtttttttatagtgttataaattaataatagttttaaacgtggagtttttttttatttttttattagtagggaataaaaatagggagagagtaggttaggggagaagtaataaaagagaagtaagaaggattatttttgatgtttaaaatttgttgttgtttttttaatatttttaaatattataattttagaaagggaaggatttttttattttatttatttttttttttaggaaggtgtttgaagttgttgtttttatttgaaaaggaggttaattttttaagtgaaaaaatattttttatttttaattcgaagtaaaatggaggtatatatatttgtatttaattatgtgggtataaatataatttgtatttataaattataaaggatgtaaagaattaaagaaatttaatttttaattaaagtttaatttttttttaaaatttgagaggatattttagggtttattgtattgttgtgattttattgttttttattaaattatgaaaaattatttttttttagaatttaaattttttttttgagatgtggaatttaaaggtagtagaatagtattgttatagggaagttggtagttaaaagatatagatatagttgtagtatgtatggtttaagtaaattaagataagtagaaaattattattttaataagtttagggttattagtaatatagggatacgtatttttatgtgatttttatgagaattttgtttttttgatatatgtttgagtttaggagtatttcggattgtaacgggattgaatttagtatttaaattttattattgggtagaaaaggtaaattgaatggggaatggaaagattgagttgtttttattgtttatgttttatttttaattaagggttttatagttgttaggtgagattattatttattattttaaagtgttgttgcgggtgaggaggtttaaacgtagttttggaaatattttgttgtattttttgaagaaaggttaatatgtttatttggttttagggtaaaagagagtttgtattttgagttaatattggttatttttttttttgaggttatattatagttagtagtatagtagtagaataagtgtttagttgttttagtataggtatttttagaatatttggtatttttttttttttatagggagaatgtatatttatgtattttggtaagattgagttttttgagttgggtgtttcggaatttttttattttttttttaaagggttttatgtaaggtgagtagtagagtgtgttttattttttataaaaaattttttttttgggagggagtgggtgaaatgaagggatttttttttgattgaaattgtgttatttgaaaaaattgaaagggtagtggtagattttgaattttaaaatgaatttttttttttttttttttttttttgttattttttttatgatttgttttttttttattttaattttttattgaagaaaggatagaagaggattttgtgtttagggttattgttgatttgtggtattatagaaaggttatttttaagtattttttgatagtttatttttattttagttatagtttttatttgggtagttggatttatagaaataattaaatttttagaggaaaagattttaatagaaaagtattttttgatatttgggtaatttgatttggttatttttaatttatgtaagatttgtattttaaaagttaattagttatgttaattgttaaaaatttagaatgagtttttttattttttagaatgatttttttttgattatttgtgggttatagaagtttatagatatttagtataggatttaagtgttatattaagtggttaatttttttagacgtaagttttagtttagggtttttggaatgtattttttttagtagagaagttttgtagtagatattttattaagtatagggtttcgtttttgattttaagattattgattttatttgtagagaagataatttttttaattaattttttttttttattttgaattagagtattagagattgttttattagggtacgaggatttgtggtttaagtttagttaagaaataagcgttttttaaaagaaaggtgtaagagggtggaatttagtttatattgttattattaaatgtaagaagtttaattttagtatgatttattaatattagtttttttttttttttcgtttatgttttggtgggtattggatagaaattttataaattttaagatagttttaagagaaatagtaattggttaaatatttttattattttaaattattattattattattgatattattgttaatttttgtttttttgagatagggttttattttgatgtttaggttggagtgtagtgatgcgattatagtttattgtaggtttaattatttatgtttaggtgatttttttattttaattttttaagtagttgggatgataagcgtgtattattatgtttggttagtatttttttattatttttgtagagatgaagtttttttgtgttatttaggatgattttgaatttttgggtttaagtgatttttttaatattgttttttaaagtgttgggtttataggtatgagtcgttgtatttggtttattttttatgattaataggatattattaatttagaaattatttagtatatggtaagtatttagttaaatggttattaacggttgtttttattttaggttattaatatagttttattaaggggtaaatatttatagtttgggttttagtgttggattagatattattttagaagttttttgtaattattaattttttaagtaagaagggaattttttttgtaggattgttttggggaatatgtagttttaaggtaggggttgtattttgagaagtttgggtagagttggagattgttagaaatggatagatatataaaagtatttagattaatttgtttattttgtagatgaggaaattgagttttagaaaaggtaagtgatttgtttaagattatatagttaatgatgggagggtaggatttagggtttgaggattagttttagaatgtagtgaaattgttattttatattttttttaaattagtatagggatacggaatattaataatataggcgattaatgggtttagggaggaaaagatgaaagttgtaggtaagtgggagtttggataataatgagatgtttttttggagtttttgataatgtttgaaaaaaaaagttaggattttaagttttagttaggtttaaggtcgagtttttttattttagtttttttttagatagtaaaattttttaagttaaggatatatatataggtgggggtatttgatagttggtttatttttttattttttaaattatttatatttttagttttttagtttagtatttttatttattttaggattgtaatttattgtttttttttttggttatatttttttattttttttgttttttttattttttttttttttttattatttttattgttgagtttggttatatttggttagtagtgtaggttgggagaatatagagttttattatagattggaggattattatttaattataagaatgttgtttttttttttttaaggtagtattttggggacggttattgttgtttttatttttttatttttttattatttttgtattggattagatatatgaaatgtgtttatttttgagatgaaaggagtaagaattgttttttttttattgattttttgtttgtttatttttggagatatttggagttggtaggttggaggtttagtagtatttgtagttagtgtcgttgtttttgggttagtttaggtttggttttttggttgttattgatgtgttgttagttaggaatattaaaaattatttattgaacgtataggatgttttataaaatttaatatgttgtttatagtttataaattaattgttttgggaagaggtatttgatttattttttaaggtatttagttgattagatttaattggaattttttgagtttttgggaaggggttatttaatattttatattttttaaattagatttagagttttttgtttttttgattttagtattgtatgaagttttatttagggttatttagtaagtttttttttatttataaatttttgatgtttttgtaatttttttgatagaggttttatgttttattatttttattttatttatgttttatattataattttttaaaaaattataataaatattaagtaattttggttgatatattgattttattttaaggttattatattttatttgtttaatttggtttttttagaaatgatgtaatgaatattggatataaattagatgtttagagagtttattaatgtgtttaaaaattatttaggaaaataataggttaagattttgtttgtagagttagtgagttagaagagggatcgaggataggaattatattttttttttgattttattttttatttgttagagtaaaaggagatatatagtaggtgtttaataaatatatgttaaaaaatatttgttgaaagaagttatagaagggaatattagtatatattagtattgaaaatagtttagggggaaatatggatattgaagtattatttttttgtgtttggtaagtaaggtaagaataaggttatttttggtatatattatttagtttgttgttgagataatttgcgtgaaattagtattttattttttgttagttagaaggttagtttaagagtgagttgatttgtgggtataatattattttttatttaggaggttgggttcgttgtaagttttgttatattatttttttgaggatgataggtggggaaatttgggtattagttgtttttttttattggtattatttggaaggtagttttaaagtcgggtacgttagtttacgtgttttttttgtcggtagaggttttatattggagttattagaatgtgggttttgtacgtcggttaagtttatgttttagagattgtatttagagtatagcgtggttatagggttattgagtttagtaagagagttatttttttgtttaatttattattgtttgggttaaggttttaagttttcgtaggtagtatttgattttatgatacgttttaaaaaattaaggtaaattggaattaatttagttttgagaaaataatagaagttgttataaggtagagataattttaggttgttagaaagtggtgattttagtggtgtatatttttttaatttttgatttttttttttgtgaggttttttttttatttttatattttgtatatttttatttatgtatattttgagtaatataatgttgataatttgatttagtattgttttttttttaagttttgtttttattttttttttaatataatagtgttggtttatttaatttgaatatttaaggtaaaaaaaaaaaaaaaaattttaggttatgtttttagaattttatttttttgtttttgttttgagggttttgtgagttttgtggtatatttatattgttgtttatatttttattttagaatttaagataaaaattgggtaataatttttacgttttttgagtgtgttgaaatgaaaaatttgttttttagaattaatggtaaagtaatattttttgttaattttttattttttaatattatttttgggtttagtttattatttttaaagagaaagttagatgattaagttatattgtatgtgatattaattatttttttatttgtgtaaatgttataatatttgtttgtaaagtgttttatttatttttaggaaaaaattttaaattgtgtttgtaatttaggatggtgttattaggtggtagtaatgtataagaattatgtggtcgttttggaagagtatttgattaagagattagtatgttttttcgtaattataagaaataaaaatataatatttttaaaatatttaaattggtataaatagtaaatatttattaatttagttattatatttaagttgagtttttaaaagagaaagttttattttttaatgaaattttaaataaagtatatatttataagtttaaaaatttaaaaatacgaaaagatatatagtgaaaagttttttttttatgtttgttttttaattattataggtaattaattttgttagttttttgggtatttttttagagttttgttatataaatatgtgtttttatttttttttattttaatttaaattaatatatagagtttttgtatttttttatatatagttggttagtatattgttgtgtgaatattttagaatataattaattagttttttattaatggatattttatgttgtttttaattttatgttattttagttatgtgtttatgtgattttatatgtaggataatttatagaagtggaattgttgggtttaaattatatatatttgtatttttaaaaggtattgttagattggtttttatagagtttggattaatttatattgaattttttttaaaatggatttgtttttttatagttttgttaatagggtgtatgattagatttcggaatttttgtaaatttgattggttgaataatgtattttaaagtattttaatttttatttttttaaatgagatttttatttttttaaatttttttttatttttaagggttttttatattttttttttttgtggagaaagtggaaatgttaataaatataacgatgtatatatatgtatagggttttgttattgatgtagtttgtttttgttattatgttgtatatgatgttttttaatttgttttgtttatttaattatattttttggttatggttttgaagagaagttgttggtagtgtagaagaagggttaggattggaatgtttgtttttttttttatttttttgttattgatttttgggggaaatatttgtagatcgaagtagtgaaatttaattaattttttttttgatattaattaaggttttaaagagatagataattatttgggataatttagttatagtgaaatttgggaaatggttagtaatattttattttttgaaagtggattttaagaaagttttggttttttgagttgttgttttggtaatttttagggtaacgtgtataggaaaatttagattatgtagatgaaaagaaaataaatatgtttttttgtattttttgtagatttgaaattttgggtataggtttgatttattttaatgagatgttgttattagtatgaatataaagtggtgtaaagttgtgttggaatatggtttcgttaattttgggtttattgtttgtatatggagatgatagtaattgaatttatagttattaagtggtggtattttagaatataaagggatagtagatgttatttttgttaattttttttttttatagatgaggaaatttgggttagaggaggttgaatgatttgtgtaaggtttttttagttaattaatggtagtgttaggatttaagtttaggtgggtttttttattattggtttttgttttttttgtaatttataggatttttttgaggtatatgtgttgaggttttgttattgttagggattttgtgttttgaaatagttttattttatatatttttttttatttaggattttttattttatatttttaagatagttaattgaggttaaatgggtttgatgttattttattagtgtaaaataaattggtttatgttaatttgaatttttaattttgattttattaatattttgttttgtttatttagattgtttatgagtaggaagttaaggaaaatgttgtttatgaataaaatgattaaatttttatttgaaatatttttgaaagttttttcgaagttttaattattatgttttttttgttttggatgtaatagtaggtttttttaatttttttaaatgtttgaaaatatttttgatattttttgttttttgttgtggttaaaaaaaagaaggtattagtgttggttatgtttggggagttagtgaggtaatttggagagatttttggattttagttttttgtttaagaggtatggttaaaagaataaagtaaattttagaaaaatcggtataatatgattttattttaatggtaagtttgttttaataattgttttttttttcgaattatattatgtgtttaggttataaaggttttgtagaaatgtgattttgttggtaaatacgcgtgtgatattttaattatgttggaggttagttagtataatgtgtattttagatgtagtttgttattagtgttgggtgttatggggtttaaaataaaaataggatgagtttagagtatagaagtggaaaattaggtgggtgggtgagtatggatttggaaatggaaaatgtgtttttttgtgggatatggtttgtgtttattagtgttgatttgttttttttttagttttgtaagttgacgttgatattaaagtttgttgagaaattgaatagattttttcgtttcgattaattaaggataaagatgagattatttaattcggttacgttgttgttagaataatatgtttaatttttaatatgggtttaaattatttttggttttaggaatatggattttagtaattaaagttaatatgtgtttttattaaattattgtgtttatttttaaatggttataaatatgtagtataagttatgggagttggggtggaatggatgatagtttttgttaatgacgttttagaaattaatattttttttttaaaataatatggaaaaattttatttaatattttttgggttttattagtggttttgggtaaataattttggggaaagtaatttttgtttttattttagt

SEQ ID NO: 1308 - DNA, 19653 bp, Artificial Sequence
  chemically treated genomic DNA (Homo sapiens)
gttggaatgaaaatagaaattattttttttagaattatttatttagaattattaatggaatttaggaggtattaagtagaatttttttatgttattttgagaggagaatattggtttttagagcgttattagtaaaggttgttatttattttattttaatttttatagtttatgttatatatttataattatttggaggtggatataatggtttaatggaagtatatgttgattttaattgttgaagtttatgtttttagggttaagaatagtttgaatttatgttaaagattaaatatgttgttttggtaataacgtaatcgaattgggtggttttatttttgtttttggttggtcggggcgggagggtttatttagttttttagtaagttttggtgttagcgttagtttatagggttagagaggaggtaggttagtattaatgaatataagttatgttttatagggaagtatattttttatttttaagtttatatttatttatttatttaattttttatttttgtgttttaggtttattttgtttttgttttaagttttatagtatttagtattgatgataaattgtatttgaaatatatattatgttaattggtttttagtatggttaaggtattatacgcgtatttgttaatagagttatatttttgtagagtttttgtagtttgggtatatggtgtaattcgaaaaagaaagtagttgttggaatagatttattattaaaataggattatattatatcggtttttttgaaatttgttttgtttttttgattatattttttggataaaggattggggtttagagatttttttagattattttattaattttttaggtatagttaatattggtgtttttttttttttaattataatagaagatagaaagtattaaaaatatttttaaatatttaggaaaattgggagggtttgttattatatttaaaataaaaggaatatgataattaaagtttcgggaaaatttttaaaggtattttagataaaagtttgattattttgtttataggtaatattttttttaattttttatttatgaatagtttgaataaatagggtaaagtgttgataaaattaagattaggagtttaagttggtataagttaatttattttgtattaatagaatggtattagatttatttagttttaattagttgttttggaagtgtgaggtaggggattttaagtggaaaggggtgtgtgagatagggttgttttagagtatagaatttttggtaatagtaaagttttagtatatgtgttttagggaagttttataaattgtaggaagggtaaggattagtaatgagggaatttatttggatttgagttttggtattgttattaattagttggggaagttttatataagttatttaattttttttagtttaagtttttttatttgtagagggaaggagttgatagagatggtatttgttgtttttttgtgttttaaaatgttattatttgataattatggatttagttattattatttttatatgtagatagtgagtttaaagttgacgagattatattttagtataattttgtattattttatgtttatgttaatagtaatattttattgaaataaattaaatttgtgtttaaagttttaaatttgtaaaggatgtagaagagtatgtttgttttttttttatttgtataatttgggtttttttatatacgttattttgaaaattattaagataataatttaaagagttagaatttttttggggtttatttttagaggatgaaatattattgattattttttaagttttattgtgattaaattattttaagtggttatttgtttttttgaagttttaattagtgttagaaagagaattgattagattttattgtttcggtttatagatattttttttaggagttaatggtaaaaggatgaagagagaagtagatattttagttttggttttttttttgtattgttagtaatttttttttagagttatggttaggaggtatggttaaatgagtaaagtaaattaaagaatattatgtatagtatgatggtaaaaataagttatattaataataaaattttatatatgtgtatgtatcgttgtatttattggtatttttattttttttatagaaaaaggaaatataaagggtttttaaagatagaagagaatttaagagaataaaagttttatttaagagaatgaaaattaaagtattttgaaatatattgtttaattaattagatttataaagatttcgaagtttgattatgtattttattggtaaggttgtgggaaaataagtttattttggagaaagtttagtataaattggtttaaattttgtagaggttaatttggtaatattttttaaaaatgtaaatgtatataatttagatttagtaattttatttttgtgaattattttatatgtgaaattatatgagtatatggttgaaatagtataaaattggaaatagtatgaaatatttattaataggggattggttaattatattttaaaatgtttatataataatatattaattaattatatatggaaggatgtagaaattttatgtattgatttgagttaaaatggagagagataaaaatatatatttgtatagtaaagttttgaaaggatatttaagaaattaataaaattagttatttgtggtagttgagggataggtatgagagaaagattttttattatatattttttcgtatttttagatttttgagtttgtgaatgtatattttatttaaaattttattaaaaaataaggtttttttttttaaaagtttagtttaaatatggtaattaagttaatggatgtttattgtttgtgttagtttgagtattttaaaaatattatatttttattttttataattacgggaaggtatgttagttttttagttaaatatttttttagggcgattatatagtttttgtatattattgttatttagtagtattattttgaattgtaagtatagtttaaaatttttttttaaaaatgaataaaatattttgtaagtagatattatgatatttatatagataaagagatagttaatgttatatataatgtaatttgattatttggttttttttttagagatggtgagttgaatttagaagtaatattaaagaatgaaagattgataggaaatgttgttttattattaattttaagaaatagattttttattttaatatatttagaaaacgtgagagttgttgtttagtttttattttaaattttgaaataagaatgtaagtaataatgtaaatatgttataaaatttatagaatttttaaaataaaaataaaaaggtaagattttgaaaatataatttgggatttttttttttttttttgttttgagtgtttaaattgaatgaattaatattgttgtattgaagaagaaatgaaaataaagtttaagaaaagagtaatgttaagttaagttgttaatattgtgttgtttagggtgtgtataggtgagaatgtgtaaagtatgggagtgggaggaagattttataaagaggaaaattaggaattaagaaaatgtatattattgagattattattttttggtagtttagaattatttttgttttgtagtagtttttgttgtttttttaaaattaaattaattttagtttgttttaattttttaagacgtgttataaaattaaatgttgtttacgaagatttagaattttggtttaggtaataatggattgaataagagaatgatttttttgttgaatttagtagttttgtggttacgttatgttttggatatagtttttgagatatggatttggtcgacgtatagagtttatattttaatagttttaatgtggagtttttgtcggtaggagaggtacgtaggttggcgtgttcgattttggagttattttttaaatgatattagtggaaaagaataattggtgtttagatttttttatttgttatttttagggaaataatatagtagagtttatagcgggtttagttttttgggtgagagatggtgttgtgtttatagattagtttatttttgggttgattttttggttggtagagggtaaagtgttggttttacgtaagttattttagtaataggttaagtggtatgtgttaagaatggttttatttttgttttgtttgttaggtataggagggtggtgttttagtatttatatttttttttaggttgtttttaatattaatgtatattgatatttttttttgtggttttttttaataaatattttttaatatgtatttattgagtatttattgtgtgtttttttttgttttagtagataagagatagggttaggggaaaaatatagtttttattttcgattttttttttagtttattgattttgtaggtagagttttggtttgttgtttttttggatggtttttagatatattgataaattttttgaatatttaatttgtatttagtatttattgtattatttttaagaagattaagttaagtaaataaaatataatgattttggaatggagttagtatattagttagaattatttgatatttattgtaattttttaaaaaattatggtatgaagtataaataaagtgaagatagtagaatataaagtttttattaaagaaattgtaaaaatattaaagatttataagtggaagaaagtttgttagataattttagataaaattttatatagtattaggattagaaaagtaagaaattttaggtttaatttagaaagtgtgaagtgttaagtagtttttttttaggaatttaaaggattttaattggatttagttaattagatgttttggagaataagttaaatgtttttttttaaggtagttaatttataaattgtaaatagtatgttggattttataaagtattttgtgcgtttaatgaatggtttttaatatttttagttggtagtatattagtagtagttaaggagttaagtttgggttgatttagaggtagcggtattgattgtaaatgttgttaggtttttagtttgttaattttaggtatttttaaggatgggtaggtaaaaggttagtggggaggaagtagtttttgttttttttattttagagataggtatattttatgtgtttaatttagtgtaggggtggtgggggggtgagggaataaagatagtaatgatcgtttttagagtgttattttaggagaaaaaagataatatttttgtgattaaataatagttttttagtttgtgataggattttgtgtttttttaatttgtattattagttaagtgtagttaagtttagtagtgggggtgatggaggaagaaaagagatgggagaaataaaaaggatggaggaatatggttagggaaagaggtaatgaattataattttggggtaaataggagtgttaaattgaaggattagaaatataaataatttggagggtggggagatgagttaattgttaaatgtttttatttatatgtatgtttttggtttgaaaagttttattgtttgaggagggattggagtgggaggattcgattttgagtttgattgaagtttaaaattttgatttttttttttaggtattgttaggaattttagaaaaatattttattgttatttaaatttttatttatttatagtttttatttttttttttttagatttattggtcgtttatgttgttagtgtttcgtgtttttatattgatttgaaagaaatatgggataataattttattgtattttgaaattgatttttaagttttgagttttatttttttattattggttgtgtgattttgaataagttatttgttttttttaggatttaatttttttatttgtaaaatgaatagattggtttaaatgtttttatgtgtttatttatttttaatagtttttaattttatttaagttttttagagtatagtttttgttttggggttatatattttttaaagtaattttataaaaagagttttttttttatttaaggagttaatgattgtaaaaaatttttaaggtggtgtttgatttaatattgaagtttaagttataagtatttgttttttgatgaagttatattggtggtttgaaataaaaatagtcgttaataattatttgattgagtgtttgttatgtattaaatagtttttaaattaataatattttgttaattataggaagtgggttaagtgtagcggtttatgtttgtaaatttagtattttagaaggtagtgttgggaggattatttaagtttaggagtttaagattattttgggtaatatagggagattttatttttataaaaataataaaaaaatattagttaggtatggtggtatacgtttgttattttagttatttgggaggttgaggtgggaggattatttgagtatgggtggttgagtttatagtgggttgtgatcgtattattgtattttagtttgggtattagagtgagattttgttttaaaaaaataaaagttaatagtaatattaataataataataataatttgaagtagtgaggatatttaattagttattattttttttaaaattgttttaaaatttgtggggtttttgtttagtatttattaaagtataaacggggagagaagaaaggttaatattaataaattatgttaggattagattttttgtatttgataatgataatataggttgagttttatttttttgtattttttttttgaaagacgtttattttttaattgagtttgagttatagattttcgtgttttaatgggataatttttgatattttggtttaggatagaagagaaagattgattagaaaagttgttttttttgtaagtagaattagtagttttggggttaagagcgaggttttgtgtttggtaaagtatttattatagagtttttttgttaggggaggtatattttagaagttttgggttgagatttacgtttaaaagagttgattatttggtatggtatttggattttgtgttgagtatttgtgggtttttatggtttatagataattagaaaagagttattttgaagaatggaaagatttattttgagtttttaatagttgatataattaattgatttttagaatataaattttgtataaattggaaatgattaagttaggttatttaagtgttaggaggtatttttttgttgaagtttttttttttagggatttgattatttttgtaaatttagttatttaaataaaagttgtgattgagatggggatgagttgttagaaaatgtttaggggtggtttttttatagtgttataaattaatagtagttttaaatatagagtttttttttattttttttttaatggggaattaaagtagggagagagtaggttatgggagaagtaataaaagaggaggaggaggaggaaggatttattttgaagtttaaaatttgttattgtttttttaatttttttaaatagtataattttagttagggaaggatttttttattttatttatttttttttaggaaggggattttttatgaggaatgagatatattttattgtttattttatataagattttttagaaggaaaataggagagtttcgagatatttaatttagaggatttagttttgttaaaatgtatgaatgtatattttttttgtggaaaagaaaaggtgttaggtgttttggggatatttgtgttgaaataattaaatatttgttttgttgttgtattgttggttgtggtatggttttaggaggagaggtgattaatgttagtttagggtataggtttttttttattttagagttaaatgagtatgttggtttttttttaaagagtgtagtaaagtgtttttaaagttgcgtttgaatttttttattcgtaataatattttggaatggtgggtagtgattttatttaatagttgtagagtttttagttaggaatggggtataaataataggagtaatttagtttttttattttttatttaatttgttttttttgtttaatggtgggatttgaatattgaatttaatttcgttgtaattcggaatgtttttagatttagatatatgttaaaggggtaaggtttttataaaaattatataaaaatacgtgtttttatattgttgataattttgaatttgttggggtggtggttttttgtttgttttgatttgtttaaattatgtatgttgtagttatgtttatgttttttgattgttagtttttttgtaataatattattttgttgtttttggattttatattttaaaagaaaaatttaaattttgaaaaggagtaattttttataatttggtggggggtagtgaaattatagtaatgtaatgagttttaaaatatttttttaagttttaaagaaaaattggattttgattaaggattggatttttttgattttttatattttttatagtttgtggatataaattatatttgtatttatataattaggtataaatgtgtgtatttttattttatttcgagttgaagataggggatgtttttttatttgaggagttgattttttttttaggtaaagatagtaattttaaatatttttttgggagggagagtgggtgaaataaagggatttttttttttttgaaattgtgatatttgaaaatattgaaagggtagtagtagattttgaatattaaaaataattttttttattttttttttgttattttttttttgatttgttttttttttatttttattttttattgatgaaaggatggaagaggattttacgtttagggttgttgttggtttgtggtattgtagaaaggttatttttgagtattttttgatagtttattaatttttttgaatgttttagtttgttgtttttttatttttaaaggatattgtaattggttggattatggtttaaaagaaaaagttgggattgatttaggttttggaagagagtaaattgtttgaaaaatttttagtttttgtggaaaaaaaaaagaaaaaagaaaagataaaaatgttatttgttgtaaattttatatttagtttaaagttattagttaatgtttatgtttagattttgttatgagggtgaaatggattttaattggatgaatttttgattatgagtattggggatatgtcgttaacggaagttatttattttttgaattttttgagttagtattttttttaataagaaagtagttgttttagattgtaaattttatttagggttttacgtttttattgttgaaaatgggtttgggggtaagattttagtgatatatttttgattattaggttttgagaatttttgatgaaggggatagtgtatatgaatggtgataagtaaatgattgttagagatataagaaaaaagttttgtagatgtaagggaagttggtattagaaataatgttatcggtataattttttttaataatttaattgtgtgggtgtgtgaatttgtagtatgtaatttgtatagttaagagagtattgattttagttttagttttttttgttttgttgtatatatataggggtttcggaaggattttttattttttgtttttttttgaaattaaatatagaagtttatgattgttgatttgatgggcgaggagtggatattattagttggaatattgttattggtaggggtagataagaaaataggaatgtttttaatgtttttttaaagaaaatttttgatggataaaagagtggttgtatttttattttttttttttatgttgttaggcgtttttaaatagattttttagtttagggatttgtatggaataatttatattaaaatttaagaagtggtagtggaggggaattggtttttttttttttttttttttttttttttttttttttttttttttttgttaggttaatagggaaagatttattttaatttagttgttttaaatttttttttttgggttttttaatgaattttagttaatttgaaaaagacgattaaagtttttagaaaaagaaaaggaataggaagtcgtttggtggtttgttgtttaatattttttggttttagggatattagtagtattttttaaggatgttatagggaggtttatattgaggtttttaaatgggaatttttaattgagaggtttatttttttttatttgtaatttattaacgaaattgttgttttgtttttaagagatagaaagaaagaaagaaaaaatttcgttttatttttaaagttttatgtattttttagttcggattaatttagaatatatttttttttttttttttttattaaatgggttttataaagatattcgggtttgtgttggttaaattagaagttttgtttttttttttttttgtttggggagggagggatgtgggaaggatagatcgggaaagggggtagggaaggggttaaggatttagagggttttgttttaagtcgtttgtttttttttcgaaatagagaataattatattttttttaatgtaggtcgaagtgtatttaggtatttttatagcgtttttattttaaggtttttgtcggagatgttcgggttattgtgatggtatgttcgtttttgttaattcggttattttagtttcgttttcggtagtttaaagggtagttaagttatgtggttgtttttttttgtgagtggatttaggttcgggattataaaaagttttttagttttattagttcggtagagttggtgttaagaatgatattttgggaatattatggagatggggagattttatgggttgtttttttcggatggaataggatttaagttgtttggaaaataggtagagtaaagagttagttgataaaggaaggagtttaggcgaagggaaaagggggcgggttgggagtagtggtgagtaaaagaaaagaaaagttatatgttatttaggaagattttaggattggcgggaggaggtggaggaggaaggatttgtaggaaataagtatttagatatggtattgttagtttagttggatttttttttgaattagattatgcgaaagaaagaagggaaatatatagttagttagttgtttaaaggtttataattttgtttttattgttcgggtaagttggtgaggtggggtattagaggaattttaaatatattattttagagaaattttaatatgttttatagtgttatatataaagaggaaatgatagttgattatagttagggtaggttatagtaatttaggttttggagtttatttattttgttttatagttttgttttttcgttttgttttagtattttatagtttgtttatttgtttttttattttttttgtttttattggttgttggtttagtgtagagggtttgggtaaagaagtagttattggtcgttatgggaagaggtgaggatgggttcgaaggtcgttggttaagaagttgagggttggttagggtgagttaggtattttagggagttagaggtattttaatttaattacgggggattatttgttgataaggattaagttaaggattttggtgatgttgtttttagggtttttttttttttttagtaatttaaatacgtgataaaatattatattgggttatttgaaagtaatattgtgtggttatgatggagatttgggtttggggaagagtttttaatagtttttttttaggggttttttgaatttaggttaggtttagaggttatttgttttgatattgggggtgggataagtaagtggtgagggatagtgattgtatttttttttatatgtatgtttttaattcgatgatttattaagtggttttgatgttagttattgagtaggcgatttatatttatttttaatagagatagtatatggttttttttatagggtgtttaggagagtagagaaaggataaattattgttttttttcgggatttttttatttaggttggaaagatttagtcgtgttagttgtgtaaatgacgtgtatttaggatttggtgaaaaaggttaaaggggaattttttaattataaatggaaagaaaatttattgatgagtgagaattattttaagtaaatttagaaattagtagttgttttaaataattttttataataggaaagttattgtttattttatttattggtaatgtttattttagttttaaaatttaattagagatggtatatggattgagaattagagtatgggataatgttttatttatttttgtatttatcgggattagtatagtattgggtatttagaaaatgtttaataaatatttatttaaaaattgatgaaataaataattaattagagaataatagtatttgaattgtgagtttttaaaataaagattgttggttattattggtggttataattttaagaaatttattatattttttaagggtttaggaaaataaatgagttggaaattgttaaatgtattgaaaaatgatttattttttttttgatagtgttattggaattcgaattaagattgaaaattttataggtatatttttatttgtgggtgttagttgtttggtatatagtcgtaagaaggttttagttagttttttcgttatttgaattaaatgtattttaaaataaatgatgtaaaatattgtattttgtgtttaaatatttttatgtaatgatttgaataatagtttaagaaaattgttttgatttagttaaatgttttgttaatcgtagtttttttaaaaaaaaattataataaaattttatagtaatggaatttatagtgttttttatggtttttttgattaatgaatattttaaagttgtaaattaatttatttaaatattagatttttatttagcgatgtttattgggttggttattagagaaaattagaaaagttttgtataaattgtgtattaatttgtaatgaaaattggtaaataggattataaagtttttttgaattagtaagattgatgagaagaaaatgagtagatatttgtatttggtttaaacgtttagttgagaagtattgtgtcgttttcgttgtatttggttgatatttatagtaattttttattttagttatttttttgtttttaaatgtatttggtatttaattttatgtgttggggtaatttgttaatgttagttttttgtaattaaaatatattaatattagaaatgaaaagagatatgttttatagtagttatatttgttattaatgagttataaagaattgtataagggatttttattttgttaaatagttttttttttcgtatttgaattttagtaaagatgggagtttgttttttatggaggtttatttgggtttgtttattataatgagttttagttattgggcgttttgagttattaatattttgtatataattaaatttttcgttttttaagaaagagttatgtttaggttttttatagtttaattgtttatttaaagagagaatttgtattttaaagtttgaaagaaatttcggaatatttcgtaggtaggagttatttttataggttttggtttttgtgttggtgggagtattttttttcggttattttttgaatattatgttgtagggacgagttgatgattaaaaataattttttgtaataagtttaaggtaaatagtatgtattttttcggattttttgtttaattaaaattatatagtaaatttatttttattttttttcggtgttttttaatgtatttatggaagcgaagatttgtacgttgaaagaagagtgtaagggagtaggatttttgtaaagcgtgatatagaaagttagaaataaatgttgtttattgtttgaagttattttgagtatttcggtagagttttggtaggagattagtagtatatataagtagtaataaaagtaaatagtgcgtttttaaattcgtagttttgtttgcgttaatagtgtttttattgtaagtgggatgagggtgttggggaagatattgggttttatgaatttatgttggtaagttgttgtttcgtagtttttttttacggggttaattataagaattattataaagttatatttaattacgtagagagtttgaaaagaaaaatttttttaagttaaattaaaagatatttttaagtttttttaggaggttttttgttttgttatagattttaaagattcgtttatttaagaaatataatgttagtatgttatagattaatgtaaattaaagtaatgtaaatttaagtggtatttaaaggttgtttttttgtttgagaggaggatgaaatgttcggtttggaaagaagcgattttttaggtaagtcggtagcgtttgtttttttgtttattttaggggaacgtagggtttttttttttttagatttttttgagagttagaaagaggttttgttatttttaaatgtttttgtttttttgtttttttgttatatggtttgttttttatatttgtaatatataaaagttaggattgttgtttaagcgatatagggagagagagagagggagagagagagggagagagagagagggagagagagagagagaatgttaaatggaaaagtgttattgtagttatatattaattaggcgtgcggtcgtagtagcgtattagtaaatgggaatgttacggaaatgtgaggcgttcgttatcggggatttagtttttgtttatcgttcggtttttttttacggagtattttacgatgggaatagcgtagtagaataagggcgaggaagttttttttttttttttttttttaatggtattatggaattaataagaggttaaatgaatattttgaatttaatttttttttaagtatgtggttgttataaagatgtgtcgttcgtaatagagacgtatagttttggaaatataaaggtagtgtggtattttgttgaacgattcggtagttgattgtgatgaagttgaaattttaagtaagagaggggaaagatgggaattagaaattttttttttaggcgatgttgttaaagtaagtgtaaaacgttgttttattttattacgatgtgtgtgggtggtgagagtttttttttttcgggttgtttatttattaaatgatttttagtagtatatatatgattaaatttataatggtattttaataagtttttttatttgtattatttagaataaaattttaggtttgatttagaaataatgagaacgtgtattttttgattttttgagttatatgaaggagaaattaatagataaagttaatttattatataataattagtagaaaagtgataaaggtaattatgtgtgtgggttaaatatttgtagttgaattatgttgtgttatgagttgtgggattataaaggtaaatattttataatttttgttttttgaaagtttaaaattaatatagaaaatcgttagggattttggaggaaaatataaagaatatttaataattattttatgttaggtaaattagatttagaataatttgttttattaatattattgatgaagaattaaattgagaatttaaaatatatatatttcgtggaaaaaataatatattataaaatttaaaaagaaattttttttgggagttttatgtaattgttgatgttgaaattgttttgtttaattttgtattaaattatttgttatttattaataaatttatatttattttattatttttttatgggatttttattttagttattgatatttgtaagaggtgttttaaaatttttagttttattgttagaaatttttttttttatgttttatttggaaaaaaaaatattttgtttattttggattagttagttataaatagaatttatttgcgaagattatggataaatgataaatttaaagttttgaaaaaaaatttggtatttggttgatgatgatattggttaaatattttaaaagtagaagattaaaaagtaaatggaaattgggttttaaaattggaaataatttgaaaggggaaatgatttgtagttgagtaagagttatggaaatagttaggaatatattttttggtttaattttgtgggttagattgggagggggaataaattttttggttattaatatttttaaatattagaatttgatattcgtttatttttttattttttttaagaaataatttgtggtttttttaatatatgttcgttattttattttgttatttttcgtttttaggttgttagggttgtatgaattttgtttagtttttgggtagaattttttagtattttataatttgtttttttgaaagagtattatagaaagtgtaaagattgtaaatatattgattgtttggttatagaagataagattttttttagatggagttttattgttttttttagtcgttattttgttaggagtggcgaagaatattatttgttgttttatttaagaggaaggttttgtttttttatattgggttttagagaatttatttttaagtttgttaatagagagttggtaatagtaattgtttttattttattattatgttttttagaaaggttattgtgttacgtgtagtttttttattggttattattaatgttgttgagaaagaaggattttttttaattttgttaaagggatgaagggatttttgttgttatttcgtatgtattaagggagagaagagtttgtagaaggagatgtttattagttggttgagaaattttttaagggattattttttagttttttatttttggttttgttttaagttgggttttttttttatggtagttttagtggatatttataggagttatttagtatttaaatatttttggggggatgggtagttttaaagtaggtgggagataggattcgattttttgttgtagaatttgaagaagtaggtgtttttttttttttttttaggatagttggaggagttaggtgtaattaagtttggtttattagatgagttatttgggaggaatgattaaggtatgtcgattttgtggttttataggaatcgagattttagaggttgtagtagttggtgtggggagttatagagtttagtagtgtgatagtgagtaatttggggatatagggtttgtggcgatatttttagtagtttcgtttttttgattgtatttgtgtttgttattattttatgagtttggggttttagtttttttggtgattttgtgaattgtattttatttttatttttattaagattttattaataaattttttttttttttaattagttagagatagtttttgaggttggtaattaggaattttaatttgaatattatattttttaaatttaggtaaattaatattattaatatatagatggaaatatagtttttatttttttatagttatttttttaaataaataaatggttttagatttattgttagtttgttttagtttttgttatagtattgtaaaagtaggaaatttttttgtgggtgtatgagaagatttatggtgtatgtgtatttgtgtaattttagtatattagtataatttatgaggtatagtttataattttttgtgagaatgttaatttttattgtttatgaatatgatagtatttatttatttaaaaatatttgttaatagtaatagtaattatttaacgggtgtttacgttttgttagtttttgtgttaaatattttatatgtattattttttttaaagagatatataataattttataaaggagatattattaatgtttttattttataaatggaaaaattgaggttttgagaaattaggtggtttgtttgtggttgatatagtaggtaaatggtaggtatgaattttggtttttttgtttttaaagattatggtttatttattatgttttgttgtttttatttaatagaaattttttgagtaatatttatatagtaacgttttgttatttgttggggagatatataaaagtaggatatggatttagtttttaaaaatgtttatgatattatagggaagagagaaatgtttatttgtgaagatattgtaaggtagagtatggtaagtgttataagaaaagtaaaaggtataataagaggaagtggtatatttaggagaacgttattggatttgggttttgacggtatagagtgggaattagaggataaatgagtttttgtagtgatttgtagttatatattttgtttgggtttaaatttaggttatcgtaagttaggagggtgtgatgagtagagtgaaattaggttacggatttggggttagatgaggttaaaaaggagaggatagaatggtaagttagatagttaaagaagaggttatatatgtggaaggagattaagtagaggagtaaaggtaagtagtttggtaggggtgtaaataggtatttttttttatttatgtatttatttaataaatatttttttatgaaaaaaaaatttttttagaaagtatgattatttaaaagttattattataaagttataataaataatttgaaataaattttgaaatatagaaaaaaaaatttttttgagtgttttttaattgttcgagttgtgtttattttaggggatttggtattgaataagatagataaagtttttacggttgtggtgtaggagtatgtttataaggatatattaaagataaatgataaaattttgagtattaatagtttaaaatataaggatatttatggtgtttaatttggaattgggtagttttagggttggtatagtggttttatgatattattaaaaatttaagttttttttatttttatgatatttagtattgttggttttcgtttttttttggtaggttaattcgtggatgttagatggttgatggaattttagaaattatattgagatttaggagtttagagggaaagagagaagagtttgttttttgtttgtttttttaattaggaagtttattttggtttatatgttaagatggattatgtgtagatagggaggtgggaaggaataaagtgtggtaggagagaagttattgaagttttttagataagagaaggtggtagtttgtattaaggttgaagtagtggagatagagtgaagtgaatagattttagatatattggtttttgttttggacgtgggagttaaaaaaaaggagaaaaattaagggtgatttttgttttatggtggagtgagggaagtataggtttggtgaggggtggcgttgtatgtattaattttatttgtaataggtttagtttgatatttttgtaagatatcgaagttgaaaggtaaagaagatgggttgatatataggtttggattttagggttagttttagagttggagttatatatttggaggttgttaaattatggagcgtatttaaagttatttgattgagattatttagaaatagattttagttaaagaagaaatggtgaattaggaggagttttggattttttttatattgaataagattgaaaagaagaagttaaagaggtgggaggaaagttagaaaagtagattgttattagtaaaataa

SEQ ID NO: 1309 - DNA, 6271 bp, Artificial Sequence
  chemically treated genomic DNA (Homo sapiens)
  unsure 4779: n is a or g or c or t
agtggtataaatatggtttattgtagtttttattttttgggattaagtaattttttagttttagttttttgagtagttgagatgatagttgtttatcgttatgtttagtaaatttttttattttttgtaaagatacgattttattatgttggttaggttggttttgaatttttgggtttacgcgatttatttgttttagtttttaaagtgttgggattataggtttgagttatggtgttcggttatatttatggatttaattgtttttggaattaatatcgtgtaggaaaggagtaggattgagtagaaaaagttgaattaaatgtagttatagtaaatgttttagttttcggattttaagggagttttggtgttaggagagttttttagagtagttttattttgagttttgtatttgttagttagtgtagacggatttggtgagaggtagttttttttagttgaaggtaatttttggaaagggatttagttgataggtgttgataagtaatgcgtttagtagttgaggaaatgagtattttagttttgaagagtggtgtgttttttggtatgttgggatggttggttgtgttagtggagatgggggtggtgggtagaatgaagggaatattattgtaaaagttttttattttttatttatatttatttatttatttattttttaagataaggtttaattttgatgttcgggttggagtgttggaatgtaatgatattattatagtttattgtagttttgattttttgggtttaagcgatttttttattttagttttttaagtaattggaattataggtatatgttattatgtttagttaattaaaaaaaaaaattttgtagagatgaggtttcgttatgttgtttagggtggtttggaatttttgggtttaagtgatttatttattttggttttttaaagtgttgggatgataggtatgagttacggtttttagtttggaataaaatttttcgaagaaaaaattggtagagtttgttgtttgattaaaaaatagaggttgaatgagagagatgtatttaaaataatacgaaatattaagggttttttgaatattgttggatagtgtaaaatgggggaagttaggatataaatttaattttgttttattgtaaggtttatgtttttttattagattagtgttggttaaattggtgttttatgggttatatttagatagtagacgtattttgtttggttatatagtatttaaaaaatgtaaattggttgttattatgtaaaaattggaagagtttatatgtaagtttagatttttagttttttttgagtaattagaagatttagtaatattgggttaatatttttgtatggtagtaattggagttgagtgatagatattttttaaatggagagagtattttttatttggataaatggaggtgggtatatgttttttaatttattatagtttttatgtattattttttttggtattttttttttgagatggagttattttgtcgtttaggttggattgtagtagtataatttaggtttattgaaattttagttttttgggtttaagtaatttttttgttttagttattttagtaagtagttgggattatagttatgtgttattatgttcggttttttttttttttttttttttttttagtagagatggagttttattatattggttaggttggttttaaatttttgattttaggtgatttgtttgtttcggttttttaaagtgttgggattataggtatgagttatagcgtttagttttttttggtatttttgtttagtatttttgttatatgtattatgtatggtttaataaagtatataatatataataggtatttgggtatttttatttttatttattttttagagatagggttttgttttgttgtttaggttggagtgtagtggcgagattatagtttattgtagttttgatttttttagtttaagtgatttttttattttagttttttaagttgttgggattatagatgtatattattatgtttaattaatttaaataattttttttggtagaagttgggattttattatgttgtttaggttggtttgaatttttaggtttaagtaatttttttatttcggtttttaaaagtgttggtattataggtgtgagttattacgatcggtttatttggatatttaatattggtttagtagaattgaatgaatttaattggagaggaagttggggtgaagtttaggtttttgattataatgagaggtttggtattgaggggaggtaatagaatagggagtataaattaggatgaattaatgatatgttggtaggagtttgagtaaaggaagaagagtagagggttagggtttgaagtttgggtgttttattatagagttaaagaagagtgggtaatggtagattaaattagagaagaagaggagagaaaggtatagaggaattttagtaacggaatgttagggaaggtaagggagttgagggtttgggtagttgtatttagtgtagggaagaagattagggagatagataggtaaaaagttatggtaataaggaagtagttagggatttttagaggaagtatgagaaaaggagaggaaggttataggtttgaagtttagtagtgtagtagggggtattggaatattattttgggggtatgagtgagtgtttttttaggggttttatttgggagaaatatagatagatatttatttaatatttatttatttttttttagtatagttattattttgatattatttaaaagaaattagtatttgtattgtatttttaaagaagaagggataaaagatatgtttaaattgtttgtttgttttagtggaataaaatattaatttaatatgtattttggataattattaatttagagattggaaattttttttaaggatatatttttttgtatgtgggttattggttttgtggtttttttgtaggaaaattaaaattttagttttgtttttttttattatttagtgtttgtgtggtttaattggttgattagcgcgtgtttggaatgtgtaaatttattttaatattggtttaggggtttgtgtggtagtttatttttgttattttagtattttgggaggttaaggtagggggattatttgaggttaggagttttagattagtttgggtaatatagtaagattgtgtttttattaaaaaaaaaaaaaaaaaaaaaattagttaaagtagggtgatatttatttgtagttttagttatttaggagtttgaggtgggaggattatttcggtttaggagtttgaggttggagtgagttatgattgagttattgtattttattgtatagagttagattttgtttttgaaaaataaaaatatttgtttaggtaaaatgtatcgaggaagataaattttaaaattatttattttaggttaggtgcggtggtttatatttgtaattttagtattttgggaggttgaggtgggcggattatgaggttaggagtttaagattagtttggttaatatggtgaaatatcgtttttattaaaaatataaaaattagtcggttgtggtggcgtatgtttgtagttttagttattcgggaggttgaggtagaagaattattttaatcgggaggcggaggttgtagtgagtcgagatcgcgtttttgtattttagtttgggtgatagggtgagattttgttttaaaaaaaaaaaaaaaaaaattagttattttaaagtttaatgttagatatagattattcgttgttttggatgtaattttttttttggaaaattggtataatttaattatatatgaaatttttttaattttggtattggaggtatagggaaggattttgttttaggagatttatagtttatttttattgttttaggagttaaattacgttggtttatattttgattttgttatttgttaatttagattttgggtaaattaaaggtttgagggaggagtgtaggtttttagcgtttttacgggggtggggacgtgacgtatttattagtttatgaagttaatgatatgtattgaaaaggtttgtttaaggatttaaataagacgatgaatatattgaattaataatgaatgtaaggttttaaaggtgttttgagggtggtgaaatttgaattttttattaattgtgtaatagttatattaatttggatggttatgagttttgtagaggaaagttgggtttaaattttaatgttagatttggtggttagattttgattgttatcgggtttagtattgggatttaagcgatttttaaaaaaaaaaaattacggaatttttttttggttttttttttttgttttttagtagtttattaagttacgaagaatttgaaaatcggaggtcgtgtattttattttttttgagagtttaagttgagagtatagtttttttaggagattagcggtagagattcgcgcgttgggagaaaggttagttttagggcgttttaatttttaatttcgggagtaatttaaattcggaggtcggcgggggaggggatagttgtagggggcggtggggatgggagtggatgttttcgggttagttttggtattcgttagttgagtttagcgttagtttaggtgagttttacggcggtgagggacgttcgttagacggtttagaggagttagatgacgttatttttaggaggattcgtttttttattaatgaaatcggtcggcgcgggcgtatgcgcggnaggtcgttttttttttcgtttttttttttttttttttagtcgcgtttttaatttttagttcgttcgcgtttttttttttcgggtcgtggaaaggattttattttcggtggggtgttatggcggcgtttcggattgtgatggttgtggggagacggcgttagtggggagagcgattaagaggttttttttttttttcgggttttttttttttatttttttttttttagtttttttgttaacgttttttttttttttttttttttcgttcggcgttgattttttatttttattttcgtgggaatattgggagtttgtattttatagattttttttttgtttttttttttattttagttttcgtttttcgtttttttttcggtttagggcgtcggtttattttttttttcgtcgtttttcggtcgcggggaggatatggtcgcgtataggtcggtggaatgggtttaggtcgtggttagtcgtttcgacgagtaggtaatcggttcgtggcgggcgggaggtgggagcggagtgggggtggggatagagtaggtgaggggaggtaggagcggtcgtttttttcgcggttgttttaggttttggaggaaaggaagggaagggaagagaagggaaggggggataagtgggggtggttaaggcgggaggtgaggggtaggaggggatagttgggagtttgggtatttttttttttttaagtcggggggtggggttttgtttttgattagttttcgattttttattttttttattttagttttttcgtttggaaatggggatgagtgatttgggggcgtttttaggggcgcgttatttggatttaataattatttttttatttttgtttttgagtagaggtgggtaacgtttaggggttttttttttttttttttttcgtgatttttttaattggggacgagcgaattttaaggtttgttttatatattttttataggagaacgataatatttcgttttttttttagtttttttagtttttttttttggagggggaagagtagaagaaagtaaggaaggtataggtttttttattttttgttttatcgttttattttgtttcgagagttttaagtgtatatttattgtatatttttgtgatgttttataacgtcgttttttatattttgatgatatagattgttttttttttttattgtcgtttgtagtggaaatcgtggttttgaaatattttttttttttttgataattgtagttttttttttttttttttttttttttgttagcggtttgaggatgtgatgtattttcgagtgagaatgttggggagtaaaggggagaagggtgaaaggaaagtgagaaattgttttagagttatcgataatagagtaaagttagttgggatgtggttttggagcggattattttgttagtgtttgtggttgtttttgatttttttttggttgataagagaatttttattgagaatatttgggatg

SEQ ID NO: 1310 - DNA, 6271 bp, Artificial Sequence
  chemically treated genomic DNA (Homo sapiens)
  unsure 1493: n is a or g or c or t
tattttaaatatttttaatgaaagtttttttgttaattaggagagagttaaaaataattataaatattagtagaatgattcgttttaggattatattttagttggttttgttttgttgtcggtggttttgaagtagttttttattttttttttattttttttttttttattttttaatatttttattcgagaatgtattatatttttagatcgttggtaaaaaaaaaaggggggggggaagagattgtaattattaaggaaggggaaggtattttagaattacggtttttattgtaaacggtaataaaaaaaaaaggtagtttgtgttattaggatatgggggacgacgttgtagggtattataaagatgtgtagtgagtgtgtatttgaagttttcggggtaggatgagacgatggagtagaaagtaagaaaatttgtgttttttttgtttttttttgtttttttttttttaggagaggaagttgaagaaattgggggaggggcggaatgttatcgtttttttatagagggtatataagataggttttagggttcgttcgtttttagttaggagggttacggagggaagaggaagagagaatttttaaacgttatttatttttgtttaaaaataaaagtaagggggtaattattaaatttagatggcgcgtttttaaaggcgtttttaggttatttatttttatttttaagcggaagggttgggataaaggggatggagggtcggaggttggttagggataaggttttatttttcgatttaggagggaaagggtgtttaagtttttagttgtttttttttattttttatttttcgttttggttatttttatttatttttttttttttttttttttttttttttttttttttttagagtttgaggtagtcgcgggggaggcggtcgtttttatttttttttatttattttgtttttatttttatttcgtttttatttttcgttcgttacgggtcggttatttgttcgtcgaagcggttgattacggtttggatttattttatcggtttgtgcgcggttatgtttttttcgcggtcggggggcggcggagggaagggtgggtcggcgttttgggtcgggaagagggcggggagcggaggttgaggtgagggaagaggtaaggagagggtttgtggagtgtaggtttttagtgtttttacgggggtggggatggggggttagcgtcgagcgggagggggagagggaaagggggcgttggtaaggaggttggggggagggggataggggaaggggattcggggaggggagggggttttttggtcgttttttttattagcgtcgtttttttatagttattatagttcgagacgtcgttatgatattttatcggaagtgggattttttttacggttcggggagagggagcgcgagcgagttagagattgagagcgcggttgggaaaggggagggggaagcgagagggaaggcggtttntcgcgtatgcgttcgcgtcggtcggttttattaatgaaaaagcgagtttttttggaggtgacgttatttaatttttttgggtcgtttggcgagcgttttttatcgtcgtggggtttatttagattggcgttgggtttagttggcgagtgttagagttgattcgggagtatttatttttatttttatcgttttttatagttgttttttttttcgtcggttttcgggtttggattgttttcggagttggaagttagggcgttttggggttagttttttttttagcgcgcggatttttgtcgttaattttttggggaggttgtgtttttagtttaagtttttagaaaaaataaggtatacgattttcgatttttaggtttttcgtagtttggtagattgttgagaaataaaaaaggaaggttaaagagagatttcgtgattttttttttttagaggtcgtttaaattttaatgttagattcggtggtaattaaggtttagttattaggtttagtattgggatttaagtttagtttttttttgtaaaatttatagttatttaagttaatataattattgtatagttgatgagagatttaagttttattatttttaaaatatttttaaggttttgtatttattattaatttaatatatttatcgttttatttaaatttttgaataaatttttttaatatatattattaattttatgaattgatgaatacgttacgtttttattttcgtgggaacgttgggagtttgtattttttttttagatttttgatttgtttaaggtttgagttgataggtggtaaagttaggatgtaaattaacgtggtttaatttttagaataatagaggtagattatgggttttttaaaataaagtttttttttatatttttaatattagagttgaaaggattttatgtgtaattgggttgtgttagttttttaggaagaggattatatttaaaataacggataatttatgtttgatattggattttggaatgattaatttttttttttttttttttaagatagagttttattttgttatttaggttggagtgtagaggcgcgatttcggtttattgtaattttcgtttttcggttgaagtgatttttttgttttagtttttcgagtagttgggattataggtatgcgttattatagtcggttaatttttgtatttttagtagagacggtgttttattatattggttaggttggttttgaatttttgattttatgattcgtttattttagttttttaaagtattgggattataggtgtgagttatcgtatttggtttggaatgagtaattttaaaatttgtttttttcgatatattttatttaggtaaatgtttttgttttttagagataaggtttgattttgtgtagtggagtgtagtggtttaattatagtttattttagttttagatttttgggtcgaagtgatttttttattttaagtttttgaatagttgggattataggtgagtgttattttgttttggttaattttttttttttttttttttttggtagagatatagttttgttatgttgtttaggttggtttggaatttttggttttaagtgatttttttgttttggttttttaaagtgttgggatgataggggtgagttattatataggtttttaggttaatgttaaaatgaatttatatattttaagtacgcgttaattagttagttaagttatatagatattgggtgataagggagaataaaattagaattttaatttttttatagaaaagttataaagttagtagtttatatatagagagatatatttttgagaaaagtttttaatttttaggttggtggttgtttaaaatatatattaaattaatgttttattttattagaatagatagatagtttggatatgttttttgtttttttttttttaaggatgtaatgtagatattaattttttttagatgatgttagaatgatgattatgttggaaagaaatggatgaatattaaatgaatgtttatttatgttttttttaagtaggatttttgaaaaagtatttatttatatttttaagatagtattttagtgttttttattgtattgttaaattttagatttatgattttttttttttttttttatattttttttgaaagtttttaattatttttttgttgttatggttttttgtttgtttatttttttgatttttttttttatattggatgtaattgtttaaatttttagtttttttgttttttttggtatttcgttgttgaagtttttttgtgttttttttttttttttttttttagtttagtttattattgtttatttttttttagttttgtggtaagatatttaaattttaggttttggttttttgtttttttttttttatttaagtttttgttagtatgttattaatttattttaatttgtattttttgttttgttgtttttttttagtgttaaattttttattatagttagaggtttagattttattttaattttttttttaattaaatttatttagttttgttgaattagtattaagtgtttaaatgggtcggtcgtggtggtttatatttataatgttagtatttttagaggtcgaggtgggaggattgtttgagtttagaagtttagattagtttgggtaatatagtgagattttagtttttattaaaaaaaattatttaaattagttaggtatagtggtgtgtatttgtggttttagtaatttgggaggttgaggtgggaggattatttgagttagagaggttaaggttgtagtgagttgtgatttcgttattgtattttagtttaggtaatagagtaagattttgtttttaaaaaataaataaaaataaaagtatttaaatgtttgttatgtattatgtattttgttagattatatatagtatatatggtaggaatgttaaataaaagtgttaaagaagattggacgttgtggtttatgtttgtaattttagtattttgggaggtcgaggtaggtagattatttgaggttaggagtttgagattagtttggttaatgtggtgaaattttatttttattaaaaaaaaaaaaaaaaaaaaaaaaagtcgggtatggtggtatatggttgtaattttaattatttattagggtgattgaggtaggagaattgtttgaatttaggaggttgaggttttagtgagtttagattgtgttgttgtaatttagtttgggcgatagagtgattttattttaaaaaaaaaatgttaaagaaggtaatgtatagagattgtggtgaattaagaagtatatatttatttttatttatttagataagagatattttttttatttaaagagtatttgttatttaattttagttattgttatgtaggaatgttgatttagtgttgttagattttttagttatttaagagaagttagagatttgaatttatatgtaaatttttttaatttttatatagtggtagttaatttatattttttaaatgttgtgtagttaaataaaatacgtttgttgtttgaatgtagtttatggaatattagtttgattagtattagtttagtgaaaaggtatgagttttatagtagaatagaattagatttgtattttaattttttttattttgtattgtttaatagtatttagggaatttttagtgtttcgtattgttttaaatgtattttttttatttagtttttgttttttggttaggtaataagttttgttaatttttttttcgaagagttttgttttaagttgggagtcgtggtttatgtttgttattttagtattttgggaggttaaggtgggtggattatttgagtttaggagttttagattattttgggtaatatggcgaaattttatttttataaaatttttttttttaattagttgggtatggtggtatgtgtttgtggttttagttatttgggaagttgaagtgggaggatcgtttgagtttaggaggttaaggttatagtgagttgtgatggtgttattgtattttagtattttagttcgggtattagagttagattttgttttaaaaaataaataaatgaataaatataaataaaaaataaaaagtttttatagtagtattttttttattttgtttattatttttatttttattggtataattaattattttagtatattaaagagtatattattttttaggattaaggtgtttatttttttagttgttgggcgtattatttgttaatatttattagttaaatttttttttaggagttgtttttagttgaagaaagttgttttttattaggttcgtttgtattgattggtagatgtagggtttagggtggggttgttttgaagggtttttttggtattagagtttttttaggattcggaagttgaggtatttgttgtaattatatttagtttaattttttttgtttaattttattttttttttgtacggtgttgattttaagggtaattaaatttatgagtgtggtcggatattatggtttagatttgtaattttagtattttaggagttgaggtaggtggatcgcgtgagtttaagagtttaagattagtttgattaatatggtaaaatcgtatttttataaaaaataaaaaaatttgttggatatggcggtgagtagttgttattttagttatttaggaggttgaagttggaggattgtttgattttaggaggtagaggttgtagtgagttatgtttgtattatt

SEQ ID NO: 1311 - DNA, 5890 bp, Artificial Sequence
  chemically treated genomic DNA (Homo sapiens)
  unsure 316: n is a or g or c or t
attttaggaagtagaggtgggaggattgtttgagttttggaatttaaggttagtttgggtaatatagtgggattttatttttataaaaatttgaaaaaaaaaaaaaaaaaaaaaaaaatatatatatatatatatatatatatatatatatatatatattttttttaggtttggtattatgtttttgtaattttatttttttgagaggttgaggtaggaggataatttgattttaaaaggttaaggttgtagtgagttataattgatttattgtattgtattttgggtaataaagtgagattttgttttatttaantttaattaattatttaattattgaaggagaggggcgggcgttcggcgattcgttttcggggtttcgcgcgggttcgggtagtaggggcgtgatgttacggtagggagggggcgcgggagtcgtcgggtcggcggggaggcgggggaggtgttttttagttttaaaaaggtaggaggtagagcgcggttttgcgttagagcgagatttagaggtttcgaattcgtcggcggagtcgtcgcgttagattttagtagtagggcgcgggtatcggggcgcgggtagggttcggagttatcgcgtaggttttagggtcgcggtcgggtttcgttacgcgcgtatacgtttttcgatgattttttttcggggcgcgcggcgttgagttcggggcgagggttgttttttcggagattcgatttcggtagcgcggggcggtcgttttttttgtgttttcgttcgtcgttttatttttcgtcgtcgtcgcgcggatgttaagtattagttttttagttttttttaagtttttatttggttttgcggttgcggttttcgggagaggagaaattttggggttcgcgtcgcgcgtcggcggtattatgaagttagcggaggaaggtaagtttcgcgcggttttcgttttcggatttttgcgttttttacggttcgggtcgcgtttttcgatttcgttttcgtcgttcgtacggaggggttcgggttagagaacgaggtcggtcgggtttgtgcgtttagggaggggcgcggcgcggatcgggaacggcgttttttagtttttagtagttcggtttcgagcgcgttttttgttaataggtgttttttttgttttagcgttgagggcgcgaggcgaggtcgtcgcgggtttcgtcgaggaagcggttcgtaggtcggcgatttggggacgggcgaggttgggtcgttaggattatagagggtacgtgggagggaggaagggaggtttttttgggagtgaaggatgtttcgtgtttttttgagcgaggtagagttattttttggcgttaagatcgcggtttgggggttttgcgttttttatttttatttcgagttcgtggcggcgtttttttcgcgtcgcgtttttgaattttttagggtcgagttcgttacgtcggtttttggatttgtaggattaaaagatttaaagcgcggtcgtagtatagtttcgaatttaagttattttgaaattttataggtaggagttttagttagagaagatgttttaggtaagtttgaaaaggaatcgttaagtttcgagttgtttttttatagtgaaaaaaagatggtatagtgtgggtttttgaaattcggtgtggggggcgttgagatttttttgcggcgtattttatattttagttttttattttagttcgttttcggtatatatttttggcgatgtcgggtgggtttttgtaagtggttttgaaaatatttttgtagaggtgtgagtatacgagttagggattagggattgtaatgttaatggaaattggaagacgtttttttaaattttttattagttttgaaatattttatataatttatttaaagagcgttagtatatttgttaatatatgtattttataagggtagacgttttttcgagcgttgtcgttttttgcgcgattttgataattgcggggtttgtttgagaatcgggtttttttagttttggaaaattcgttggttttagtagagttgagtatagggtcgtgagttttacggaggggggttcgtgtggtcggtgttttgacgttttacgggacgggaggtagatattattttattttaatgttagaaaatgttgatatgtttaaattatgtttcgtgttagtgttttatataatgtgtttttgttagtagtagagtttaaaaaatttttttttgttggagtttcggttttaaattttgggatatttacgtcgtagtgtttattattattttttttaaaaggtaggtttttttaagtttagatttttgtatttgaagagtcggtggtcgatttgtagtaaggagttttttttttttacgtaaggaaaaaatacgacggggtagtggttagttttcgtgttttttattgaagaaaataagttcgaaaaggtttttgttgtaaggtagtgcgtcgggtagcgacgttcgatcgatatgggtgtattttatgagggttgtagaattgggttagtcggaaagtgtgatttagtttttgatatatataggtcggtagtatggggatacgcgtggtttttatattagttatcgttgagattatcgggaagaattttgagtttttttgagtaggttttacgaggttatttttggtttatttgaggatttgggcgttttttttgcgtttttcgggtttcgggattatttgggtggaagtttattaggcgtcgtggtttttgaaggtttcgggtttgtttttttatggagaacgtagagaagtataggtttgtaagtagttatttagttagaagtcgttttagatataatgttttacgggttggggttaaataaagtttattttgttttttgttatttaattttatagcgttgttttttagtttagattagaaaatggtagggcgttggtatttcgttttattatatttagcggggtttttgttttcgtagatatttttagtttttgggaggatgcgtttaagttaaatatttttatggagatatttagtgtttgtggaacgggtagttttgaatttggattaatagttttgaattatttgtaggaaggaagtttagtattggggcgggggaagggggggtttttaggagtagtaggggagtcgttttatcgatttttttttgggatggagattagtgtagttttaggatagtagtagtgagtttttatttttgtagggttcgcggtttggggttattagtaggcgggatagtttagtaaaaagttttagtttaaatagatgataagggttgttatttgtgtataattttatggtgggggtaaaaaggtggttggagttttaaaaataatgtataggtcgggcgtcgcggtttacgtttgtaattttagtattttgggaggtcgaggtaagcggattacgaggttaagagatcgagattattttggttaatatggtgaaatttcgtttttattaaaattataaaaattagttgagagtggtggcgggtgtttgtagttttagttattttggaggttgaggtaggagaatcgtttgaattcggaaggcggaggttgtagtgagtagagattgtattattgtattttagtttgggtgatagagcgagatttcgttttaaataaataaaaatttgtataatggaaagagaatgaaacgttgtggttttttaatagaaaatagaatttttatttgtttaaggtcggtaaaagtagtaaaattataataaaataacgttttaatatttattttaaagttagaagtattattagaaattaaattaggttatacggaacgatggtttattattggagaaaattagttagtgaaagggtcgcgggagaagttcggggacgattttgggattggagggtttttcgtttttggaaaaggtagtgttcgcggggtaggttagagggagcgtttcgaggagttttggggttgttagttttgatacgcgtattttttcgttcgggtcggttttttttcgtttttagatttttattatttttttattattttatatgtcgggtgtatatggtgcggagagttcgggggaagttagaatacgcggcgggagaggtaggtttagggcggttttagttaagtagttcggtttttcggattttcgtcgcgtataggttcgggtcgtttagggtgggattcgaattcgttttttcgtttcgtttaaggaggttatttttggaggtgtttttagaaggatcggcgggtttttcgcggggcgggggcgcgtagggcgggtgtttggaggttggggattcgtaggagaggtcggtgggtgtcgggttttttgtagggggttgtaggtcgaggggcgcgttacgaatttagcgggaatttttgcgtttttcggtatcgtcgggttgaaatcggggtttttagcgttggcggtttcgggttgggatttttttattttcggggtttcgtagggcgcgtacgtggcgttcgggggttatcgttgtagtcgttttttcgaggaggttcggattgaaaatttttttaaaaaaaaaatttaaaaaaaaaatttcgtcgttttgggcgtagttttaggtatttggtgtcgttcgtggggtttcgacgtttttattttcgggttcggaggagtttgcgtcgggtcgggatttttagggtataagaggtcgggggatttttgcggtcgcgcgcgcgcgagggggcgggggcgggggggatacgagtttatttaaaaattcgtgttcggggagtttatttaaaattcggaagtcggcggtcgcgagtcggttgtttatgtaaattcggaaacgtttcggggggcgggggcggggcggggacggggggaggggcgggggttacgttacgcggaggacgcgcgggtagcgtcgggagaatcgaatttttggcggtcgcgatttcggttttcgtttcggtttcggttcgattcgttatgacggggttggaggattaggagttgtagtgcggggcgttttgggttcggatgcggttttttcgaacgttcgcgggggggttttgggggaagagcgtagttcggatacgggcgtggacgaagtggtttcggatagagggttggtggcgttgttagaggcggagaagttttagtttttttagatatttttttttcgtcgtcgtttttttacgtttcgtagatttttttaagtttttagtttttaagtttattcggagttattatgattttagtttttttttttatttttttttttttgtgttagaaataagggttttaggtaaataaattataaataattttttattttcgaagagtagcgagtgagtggggtgggtatttttgggtttgggtttttttttcgttgttcgggattttttttgtttaggttattttaggttggttatcgttcgtttttgtttgtgtttatttttaaggtttcgtgtttgtttttttcgcgcggaggtgaagtcggaggagtttggtaagtagggattttcgtcgagtttgtaatgagggttatatttttcgtatcgtttattatttttttttaaaaattttaacgttttgattattttttgaaaataagcgttttaattaaatttgtgttgtttgcggttttcgatttattattttttaaatgttttttttgtttgggtttgggttttaggtttttggggttagtgggagttaaggtagatgagggtgggagagagattcgtcggaggttttttttattcgggttgtttgtggttttggcgtcgttttttagagttggttttagtttttttcggtttgagttaggatattttagtagaagagttttttatttgggtgtgttatgcgagagtgtcgttttattttcgatttttttttatggggtga

SEQ ID NO: 1312 - DNA, 5890 bp, Artificial Sequence
  chemically treated genomic DNA (Homo sapiens)
  unsure 5575: n is a or g or c or t
ttattttataaagagaggtcgggagtggggcgatattttcgtatggtatatttaggtagaaaatttttttgttgaaatgttttggtttaagtcggggaggattggaattagttttggaaggcggcgttagggttataggtagttcgggtgggaagggttttcggcgggttttttttttatttttatttgttttggtttttattgattttaaagatttagaatttaggtttaggtagggaagatatttggggagtggtgagtcgagaatcgtaggtagtataggtttggttggagcgtttatttttaaaaaatgattaagacgttggagtttttaaaagagagtagtgaacgatacggaaaatatgatttttattatagattcggcggaggtttttgtttgttaagttttttcggttttattttcgcgcggggagggtagatacgaggttttgagaatgggtatagataggggcggacggtgattagtttggggtgatttggatagaagagatttcgggtagcgggagaggggtttaggtttaggggtgtttattttatttattcgttgtttttcgggagtggggagttatttgtggtttgtttatttgaaatttttatttttgatatagagaagagaaaatgaaagaaaaggttggggttatggtagtttcgggtaaatttgaaagttggaggtttgggggggtttgcggggcgtggggagacggcggcggggaaagggtgtttggggaagttggggttttttcgtttttggtagcgttattagttttttgttcgggattatttcgtttacgttcgtgttcgggttgcgttttttttttaggattttttcgcgagcgttcggaggaatcgtattcgagtttaggacgtttcgtattgtagtttttggttttttagtttcgttatggcgggtcgggtcggggtcggggcgggagtcggggtcgcggtcgttaggggttcggttttttcggcgttgttcgcgcgtttttcgcgtaacgtgattttcgttttttttttcgttttcgtttcgttttcgtttttcggggcgttttcgggtttatataaataatcggttcgcggtcgtcggttttcgagttttaaataaatttttcggatacgagtttttaaataaattcgtgtttttttcgttttcgttttttcgcgcgcgcgcgatcgtaggggtttttcggttttttgtgttttgggggtttcggttcggcgtaggttttttcggattcgggggtaggggcgtcgggattttacgagcggtattaggtatttaaggttgcgtttagggcgacggaattttttttttaagttttttttttaaagaagtttttaattcgggttttttcgggaaagcggttgtaacggtgattttcgagcgttacgtgcgcgttttgcggagtttcgggagtggggaggttttagttcgaggtcgttaacgttaggaatttcgattttagttcgacggtgtcgggaagcgtagggattttcgttgggttcgtggcgcgtttttcggtttgtaattttttgtaggaggttcggtatttatcggttttttttgcgagtttttagtttttaaatattcgttttgcgcgttttcgtttcgcgggaaattcgtcggtttttttaggggtatttttaaagatgatttttttgagcggggcgggaaggcgagttcgggttttattttaggcggttcgagtttgtgcgcggcggggattcggaaagtcgggttgtttagttgaggtcgttttgggtttgtttttttcgtcgcgtgttttaatttttttcgggtttttcgtattatatatattcgatatgtggaatagtaggaggatggtgggagtttgagggcggaggggagtcggttcgggcggaggggtgcgcgtgttaaggttggtaattttaaagtttttcggagcgttttttttggtttgtttcgcgggtattgttttttttagaggcgagaaattttttagttttagggtcgttttcgggtttttttcgcgatttttttattggttggttttttttagtgataagttatcgtttcgtgtggtttgatttagtttttaataatatttttgattttgggatggatgttggagcgttgttttgttgtagttttgttgtttttgtcgattttgggtaagtggaagttttgttttttgttgagaagttataacgttttattttttttttattgtataggtttttgtttgtttgagacggagtttcgttttgttatttaggttggagtgtagtggtgtaatttttgtttattgtaattttcgtttttcgagtttaagcgatttttttgttttagtttttagagtagttgggattataggtattcgttattatttttagttaatttttgtagttttagtagagacggggttttattatgttgattaggatggtttcgattttttgatttcgtgattcgtttgtttcggttttttaaagtgttgggattataggcgtgagtcgcggcgttcggtttgtatattgtttttaaaattttagttatttttttatttttattataaaattatatataaatgatagtttttattatttgtttagattaaaattttttgttaaattgtttcgtttgttggtggttttaggtcgcgggttttgtagggatggaggtttattgttgttgttttaggattgtattggtttttattttaagaaggggtcggtggggcggtttttttgttgtttttaggagtttttttttttttcgttttagtgttgggttttttttttgtaaatggtttagagttattggtttagatttaaagttgttcgttttatagatattgggtgtttttatggaaatgtttagtttggacgtatttttttagaggttggggatgtttgcggagatagaagtttcgttgggtgtgatgaagcggggtgttagcgttttgttattttttaatttgagttgggaaataacgttgtgaagttaagtggtagagaatagggtgagttttgtttggttttagttcgtggggtattgtgtttggagcgatttttgattgggtggttatttataggtttgtatttttttgcgttttttatgaggaagtaagttcggggtttttaggaattacgacgtttaatgagtttttatttagatggtttcgaaattcgagggacgtaggggaggcgtttaggtttttagatgggttaggaatggtttcgtggggtttatttagaaggatttagagtttttttcggtggttttagcgatggttggtgtggaaattacgcgtgtttttatgttgtcggtttgtgtgtattaaggattagattatatttttcggttggtttagttttgtagtttttataaaatatatttatgtcggtcgggcgtcgttgttcggcgtattgttttgtagtagggattttttcgagtttattttttttagtaggaaatacgaaaattagttattgtttcgtcgtgttttttttttgcgtaaaagaaaggggttttttattataggtcggttatcggttttttaggtatagagatttgaatttggaaagatttgttttttaaagggagtgataatgaatattgcggcgtaagtgttttaggatttaaaatcgaaattttaataaaaaaaaattttttaaattttgttattagtaagagtatattgtgtaaaatattgatacgggatatggtttaaatatgttaatattttttaatattgggatgaagtggtgtttatttttcgtttcgtgaagcgttagggtatcgattatacggattttttttcgtggagtttacggttttgtgtttagttttgttaagattagcgagttttttagagttgggggagttcggtttttaagtaagtttcgtagttattagggtcgcgtaggaagcggtagcgttcggaaggacgtttgtttttatgaagtatatatgttggtaggtgtgttggcgttttttaaataaattatataaaatattttagagttggtaaggaatttggaaaagcgttttttaatttttattagtattgtaatttttaatttttaattcgtatgtttatatttttgtaagggtatttttaaagttatttgtaggagtttattcggtatcgttaggggtgtgtgtcggggacgggttaaggtgggggattggaatgtgagatgcgtcgtaggggggttttagcgttttttatatcgggttttagggatttatattgtgttattttttttttattataaagaagtagttcgaaatttggcggtttttttttaaatttgtttgaaatattttttttggttggaatttttgtttataggattttaaaatggtttaaattcggggttgtgttgcggtcgcgttttggattttttggttttgtaggtttaggagtcggcgtgacgggttcggttttggggaatttaggggcgcggcgcgagggagacgtcgttacgagttcggggtgggggtggggggcgtagaatttttaaatcgcgattttggcgttagagggtggttttgtttcgtttaggaagatacggggtattttttatttttaaggaagttttttttttttttttttacgtgttttttgtggttttgacggtttagtttcgttcgtttttaaatcgtcggtttgcgagtcgttttttcggcgggattcgcggcggtttcgtttcgcgtttttagcgttggggtagaggagatatttattggtagaaggcgcgttcggaatcgggttgttgggagttgggggacgtcgttttcggttcgcgtcgcgtttttttttgggcgtatagattcggtcgatttcgttttttggttcggattttttcgtgcgggcgacgggggcggggtcggggggcgcggttcgggtcgtggggggcgtaggggttcgggggcggaggtcgcgcggggtttattttttttcgttgattttatggtgtcgtcggcgcgcggcgcgggttttaaagttttttttttttcgaagatcgtagtcgtagggttaagtggaaatttggaagggattggaaagttggtgtttggtattcgcgcggcggcggcggggagtggagcggcgggcggaggtataggagaagcggtcgtttcgcgttgtcggggtcgggttttcgggaagatagttttcgtttcgggtttagcgtcgcgcgtttcggaggaaagttatcgaggggcgtgtgcgcgcgtggcggggttcggtcgcggttttaggatttgcgcggtggtttcgagttttgttcgcgtttcggtgttcgcgttttgttgttgggatttggcgcggcgatttcgtcggcgagttcggagtttttgagtttcgttttgacgtagggtcgcgttttgttttttgtttttttaaagttggagaatatttttttcgttttttcgtcggttcggcggttttcgcgttttttttttgtcgtgatattacgtttttgttgttcgggttcgcgcggggtttcggggacgagtcgtcgagcgttcgttttttttttttaataattgggtggttggttgggnttaaataagataaggttttattttgttgtttagggtgtagtgtagtgggttagttatagtttattgtagttttagttttttggggttaagttatttttttgttttagttttttaaaggggtagaattatagggatatggtattaggtttaaaaaaagtgtgtgtgtgtgtgtgtgtgtgtgtgtgtgtgtgtgtgtgttttttttttttttttttttttttttagatttttgtagagatagggttttattatgttgtttaggttggttttgaattttagggtttaagtaatttttttatttttgttttttgaagt

SEQ ID NO: 1313 - DNA, 6307 bp, Artificial Sequence
  chemically treated genomic DNA (Homo sapiens)
tgaggtttggtttagttttagttattaagttttaggtataatttatttttgatttttttttttttttttttttatagagatagagttttgttatgttggttaggttgattttgaatgtttggttttaagtagttttttcgttttatttttttaaagtgttgggattataggtatgagttattgcgtttggtttatttttgatttttcgtattaaaaataattttaattaaaatgttttttttggttgggtatggtggtttatatttgtaattttagtattttgggaggtcgaggtgggtagattatttgagtttgggagtttaagattagtttgttgggtaatgtgttaaaattttgtttataaaaaaatataaaaattagttaggtgtggtcgggtgcggtgttttacgtttgtaattttagtattttgggaggtcgagatgggcggattacgaggttaggagattaagattattttggttaatatggtgaaattttgtttttattaaaattataaaaaattagttgggtttgttggcgggtatttgtaattttagttatttgggagattgaggtaggagaatggtatgaattcgggaggcggagtttgtagtgagttaagattatgttattgtattttagtttgggcgataaagtgagattttgtttcgaaaaaaaaaaaaaattagtcgggtgtggtggtacgtgtttatagttttagttatttaggaggttgaggtgggtggattatttgagtttaggaggttgaagttgtagtgagttatgatggtattattgtgttttagtttgggtaatagagtaagattttgttttaaaaaaataataataaaaaataaaaatgttttttttgtttttttttatattttaattggaattggttagatagaggttgtagtgttgttcgtttttattaagttattgagttttaagatttatttttttagtggaattgggttttgattttaggttattttttttattagtatggtttttttgggggaagttttttttttggtagggttaggtttatttttgggttttggggaaggagaggtagggatttaggtttgttattaagatagaggttgtaatgtgggggttttgagggttttgggaagtattggggagagaattttttataggggaggaaggtggggtgggtttattatatattttgtgattgaggatgtttggtagagattttggttggatatgttaatttttaaatgattttattttagtatattttagtgttgttttttttggttttaaagtgatttgtttaaggatgggattgattggggggtggagggggatagttaggtttgaaagttttgtttattgtttttattatgtttattttaaattgggttatttagatttttaaatttttttttgggttagtagttataatatttatttatttattttagttagtttgattgaggatttttttttagattattatatttgggggataaatggttttgatatgagtatgagaggaagggatgagtaaggttggagagggtggtaggttttttaaaggttatagtaagaagattgggttgtgtgtaaagaattttttttatttttagttttggatatttgggtttttttagtttattttgtttagaatttttttatgggttttttaagtttgttttttggattaagtttaaattttttagtttggtatttgaggataaagtgttgattttgtttttttagtattttgtgttgattttagtaattaattttttgagattgtagttggttggttttattttttttttttagattgggagttgtttaagggtagtttttgtgttttttgtggttattttggtatgggtttggggagtaggtatagaagaattaaattagagtttgggatgagggggatgtttggtatggagaggaagaatttttttaaattttgaatttttttagaggtttttgttttgtttaatggggaataagggattggggtaggttaaattgtattattttatggtttagagggtattgaagaattttaataatgggtgtttgggaatagttttgtggtagttgatgataatgatggttttttttaatttttagttttgggtggtatttatataggagagagtggttgtatagtgatttatatagtttttgtttattttggggttttatttattgtattggttttgtgggttttttggttttatagggtttttagagggttgaaggtgggtttagatgatttgtaggagttttggaattgtttgaagaagagtttatgggggtatatattggttttagttggggtaaagggttgaaagagtatgtatatatcggtgtatgtgtgtggttaggtttttttataggttgtagagtttttagtcgttgttgatttttttatatatatggtgattttttttttgtagttggtgtttatttttgttttagtttttattattttttggtgagattagaaattttttttataatgtaatttgttttaagtgttttttaggtgtttagtggttgggaagatagatgtatagttgagtatttgatgagtggttgaattttttaagttatttatagtttttttgtggtttttttttagtggaggggttgattagtttagggttttttttttgtttgttgtttggtttgattatggttgattttatgatttaggtgaagttatgtttggagggattttagatgagttggttaagtttttgggattttatattgtattaggattttgttatatgtggtataaataggtgggttagtaatttgtttgaggtagagggttttagagttgatgtggtatttgggttttaagttttatatttaggtttttaaggttggagatttgtaggtaggataggttattgggaaggatagtttattcgtttaatgttagttgttttttttttttgattatattattttttttttttgattttatttatttttgttttagttgaatttagtgatttatttagaattttgattatgtaaattttttgttttaagtttttttattgttttttattgtcgttaggataaagtttagatattttgtagtggtttgtagtattttgtttatttattcggttttattttaggtttttgtttattgtaggttattttatggttattaagtttttggaaatttgttttttgtttggaatgaaatttgtttattttttgtttgttatttcggtttttattaatttttgttaaggttttgtagttagtaggtttatgaattgtttttgagtttttggtataatttttatttttttgtatagtaattatagatttgttggtttttttttttttatttttgaagggagattttatttttgaatttttaggaatagtataggtatcggtataaaatattgggtagaaatgaagtaatataagatgaacgttttggatgttttggatattttttgtttttttgatttaaggtttagtttggttttttttagggttttttggtagtttaagtgttagtttagatattgagatttcggtaaagagtttttttttattttttttttttattggtttttgtgggcggtgtggaatgtgttgtaggttttgcgagagcggtattttttttttttttttttttttttttttttaatttattgtagtttttgagagggtagtatttttgggcgtatttgtatttaagtttttgatagtgttttgggtttttttagtaacgcgtatttagggatgttatgttttgtgggttttatgttcggggtacggagttaggggaggcggttattttattttttttacgtttttgtttattttgcgttttagcggagttttaggtaaataagttaggtttttagtttttaaggacggtttttattttagattttaggaggaggcgttttgggttatttcgggaaggttagtttgttcgggaggggtagattacgaaaacggttttttaggtagtgttattttttttttattgttagttatttaatttaggcggttttatttttttcgtttttatggatatgtagtaggatgtagagagtatagagttgtgattggtacgagtttataacgggttttttcgtttaatttatttaatttttagtaagggataggttttgtttattggggttcgttgaggttttaaacgcgtatgttgttaagggagtagttgcgggggttcgttagtggggataaaggcgtagttatcggggcgaaagtttcgtttcgtagagggtgggtttgcggcgatcgcgagtttagagttcggatttgtcgcgtaatttgtttttttcggttttattttaatttagttggattttcggttcggtttttgttttttggagatttagttattaaagttgaggtggggggatgaggatgtgggcggcgtttaggtaattttgaggggttttgatgttttttttagagttagttattaggagtaatacgatgcgtttttatattatcgaatttagaattttagtgttttagtatttttttttcgatatgagtttcgtttaatgaggagaagggttttttgtattggtcggtggtggttttttatttaattagagaggttaacggttttttttcgtttggtttagaaggaatcgtcgggggaatataggttaaattataattttcgagaggtagttgggttttgcgggggggggggggggggcgtttgcgtgtttacgtgatttttttttttttcgcggagatcgagttacgcgataggtttgtgagggggcggggttcggcgtttgttcgtcgtgttagtggttaatcggtagttaggtagggtgggcgcgcgtagggggcggggtcgggcgcgcggtagggcgcgagagcgtattcgcggcggcggtggcggcgattgtgggggggcggcggggaatattggttaagtcgatagtggaggtttaggtatcggtggcgggcggttgcggtttttggtgttgttcggcgcgcggttagttttcggaacggaacgttcggcgtcgcgggtttcgttcggaaagtttgtcgtggagtcgcgattttttggttcgcgcggttcggtatgaagcggcgttgaggagttgttgtcgtcgtttgtcgttgtcgtcgtcgtcgtttgaggaggagttgtagtattttgggttacgtcgatgattattgtaaattgtggcgtttacgacgagttcgattttaaattcgtttttggcgaggacggggcgtcggcgtcgtcgttttcgggttcgcggtttgtaggtgggtgtcgggttaggcgggatcgtggagcgatttcgtttttcgttcgtaggatttttcgttttttttttgtttttttggatgatcggagatcgataattttgtgtgtgtgtgtgcgcgcgcgtgtgtgtggtgagttaaaaacggatttaaatcgttgaggaggcgtgtgggtcgttgcgacgtggaagtggtggcgggtttggttggaagtaaattagtggggaattcgatttcgggacgatcggggtttggaggtttagggttcgggttgttgtttaagtggcgtttggttgtcgttgttttgttagtgtgttgtaaggaaaatgttgtttttgtgaattgttagcgtattgggttttttatttattttaggtcgttttttgaaattttagtttgaaagatgtttattttttaacggtaggatttttttaaaaattaggtacgtgtttttttaagtttattttgttagaagagtaatgttttcgagttaacgtttattcgtgtaagtttatgatttataattaattcgaagtgtaattgtaacgggatttttttggaaattggatttttttatttgaataaagtgtttcggaagattttttttttaatagtgggttgttttttttataatttttttagaaagttttagaagtcgatttttatttaaagaaaaatttttttttggaagatattttaaaggaaattttgaattgggaaagttgggtattattatgtttgtaggttagattaattaggaaatagaaataggatgattggggatttagagtttttttgtgatttggtttggaatattgtggtttattaagtttagtttttttgttatatatgtatacgaattttaaaaaggaaatggataagagtaatttttatttttttttgtttggtatgaggtgaattttttaatgtttatgtttgatgtttagtagattgttttgtagagttgtattgaaaaaatatatttgaacgtgag

SEQ ID NO: 1314 - DNA, 6307 bp, Artificial Sequence
  chemically treated genomic DNA (Homo sapiens)
tttacgtttaggtatgtttttttaatgtaattttatagaatagtttattgaatattaaatatgaatattaagaaatttattttatattaggtaagaaaaaatagggattatttttatttattttttttttgaagttcgtatgtatatgtaatagggaaattgaatttaatgaattatagtattttaaattaggttataaaagagttttaagtttttagttattttgtttttattttttgattggtttgatttgtaagtatgatggtgtttagtttttttaatttaagattttttttaaaatattttttaaggagagatttttttttaaataaaaatcgatttttagaattttttaggaaaattatgaaaaaagtaatttattattaaaaaaaaaatttttcggaatattttatttaagtaaggaaatttagtttttagaaaagtttcgttatagttatatttcgaattaattgtgggttataaatttgtacgagtggacgttaattcgaaagtattatttttttagtaaagtagatttaaaaaaatacgtgtttgatttttagaggggttttatcgttgaaaaataagtattttttaaattaaaattttaagaaacgatttagaatagatgaaaaatttagtgcgttaataatttatagggataatattttttttgtaatatattggtaaagtaacgataattagacgttatttgggtagtagttcggattttgggtttttaaatttcgatcgtttcggagtcgagttttttattagtttgtttttagttaagttcgttattatttttacgtcgtagcgatttatacgtttttttagcgatttaaattcgtttttaatttattatatatacgcgcgcgtatatatatatatagggttatcggttttcggttatttaagggaatagggagggagcgagagattttgcgagcgagaagcggggtcgttttacggtttcgtttggttcggtatttatttgtaggtcgcgagttcgggggcggcggcgtcggcgtttcgttttcgttaaagacgagtttgaagtcgagttcgtcgtgggcgttatagtttgtagtagttatcggcgtggtttagggtgttgtagtttttttttaggcggcggcggcggtagcggtaagcggcggtagtagttttttaacgtcgttttatgtcgggtcgcgcgggttaagaggtcgcgattttacggtaaatttttcgggcggggttcgcgacgtcgagcgtttcgtttcgaaagttggtcgcgcgtcgagtagtattaggaatcgtagtcgttcgttatcggtgtttaagtttttattgtcggtttagttaatgtttttcgtcgtttttttatagtcgtcgttatcgtcgtcgcgggtgcgttttcgcgttttgtcgcgcgttcggtttcgttttttacgcgcgtttattttgtttggttgtcgattggttattaatacggcgaataggcgtcgggtttcgtttttttataggtttatcgcgtaattcggttttcgcgagaaggaaggaagttacgtgaatacgtaggcgttttttttttttttttcgtagagtttagttatttttcgggaattgtagtttggtttgtattttttcggcgattttttttaaattagacgagagaaggtcgttagtttttttaattggataggggattattatcggttaatgtagaagatttttttttttattgggcggagtttatgtcgaggaaggggtgttgaagtattgaggttttgggttcggtgatgtgggggcgtatcgtgttatttttgatggttggttttagggaaggtattagggttttttagagttatttggacgtcgtttatatttttatttttttattttaattttaatggttgagtttttagagggtagggatcggatcgagagtttagttaggttggggtggaatcgaaggagatagattgcgcgataagttcggattttgagttcgcggtcgtcgtaggtttattttttgcggggcggagttttcgtttcggtggttgcgtttttgtttttattagcgggttttcgtagttgtttttttgatagtatgcgcgtttgaggttttagcgaattttaatgggtagggtttgttttttgttggaagttgagtagattgagcgggaaagttcgttgtgagttcgtgttaattatagttttgtgttttttgtattttgttgtatatttatgaaagcgggagggatggagtcgtttaaattgggtggttggtagtggagaggaagtgatattgtttaaagaatcgttttcgtgatttgtttttttcgagtaagttagttttttcgagatggtttaagacgtttttttttggggtttggggtgaaggtcgtttttggggattgggagtttggtttgtttatttaaggtttcgttgaggcgtaaggtggatagggacgtgagagaagtagggtgatcgttttttttagtttcgtgtttcgggtatagggtttatagggtatagtatttttagatgcgcgttgttggaggaatttagggtattgttagaggtttgggtgtaggtgcgtttaaaaatgttgtttttttagaggttataataggttaaaaaaaaagagagaaaaaaaaaaaagaaatgtcgttttcgtaaggtttatagtatattttatatcgtttataaaggttagtgggaagagagggtaaagggaagttttttgtcgaggttttaatgtttggattgatatttgagttattagggagttttagagggagttaaattagattttgggttaggaagatagggaatgtttagggtatttaagacgtttattttgtattgttttatttttgtttagtgttttgtatcggtatttgtgttgtttttggggatttagagataaagtttttttttaggggtaggggagaggggattagtaaatttataattattgtataaagagatgagggttgtgttaggagtttagagatagtttataagtttgttagttgtagggttttgataggggttagtaggaatcggagtgatagataagaagtgagtaagttttattttaggtagagaatagatttttaaagatttgataattataaagtaatttgtagtgggtagaagtttaaggtggggtcggatgagtgggtagaatgttgtaggttattgtaaagtgtttggattttattttgacggtagtagggagtagtggaaggatttagagtaggggatttatatggttagaattttggatggattattagatttaattgggataggggtgaatgaagttagagggagaagataatgtggttaaggagagggaataattggtattagacgggtggattattttttttaataatttgttttgtttgtaaatttttaattttgagggtttgagtgtggaatttggggtttaaatgttatattagttttagagttttttgttttaggtaggttgttggtttatttatttgtattatatgtaataggattttgatatagtataaggttttagaggtttggttagtttatttgaagtttttttagatatgattttatttaaattatgggattagttatagttagattagatagtaggtaggagggagattttgggttggttagtttttttattgggaagggattatagagaagttgtagatggtttgaaaaatttaattatttattaaatgtttagttatgtatttgtttttttagttattgagtatttggagaatatttagaatagattatattgtagggagggtttttgattttattaaggaatggtgagggttgggatagggatgggtattaattgtaggaagagagttattatgtgtgtaagaaagttagtaacggttgggaattttgtagtttgtgaaggggtttgattatatatatatatcgatatgtatatatttttttagttttttgttttagttagggttagtatgtatttttatgagtttttttttaggtagttttaaagtttttgtaggttatttggatttatttttagttttttgagagttttgtgaaattaggaggtttataggattagtgtagtaggtggaattttagggtggataagggttatgtgggttattgtataattatttttttttgtatgaatgttatttaagattgggaattagggaaagttattattattattagttgttataggattgtttttaagtatttattgttgaagttttttagtgttttttgagttatgggatggtatagtttagtttgttttagttttttgttttttattaggtaaaataggagtttttgaggaaatttagagtttagaaaagttttttttttttatgttaaatattttttttattttaagttttggtttgatttttttgtgtttgttttttagatttatgttaaggtagttataggggatataaggattgtttttgagtagtttttaatttgggaggagaggataagattagttaattataattttagaaagttagttgttgaagttagtatagggtgttgagaagatagggttagtattttgtttttaaatgttaggttgaggagtttggatttggtttagagagtagatttaagagatttatggaagagttttgagtagagtaaattggaaggatttaagtatttagaattgagggtggaagagattttttgtatatagtttagtttttttgttgtggtttttgagagatttgttattttttttagttttatttattttttttttttatgtttatattaaaattatttgttttttaaatgtgatgatttaaggggaaatttttaattaggttggttggaatggatggataagtgttgtggttattagtttagggagaggtttgggagtttaagtggtttagtttaaggtggatatggtgagaataatgggtagagtttttaggtttgattgtttttttttattttttagttagttttatttttgggtaggttattttgagattaggaaaggtaatattgaggtatgttaaagtgagattatttgaggattaatatatttaattaggatttttgttagatatttttagttatagaatatatagtagatttattttattttttttttttgtaaaggattttttttttagtgttttttagggtttttaaagtttttatattatagtttttattttaatagtagatttgaatttttgtttttttttttttagagtttagaaatgaatttgattttgttagaggaggggttttttttagggaaattatattggtgggagaagtggtttgagattaaagtttagttttattggggaggtaggttttaggatttagtgatttggtgggggcgggtagtattgtagtttttgtttgattagttttagttggagtataagaaaaggtaaagggggtatttttgttttttgttgttgtttttttgagatagggttttgttttgttgtttaggttgaaatatagtagtgttattatggtttattgtagttttaattttttgggtttaagtgatttatttattttagttttttgagtagttaggattataggtacgtgttattatattcggttaattttttttttttttcgagatagagttttattttgtcgtttaggttggagtgtagtggtatgattttggtttattgtaagtttcgtttttcgggtttatgttatttttttgttttagttttttaagtagttgggattataggtgttcgttaataggtttagttaattttttgtaattttagtagagatagggttttattatgttagttaggatggttttgattttttgatttcgtgattcgtttatttcggttttttaaagtgttgggattataggcgtaaggtatcgtattcggttatatttggttaatttttatatttttttgtagatagggttttggtatattgtttagtaggttggttttgaatttttaagtttaagtgatttatttatttcggttttttaaagtgttgggattataggtgtgagttattatatttagttaaaggaggtattttgattgagattgtttttagtacgaaaaattagaaataggttaggcgtagtagtttatgtttgtaattttagtattttgggagggtgaggcgggaggattgtttgaggttaagtatttaagattaatttggttaatatagtaagattttatttttatgaaaaaaaaaaagaagaaaaattagaaataaattgtgtttaaagtttggtggttgagattggattaagtttta

SEQ ID NO: 1315 - DNA, 15832 bp, Artificial Sequence
  chemically treated genomic DNA (Homo sapiens)
  unsure 791, 2400, 3281, 4994, 5001..5002, 5006, 5012, 5016, 5024: n is a or g or c or t
  unsure 5221, 5244, 6508, 12917, 12968, 12987..12988, 13055: n is a or g or c or t
gagtgtaagtatgggtagtataataattagaagatgttttttgtttgtagagaggagtggtattatagtttttattagagatgagaattgttaaagtttgagagatttttagagtattaatagataggaattaaagtaatattagaagattttgaagatgtttattgggtttatttttattggaaatatttgggtgtttgaaagatatttgaaattttttttttgttattgagttattggtattttattatagatgaaaggggaaaaggtaaggtttggggtagataaagtaaatattggtttttttttagaaatgttttggattttataaaagattggaataaattagtattgtttataattaaatgtttattttgtgttagatagtgattaaattttattttttgtgtttttttcgatttttataaaagtatttagagtttaggtatggtggtatgtattcgtggttttagttattagggaggttgaagtgggaggattgtttgagtttaggagttttgggttgtagtgtattaaatcgattaggtgtttgtattaagtttggtattaatatagtgattttttaggagtgagggattattaggttgtttaagtaggagtgaattagagtaggttagaatttttattttgagtattagtaggatcgtatttgtgaatagttattgtatttttgtttggttaatatagtaagatttttgttttttttaaaattttaattttttttttaatttaaatttttatatatttttatttttttttttttttttttntgagatagagttttttattatcgtttacgttggagtttagtggcgcgattttagtttattgtaattttcgtttttcgggtttaagcgatttttttgttttagtttttcgagtagttggaaatataggtgtttgttattacgtttagttaattttttgtatttttagtagagatagtattttattatgttggttaggttggtttcgaatttttgattttgtgattcgtttattttagttttttaaagtgttgggattataggcgtgagttattacgttttgattttttatttttaaaatagagatagggttttattgtgttatttaggttgggtttcgtttttttgggtttaagcgatttgtttgtttgggttttttgaagtgttgggattataggtgtgaattattatttttggttaatttaggttttttttaaattatattatgttgttttttgggtggaaattgaagtagaagtagtagtattaaagtgttaggaaaagggataatcgtattataggattggtttttttagttattaatagattttttttaatttttaagtgtattcggtttgtgtaatagttttggtatattttttgatattggtatgttaattttttttgggatggtaaattatatggtttgtgggttttggggaaagttattgtgtgaggaatttttttttttgattttttttttttttttgagataagagttttgtttttattgtttaggttggtgtgtaatggcgtgattttggtttattgtaatttttttttttcgggtttaaacgatttttttgttttagttttttgagtagatgggattataggcgttcgttattacgtttttttaaattttgtatttttattagagatggggttttattgtgttggttaggatggtttcgattttttgattttaggtgatttatttgtttttgttttttaaagtgttgggattagagatttgagttatcgtgttcggtcgaggaattttttttttgttgagagaagggatataaaggagaaatttttttatattagtttaaatgatttagaaataaattttgttttaatattatgttttttttgtagaaagttgtttaggttaagagtaaatagtttagattttttcgtttttttgttttttatttgagttaggttattatggtatgtgtttaaattatttttatttaaataaattttttttttttttttttttttttgagatggagttttatttttgttgtttaggttggagtgtaatagttcgaatttagtttattataattttttgttgttcgggtttaagtgatttttttaatatagtttttgagtagtaggagtttttgtaggtttttatgaacgttgttgtcggttataggtataatatttgaatcgtgggattagagattgtagtgagttaagattgcgttattgttttttagtttgggtaatagagtgagattttgttttaaaaaaaaaaaaaaaattttttatagagatggatttttgttttgttgtttaggatgattttgaaattttggttttaagtaatttttttgttttgggtttttaagtattgggattataggcgtgagttttngtattaggttttgtgtttaattttttgaggaattattaaattatttttcgtagtggttgtattattttatattattaataacgtttgagggttttgattttttttttttatatttttattaatatatggtatttttagagttttttggttttgtattttttttatagttattttagtggtggttgtaaattatggtgttttatggttttgatttgtatttttttaatgattaatgattttttttttttttgagacggagtttcgttgtgttttttaggttggagtgtagtggtgtgattttagtttattataagttttgtttttcggatttacgttatttttttgttttagttttttaagtagttgggattataggcgttcgttattatgttcggttaatttttttgtatttttagtagagatggggttttatcgtgttagttaggatggtttcgattttttgatttcgtgatttattcgtttcggttttttaaagtgatgggattataggtgtgagttatcgcgttcggttttttaatgattaatgatttgcgtatttttttatatgtttgtttatttgtatatttttttttttgagatcgagttttgtttttgttgtttaggttggagtgtaatggtgtaatttcggtttatcgtaattttcgttttttaggtttaagtaattattttgttttagtttttagagtagttaggattataggtatgtattattatgtttggttattatttgtatttttagtagagatgggggttttattatgttggttaggttggtttcgaatttttgattttaggtgatttatttgttttagttttttaaagttttaggattataggtgtgagttattgtatttggtcgntttttttttttttttttttttttgagatagggttttgttttgttatttaggttttcgagtgcggtggtataattatggtttattgtagtcgtgattttttaggtttaagtgatttttttattttagttttttgagtagttgggattatagatgtgtgttattatgtttagttaatttttgtatttttagtggagatgggtttttatcgtgttttttaggttgattttaaatttttgggtttaagtaatttttttattttggttttttaaagtgtttttttttttttatgttttttttattttagtttgtttttttatattgatatggtacggtatgtttgtgtgcgtgtatatagatataatgtttgatcgtagagattaggaagattttgttaaatttatttggaattttttgttgacggtagggaaaatagatgtaaggaaggtgggtgttagggaatagggaggtagtatgaggagagggattgatagaagaagataaagatacgggtgagggtttgttgagaattttaagttatttaagtagaaagggatttttaaggttaatttgtttaattttttggttttataaatgaggaaatagaggtttagagaagtgagatggtttgtttaatattatattgttgttttgtggtagagttgtaattagaatttaggttaaaagaaaagggattggagggtagtgtatatttaaggttttaaagagatattgtttagaaggagaaagagagattgatattttatagaaagaattgatgaatgtagatttttagtagaggtttggagtatgaagatataggggtaggaggggaaggtgtttagaagatattatagttaggtagagttaggttttggattttattttgttattatttattagttttagttttagtttttgatgtatttttagaatttttgtgaaaattagttttttttttttttttttttttgagatatagtttaattttgttagttaggttggagtgtagtggcgcgatttcggttttttgtagtttttattttttgggtttaagtgatttttttgttttagtttttcgagtagttgggattatagatatgtgttattttattacgtttagttaatttttgtatttttagtagagacggggtttttatgttggttaggttggtttcgaatttttgattttaggtgatttatttgttttggttttttaaagtgttgggattataggtttgagttatcgcgttcgatgaaaattaattttataaattaagtttgtaatattagtatagtttttaataagtgtttattaagtttttattaaggttatattattttagaagaggaaagatttttgattgtatgggttaaggtatggtttaaatgattttgtgaggatataggatagaggtttagtgtttttagagtttattttttttgtgtttttgttgtttgtaattgataaattttttatttggtttaggtaggggagtttagggttaggataggaggagagggtagagttgttattaattattaggtttgggttatattttggagaggaggaggggttgtttgtttgtttttttttataatttgtttttggggatttttaagtatatattgttattattttggaaagaaaaggttgagaacgtaaaattgaggatagaggaggaaagtagggtgatttttgatgttgttttaganaatggannntanggagtngtanaatagaanattagaagatttgattttgtttttagttaggaaaatagtttgggggagtaaaaagtattagggaaaagagtgggtattttgtttggaaaaaaggtaaagattttttgtgttattaaaggaattgattgtgtttatagttggcgagaaggagattataatataggaaaagatttgtcgtttgttggattattagtttnggtgagattatcgatatttcgtntaaaaggaatattcgtgtttttttattttaaaaaaaaaaaaattgtataatttagggatttttttttttttttttttttttgagatggtattttattttgttatttaggtgggagtgtagtggtgtaattacggtttattgtagttttaattttttgggtttaagggatttttttattttagttttttaagtagttaggattataggtgtaagttattatgtttgagtaatttttaaattttttgtggagataggagttttgttatgttgtttaggttggtttttgaattgttgggtttaagtgatttgtttattttagttttttaaagtgttgagattataggcgtgagttattgcgtttagtttaattaaattattattattgtttttttttgagatagagttttagtttgttgtttagattggaatgtagtggtgtagttttggtttattataatcgtagttttttagatttaagtagtttttatgttttagttttttgcgtagttaggattataggtgtgtattattacgtatagttaatttttgtatttttagtagagacggagttttattatgttgtttggattagttttaaatttttggttttaagtgattcgtttgtttcgtttttttaaagtgttgggattataggtttgagttatcgtgttcggttacgttattggaagttttatgtagaaatatgtaaattaattatgtggtttatatgttatatttttttaagtttggttagtataagtgagtttttttaagatgaattaattgattaaaattgatatgggtatttaagttaaagtttgaatgtttttttttttttttttttttgagatagggtttttatcgtttaggttggagtgtagtgatgcgatttcggtttattgtaattttaatcgttttggttttagggatttttttattttagtttttttagtagttaggattataggtatatattattttatttggttaatttttgtattgtttggtagagatggggttttattatgttggttaggttggttttaaagttttgattttaggtgattcgttcgttttagttttttaaagtgttgggattataggtataagttagcgtgtttagttttaatgtttttaggaaaaaaaagttagtaatgtttttatttttgatagtttaattaatttaggtgtggaaggagttttattttatatgtttaggagagatagtgagaggaatttttttgtttggtttttttattttatntagtaagtagatttagaaaagtaatttaaattgtttagggttatataatttaattagataaggttttagatattaatttttaatttagggttgtaatggtttttgttttggtaattatagattggttttattttagttattgtataataaaaaatagtatagggttattatagtagagttggggtaattatagttgttgatttggagatgtgggcgaattttttttataaaattaggttttggggagataatagaagggtgatattttttttttgagattgagttttgtttttgttgtttaggttcgagtgtaaaggcgtaatttcggtttattgtaattatcgttttttgggtttaagcgatttttttgttttagtttttcgagtagttgggattataggtatgggttattacgttaggttaattttgtatttttagtagagacggggtttttttatgttagttaggttggttttaaatttttaattttaggtgattgttcgttttggttttttaaagtgttacgattataggtataagttatagtttcggtattttttttttttttttttttttttataagataaaaaaatttttgttgtttaggttggagtgtagttttaattttttgggtttaagtgatttttgtattttagtttttaagtagttggattataggtgtgtgttattatagttggttagtttttaaattttttgttgagatagggttttattatgttttttaggttggttttaaatttttggttttaagtaatttttttgttttggttttttaaagtgttaggattataggtataagttattatatttagagatggtatttaatttaataatagtttggttttgtttttgaggtgtaggaggtgtttttttaatatatgattatgatgaaaattaagattataaaaaagaagatttttggggttatgtagttgtaatttttatttagtagtttgaggtgttacgtggatgaatttttttgattgttatttaaagatttatttttattttttaattattttattaattttttttaggattatattatatatagtaatttgtataaagaataacgttgttagggggtagaattgaatgttagttatgtatttagaggaatttaattttttttatttttttatagagttgtgaggggatgattttttttaggaagagggatattttttttatttttttttttttttttttgagagaagattttattttgtcgtttaggttggagtgtagtggtaagattttagtttattgtaatttttgttttttgagtttaagtgatttttttgttttagatttttgagtagttgggattataggcgtacgttattacgtttagttaagttttgtatttttagtagagatggggttttattatgttggttaggttggttttaaatttttgattttaggtgatttattcgtttaggttttttaaagtgttgggattatagacgtaagttattgtgttcggttgtttttttttattttgataaggtagaaggttaagtatgtgggaatagatataagtaaattggtggattttggtattggaaaaaatgaggtagttttatttaaatgtatttattttattaatgaaatatgaagtaagattatttgttgagagtgaattggaggtggtattggagatgttagaagagagaaggtgtgaaataattattatgtagggtagaaaagagaatttattagggaaatatagaattatttgggagtgttgcgttttaggggtatttttttttttttgagatagagttttgttgttatttaggttagagtgtagtggcgcgttttagtttattgtattttttgttttcgggtttaagttatttttttgttttagttttttaaatagttgggattacgggtatgcgttattacgtttagttaatttttgtatttttagtagagacggggttttattatgttggttaggttggtttcgaatttttgattttaagtgatttgttcgtttcggttttttaaagtgttaggattataggtacgagttatcgtatttattttaggggtataaatttaaagtgatgttagttagttagatatagagatttttttttttaatatttagttatttaggtatatatatggagaagttgaattgttggatttaattggaatttgatttttttttaggaaagttttatggagggtaagagggataaggaagttaataatgtttgtaagtttatggttttggatgtgaaggggagtgagtggattatttaaaaaataaaagatcgggtatagtgatagatatcggaatagttacgatagtagtttttaatagcggtatagtagtttattagggcgtggtggtacgcgtttatagttttaattacgcgggaggttgaggtaagagaatagtttgaattcgggaggtggagattgtagtgagttaagatcgcgttacgtgcgtattttagtttgggtgatagagtaaggttcggttttaaaaaaaaaaaaaaaaaaaaagaatttttaaggtttaaatgggtagagaaaaggataatagaataaggagtttagaaaaaatattttataatttatgttaattttattaggtattttagaattttgatggaatattgattatttgataaatttatataatagggattaataggaaatcgaagataaaatagttttttgaaggaatgtggtagggaatcggtaatggagagttaaatttgggaaattattaggaggagtttgtaacgataaaatatttgtattttttttttataatatggggcgagtttggtggtttggtaaattaaaattagggtattatttataatgttaaaaataaggggtaatttgaagggttttaatttagtacgtttataggtttgtgtattttaaggagtttatgtgttgtttttaattttttatcgattttatgtttttttttcggtagggttttttattttaaattaaggttttagtttttatattaggttatatatttattttaaaggttagtagaacgtttagtttttaagaattattcggaatttttttttttcgttttttattcgggttgaattttgattttcggtttttgtggatattatagtatttttgttgtttttttagtttttattaaaattagcgtttttattttgtttcgtagttggtgtcgacgtggagtcgtaaaagaaacgtcgtcgttgattggttatacgtttttattaggtttcgtttaggataaggattattgggtaaggtttgttttattggttaattattgtattagtttgtttatcggaagtaaagtgtttaattagaaggtttaggtgtttgattgttagtttgaatatttaataaaacgttaaaattttacgatttattggggcgggagggttagtggggcggggttgtttttatggggaatagaagaagcgattgttaatttttaattggtagggtcgaggatacgtgatattgtcggattgatttagcgatttttaaatcgtattttttttagggggcgttgtgtttttttagtttttaatattggcgttttttaatcggaattttgttttaatttttatttttagcgttcgtattaggtttatgatttttgtggttagttttttttttatgttcgtttaggttattttagtatttttatagaaagtttgtataattatagagtagagttaagaaaggtttaatatgttaattatataaattaaggttgttaggagttgatagtcgtaataataatttttttaaggtggagttttaggttttgttgggtttgaggaatatgagaagttagtttgtaaaggttaatttgagtttaacgtgaaatcggttttggagatggggtttgcgggataaacggggaaagggatgggattagaataagagaggggttatagggagtaaattttggggttttttaatagaaataagtcgttgtgtttgggcgcggtggtttaagtttgtaattttagtattttgggaggtcgaggcgagcggattatttgaggtcgggagtttgaaattaatttgattaatatggagaaatttcgtttttattaaaaaaaaaaaatataggtcgagcgtgatggtttatatttgtaattttagtattttgggaggtcgaggcgggcggattacgagattaggagattaagattattttgattaatatagtgaaatttcgtttttattaaaaatataaaaaattagtcgggcgtgggtggcgggcgtttgtagtttttgttattttggaggttgaggtaggataatggcgtgaatttaggaggcggagtttgtagtgagttgagatcgcgttattgtattttaatttgggtgatagagcgagatttcgttttaaaaaatatatatatatataaaattagtcgggcgtggtggaatatgtttgtaattttagttattcgggaggttgaattaggagatttatttgaatttgggaggcggaggttgaggtgaggcgagatttcgttattgtattttagtttgggtaataagagcgaaattttattttaaaaaaaaaagaaaagaaaagaaaaggagaagagaagagaaaagaaaaggagaaagaaagaaaagaaagaaagaaaggaaggaaggaaggaaggaaggaaagaaagaaagaaagaaagaaagaaagaaagaaagaaagaaagagaaggaaagaaaggagaggaaagaaatgaggcgttgtaaaatgagaaaagagaagtttattgaatgtaagaattttagaatagggaatgattttgaagaaggggtttttttaaaggttcgtgtagtaaatatttattagagttgcgggtttattatattgattaggttggtttttaacgttcgattttaggtgatttatttattttagtttttaaagtgtagggattataggtgtgagttattaattaagttcggttaatttaatttttttgagttttattttttttttgagttttattgaaaaatggagataataatgagaatgtttatttagcgaagttgttaggaatatataatgggattaatataaaaattagtttgttatttattagatgaaagtttagatatttggaggttagagtgatttaagggtttgaggaatttcgaatgttttatttggaggttagattttggtagagagatgtttgggataaattgaagttagtaaagagtttgattttgggggagagtaagagttaggttgtattagtgttggcggggaggggtggtggttagatttttaggaattagtttgtaggtcgtggtttttttattttagtattattgggcggggttagttttagttacgttatgggtatagtgttaggtttatgggttttagttattttttaggaattttagaattttcgttttattttatattgttgtaattttttaaagtgggtggagttgtttaggaagttttattttttgtttttttttagaggatggaaggttagatttttggttatttattaatttttttttataggtattttttttattttagatttttatttttgtttttgttgtttttttttatttggaatgttttttttggttttttttattaatttgaggtagtgtggagtagacgagagatttgggtttgagttttagtttagtatttagtagcgtggatttgggtaaattatttaatttttttgaattttagtttttttttggtaatgagtgagaatagaggttttattataggttgtgtaagggattagatgaagtaatgtatatatagtgtttatataggaaatatattaatgttggttttttttttataatttattttttaaggagagtttattattattttaggaatgtaatattttttttggttatttttatatatatatatagtttttttttttttttttttttttttttttttttttttttaaatttttttgagatagagtattatttttgttagttaggttggagtgtagtggcgtaatttcggtttattgtaattttcgtttttcgggtttaagtaattttttgttttagttatttgagtagttgggattataggtatttattattatatttggttaattttttgtatttttagtagagatagggttttatattttggttaggatggttttgaatttttgattttgtgatttatttgttttagttttttaaattgttgggattataggagtaagttatcgtgttcggttaatttttgtagagatagggttttattatgttggttaggttggttttaaatttttgattttaggtgattttttcgttttagttttttaaagtgttgggattataggtgtgagttattatgttaggtattttntagttttaaatggttgaatttgatgattgtgaaatgggtaggataaagatnaattaaatttttagttttnntaggaatgtaaagttttaggattttttttaaaatttagaaagtttgtttgttggaaaattttttttntttgagacggagttttattttgtcgtttaagttggagtgtagtggtttattgtaattttcgtttttcgggtttacgttatttttttgttttagttttttgagtagttgggattataggcgcgtgatattatgatcggttaatttttgtatttttggtagagacgggttttattatgttggttaggttggttttaaatttttgatttcgtgattcgttcgtttcggttttttaaagtgttggattataggcgtgagttatcgcgttcggttttgttggaggattttttatttaggggttatatagtttttaattttttaattattatggaagtgaaagaattatagaaatgagggataaagtagtattgttgggaagagagatgaattgaataaggagaaattagattatattttagatttgaggtttgagagtattattagaatattttgtttttttagtttggtaatttaggagtttttatttaaataatatttagtaaaggaaaaaaattaaaaggggttagatttatttttgatgagttttgggttacgatttgtattatgatttatttttttatttttttttatatttttttgtttttgtttttgaaaataaaaagttagtttttgagagattgaattgatagattttgtgttattttttagtttatttatgtttttaaattaatttcgaggtagaattgttttatttttttttggttttagtttttttttaaaattatataatagaaaaggagttgtagaaaattagttgatcgagttatttagggtaattggttatggatgggatatttgtattgagagtgagaaaataggtcgggcgtagtggtttatatttgtaattttagtattttgggaggttaaggtatgtggattataaggttaggagttcgaggttagtttggttaatatggcgaaatttcgtttttattaaaaatataaaaattagttaggtatggtggtgggggtttgtaattttaattattcgggaggcggaggaaggagaatcgtttgaatttggaaggtaaaggttgcggtgagttaagattatgttattgtattttagtttgggtaataagagtaagattttgttttaaaaaaaaaaaaaaaaaaaaaaaggagtgtgaaaataaaaagttaaataaaaaagtaggttttatttgtagtatatataatttagattatataataggaaggattttttgaagagatgggtgtggttaaatattagaagaggtgatataggttagggaatgtaaggttaggagagatttttttaataatttgatgtaaggaaatttattttgtttaaaaataggagggatagaatgtgagagggtttttgttagtataagtattttataagtgtatggatttattttttgaatttatttttattagttgttttttgggtattttgttttttttttttttaattattttagtataagtgggtatataggtattgattttttatttttgttttatttgatttgtttttttagtttttttttttataatttgtttttttgttaatatttaaattttaattaagttatgttaatggagtaaagtaagaaatagtagtaagtatttagataaaaaagattttaaatttgttattaggtttcggtaaaaatttggataattgtatttattttttgttttttaggtagatttggttttttagggtttggttttttttatatggaggtttttttttttttttttgattatgtgatagtttttttagatttttgatataatttatattttgttagggattaatttttttttattattgtgaagaagagggaaaaaatatatataaatacgtcggaaatttataataaggtttttttggagggtaagatatggggagagttagaagtagcgttaattgttttttgggggttttagtttaagtcgaggtttgtttttagtaattaattattaaaataagttggttagagtaatagtatagtttattttgattatttaatttgaagtgttaataaattaaattttaattaattaaattaggtgtgtaataatttagatggatatttcgatattaatataattataataaaaatttttattgttgttagggattttatcgggggtagtgttggtattgttcgcgttttagttgagaaatatatttttatagcgtaggaatgaggagattgttttttttaataaaatggagggggttaggtattagtaaggacgtagttgggagaggggtataggggattgttaggaacgagatgggagtgttttaggggtttaatgtaattgatatttttgtttagagtagggggaggggggtatttaggttaagtatttttattgttagggttaaaggaatttaataaaagttttattaagatgatttaggaagtaaaggttaaggagtaatattaatttttaaagttattgatatattttgtatagtttttttttttatatatatttatatttttgtgtattttggatggtttgattttttaatgaggtttagaagttttagtagttaatttagtggttatagttttggcgaggtgatagattataatataggaaaagattttttattttaagtgattgatgaatttagtatgagtgaggatggggaggaggcggttttttttttttttaggggaagttggagggagtttttttaaggaggtagtgtaaatttgttgattttagtaggtgtagttttaatatttttttttttttgatatagg

SEQ ID NO: 1316 - DNA, 15832 bp, Artificial Sequence
  chemically treated genomic DNA (Homo sapiens)
  unsure 2778, 2845..2846, 2865, 2916, 9325, 10589, 10612, 10809, 10817: n is a or g or c or t
  unsure 10821, 10827, 10830..10831, 10839, 12552, 13433, 15042: n is a or g or c or t
tttgtgttaaaggaaaagaggtgttagagttatatttgttagggttagtaagtttgtattatttttttggaggggttttttttagttttttttgagggaaggagagatcgttttttttttatttttatttatgttggatttattaattatttaagatggaaagtttttttttgtgttgtgatttgttatttcgttaaaattatggttattgagttaattattagagtttttaagttttattaaaaaattaggttatttaaagtgtataaggatatgagtatgtatggaggaggaaattatgtagaatatgttaatgattttaaaggttgatgttgttttttggtttttgttttttgaattattttaatggggtttttgttaaatttttttggttttaatagtagaggtatttggtttaaatgtttttttttttttgttttgggtaaaggtattaattatattaagtttttaaagtatttttatttcgtttttggtagttttttgtgttttttttttagttgcgtttttgttggtgtttggttttttttattttgttaggagaagtaatttttttatttttgcgttgtggagatatattttttagttagggcgcgagtagtgttagtattgttttcggtgaggtttttggtagtaataaaaatttttattgtgattatgttggtgtcggggtgtttatttgggttattgtatatttagtttaattgattgaagtttaatttattgatattttaaattaaatgattagaataaattgtgttgttattttggttagtttgttttaatggttgattgttggaagtagatttcggtttgaattaaaatttttaaagagtaattgacgttgtttttaattttttttatgttttgttttttaagaagattttgttatagattttcgacgtatttatatatatttttttttttttttttatagtggtgggaaagagttggtttttggtaaggtataaattatattaaagatttaggggagttgttatatggttagaagaggaggagggggtttttatgtgaggaaaattagattttgagaagttaggtttgtttgggaggtagaggatgagtgtaattatttaggtttttgtcggagtttagtggtaggtttagggttttttttatttagatatttgttgttgttttttattttattttattgatatggtttgattagagtttggatgttgataagaaaataggttgtggaaagggaaattagaggagtaaattagatggagtagggataaagaattagtatttatgtatttatttgtgttggagtaattaggaagaggaaaggtagagtgtttaggggatagttgatgaagatggatttagagaatgagtttatgtatttgtaagatgtttgtgttggtaagggtttttttatattttgttttttttgtttttgggtagaataggtttttttatattagattattagggggattttttttggttttatattttttagtttgtgttattttttttggtgtttgattatatttatttttttaggaagttttttttgttgtgtaatttaagttatatatgttgtagatgaagtttgtttttttatttggttttttatttttatatttttttttttttttttttttttttttgagatagagttttgtttttgttgtttaggttagagtgtaatggtatgattttggtttatcgtaatttttgttttttaggtttaagcgattttttttttttcgtttttcgagtagttgggattataggtttttattattatgtttggttaatttttgtatttttagtagagacggggtttcgttatgttggttaagttggtttcgaatttttgattttgtgatttatatgttttggttttttaaagtgttgggattataggtgtgagttattgcgttcggtttatttttttatttttaatgtagatattttatttatagttaattgttttggatagttcggttaattaattttttgtaattttttttttgttgtgtggttttagagggagattaaaattagaggagaatagagtaattttgtttcggggttgatttgggggtataaatagattgaaagataatatagagtttgttaatttagttttttagagattagttttttgtttttaggagtaaaagtagggagatgtgggggggagtaaagggataaattatgatataaatcgtgatttaggatttattaggaatggatttagttttttttgattttttttttttgttgagtgttatttaagtgagggtttttggattattaaattgagaaggtagaatgttttaatggtgtttttaggttttaggtttggagtatagtttgatttttttttatttagtttatttttttttttagtagtattgttttgttttttatttttgtgatttttttatttttatgatagttgaagaattagggattatgtgatttttgggtaaaaaattttttagtaaggtcgggcgcggtggtttacgtttgtaatttagtattttgggaggtcgaggcgggcggattacgaggttaggagtttgagattagtttgattaatatggtgaaattcgtttttattaaaaatataaaaattagtcggttatggtgttacgcgtttgtaattttagttatttaggaggttgaggtaggagaatggcgtgaattcgggaggcggaggttgtagtgagttattgtattttagtttgggcgatagagtgagatttcgttttaaanaaaaaaaattttttaatagataggttttttgagttttgagaaaggttttgagattttgtatttttannaaagttaggggtttggttngtttttgttttgtttattttatagttattaaatttagttatttgaagttgnagggtgtttggtatggtggtttatatttgtaattttagtattttgggaggttgaggcgggaggattatttgaggttaggagtttgagattagtttggttaatatggtgaaattttgtttttataaaaattggtcgggtacggtggtttatttttgtaattttagtagtttgggaggttgaggtaggtggattataaggttaggggtttaagattattttggttaagatgtgaaattttgtttttattaaaaatataaaaaattagttaggtgtggtggtaggtgtttgtaattttagttatttaggtggttgaggtagagaattgtttgaattcggaaggcggaggttgtagtgagtcgagattgcgttattgtattttagtttggttgataagagtgatattttgttttaaaagaatttaaaaaaagagagagagagaaagaaagaaagaaaagaggattatgtgtatgtgtgaaagtagttagaaagggtgttgtatttttagagtagtaatgaattttttttggagagtagattataagaagggaattaatattaatgtgttttttgtataagtattgtatgtgtattgttttatttgattttttatataatttgtgatggaatttttgtttttatttattattaaggggaaattgaggtttaaggaggttagataatttgtttaagtttacgttgttaggtgttgagttgagatttaaatttagatttttcgtttattttatattgttttagattggtagaaagggttaaggaaggtattttaggtagaggggagtagtaggggtaaagatggaggtttggaatgagaaggatgtttgtgaaaagaagttggtaaatggttagggatttggttttttattttttaaggaggagtagagggtgggattttttaggtagttttatttattttagagggttgtaatagtgtgaggtggggcggaggttttggggtttttggaaggtgattgaagtttataagtttggtattgtgtttatggcgtggttggaattagtttcgtttagtagtgttgggatgggagagttacggtttgtaggttagtttttggaagtttagttattattttttttcgttaatattagtgtagtttagtttttgtttttttttagaattaggttttttattggttttagtttattttaagtatttttttattagagtttgatttttagatagggtattcgaagttttttaagtttttgggttattttggtttttaggtatttaagtttttatttaataagtaatagattaatttttgtattgattttattatatatttttaataatttcgttaagtgggtatttttattattgtttttattttttaataaagtttagaaaggaaataaagtttagaaaggttaggttggtcgggtttggttggtggtttatatttgtaatttttgtattttggaggttgaggtgggtggattatttgaggtcgggcgttagagattagtttggttaatgtgataaattcgtagttttagtgaatatttattatacgagtttttaagagaattttttttttaaaattattttttattttgaaatttttgtatttagtaaatttttttttttttattttgtaacgttttatttttttttttttttttttttttttttttttttttttttttttttttttttttttttttttttttttttttttttttttttttttttttttttttttttttttttttttttttttttttttttttttttttttttttttttttttttttttttttttttttttttttttgagatggaatttcgtttttgttgtttaggttggagtgtaatgacgagatttcgttttattttaattttcgttttttaggtttaagtgagttttttggtttagtttttcgagtagttgggattataggtatgttttattacgttcggttaattttgtatatatgtatattttttgagacggagtttcgttttgttatttaggttggagtgtagtggcgcgattttagtttattgtaaatttcgttttttgggtttacgttattgttttgttttagtttttagagtagtagggattataggcgttcgttatttacgttcggttaattttttgtatttttagtagagacggggttttattatgttagttaggatggttttgattttttgatttcgtgattcgttcgtttcggttttttaaagtattgggattataggtgtgagttattacgttcggtttgtattttttttttttagtagagacggggtttttttatgttggttaggttggttttaaattttcgattttagatgattcgttcgtttcggttttttaaagtgttgggattataggtttgagttatcgcgtttaggtataacggtttgtttttattggaaaattttagaatttattttttataattttttttttattttaattttattttttttttcgtttgtttcgtaaattttatttttaaagtcgattttacgttgagtttaagttggtttttataaattgattttttatgttttttaggtttagtaaagtttggaattttattttagggagattgttattgcgattattaatttttggtagttttggtttatgtagttaatatgttgggttttttttggttttattttatggttgtgtagattttttgtgaggatgttgaagtgatttgagcgagtatgagggaagggttagttatagagattatggatttaatgcgggcgttgaaaatagggattagggtaggatttcggttagaaagcgttagtgttaaaggttaaggagatatagcgttttttaaagagggtgcggtttaaaaatcgttaaattagttcgataatattacgtgttttcggttttattaattgaaaattaataatcgttttttttgttttttatggaaataatttcgttttattaattttttcgttttaatgagtcgtgaggttttggcgttttattgagtatttaagttgataattaaatatttgagttttttggttggatattttgttttcggtaagtaagttagtataataattggttaataaagtaagttttatttaatgatttttattttaggcggggtttaatgggaacgtatggttaattagcggcggcgttttttttgcggttttacgtcggtattagttgcggggtaagatggaggcgttgattttggtaggagttggaggggtagtagagatgttgtggtgtttataggggtcgggagttagggtttagttcgagtgggagacggggaaagagagtttcgggtaatttttggggattgagcgttttgttgatttttggaataagtgtgtggtttagtgtaggagttaaagttttggtttagagtaggaagttttgtcggggagagggtatagagtcggtggaaagttgaaggtagtatatggattttttaggatatatagatttgtaggcgtattggattaggattttttaggttgttttttatttttagtattgtggatgatattttgattttaatttattaaattattaaattcgttttatattgtaagaaaagaatatagatgttttgtcgttatagattttttttgatggttttttaagtttgattttttattgtcgattttttgttatatttttttaggaaattgttttgttttcggttttttgttaatttttattatataggtttgttaaataattagtattttattaaagttttgggatatttgataaagttagtatggattgtggaatattttttttagattttttattttgttatttttttttttatttatttagattttaggaattttttttttttttttttttttttgagatcgagttttgttttgttatttaggttggagtgcgtacgtggcgcgattttggtttattgtaatttttatttttcgggtttaagttatttttttgttttagtttttcgcgtagttgggattataggcgcgtgttattacgttttgatgaattattgtatcgttattaaaggttattgtcgtaattatttcggtgtttattattgtgttcggttttttattttttaaataatttatttatttttttttatatttagaattataaatttgtagatattgttaatttttttgttttttttgttttttatagaatttttttggaaaaaaattaaattttagttaaatttaataatttagtttttttatatatatatttaggtagttgaatattgaaggagaaaatttttgtatttggttaattagtattattttaaatttatgtttttaagatgggtgcggtggttcgtgtttgtaattttagtattttgggaggtcgaggcgggtagattatttgagattaggagttcgagattagtttggttaatatggtgaaatttcgtttttattaaaaatataaaaattagttgggcgtggtggcgtatgttcgtaattttagttatttgggaggttgaggtaggagaatagtttgaattcggaagtaggggatgtagtgagttgagacgcgttattgtattttagtttgggtgatagtaagattttgttttaaaaaaaaaaaaatgtttttaaaacgtaatatttttaaataattttgtatttttttggtaaatttttttttttattttgtataatgattgttttatatttttttttttttaatatttttaatattatttttagtttatttttagtagatgattttgttttatgttttattgataaaatagatgtatttagatgagattgttttattttttttaatattaaaatttattagtttatttgtatttatttttatatgtttggttttttattttattaaggtgaaagaaggtagtcgggtatagtggtttacgtttgtaattttagtattttgagaggtttaggcgggtggattatttgaggttaggagtttgagattagtttggttaatatggtgaaattttatttttattaaaaatataaaatttagttgggcgtggtggcgtgcgtttgtaattttagttatttaggagtttgaggtaggagaattatttgaatttaggaggtagagattgtagtgagttgagattttgttattgtattttagtttaggcgatagaatgagatttttttttaaaaaaaaaaaaaaaaagatgagaaaaatatttttttttttaaggaaagttatttttttatagttttgtgaagggatgaaaaaaattggatttttttgagtgtatagttaatatttaattttgttttttagtaacgttgttttttatataggttattatgtgtgatgtagttttgaggaaggttgatgaagtaattaagaggtaggggtggatttttaggtggtagttaaaagagtttatttacgtagtattttaaattattggatgaaagttgtaattatataattttaggaatttttttttttgtggttttaatttttattatagttatatgttagggagatattttttatattttagagataaagttagattgttgttaggttagatgttatttttgggtgtggtggtttatgtttgtaattttagtattttgggaggttaaggtaaaaggattgtttgaggttaagagtttgagattaatttgggaaatatagtgagattttgttttaataaaaaatttaaaaattagttagttgtggtggtatatatttgtagtttagttatttggaggttgaggtgtaagggttatttgagtttaggaggttgaggttgtattttagtttggataatagaggtttttttgttttataaaaaaaaaaaaaaaaaaaaaagatgtcggggttgtggtttatgtttgtaatcgtaatattttgggaggttaaggcgggtaattatttgagattgggagtttgagattagtttgattaatatggagaaatttcgtttttattaaaaatataaaattagtttggcgtggtggtttatgtttgtaattttagttattcgggaggttgaggtaggagaatcgtttgaatttaggaggcggtggttgtagtgagtcgagattgcgtttttgtattcgagtttgggtaataagagtaaaatttagttttaaaaaaaagatgttatttttttattgtttttttaaggtttgattttgtggaggggattcgtttatatttttagattaatagttgtagttgttttaattttgttgtgatgattttgtgttgttttttattatgtagtggttggagtagaattaatttatgattgttaaagtaagagttattgtagttttgggttgggagttagtgtttagagttttatttaattgaattgtgtggttttaggtaatttgaattgtttttttgagtttgtttattangtagaatggaaaaattaaataaaaaaattttttttattgttttttttaagtatataaaataaggttttttttatatttgggttgattagattattaaggatagaaatattgttaattttttttttttaagaatattgaggttgggtacgttggtttatgtttgtaattttagtattttgagaggttgaggcgggcggattatttgagattaggattttgagattagtttggttaatatggtgaaattttatttttattaaatagtataaaaattggttagatggggtggtgtgtgtttgtagttttagttattagggaggttgaggtgggagaatttttggaattaaggcggttgaggttgtagtgagtcgagatcgtattattgtattttagtttgggcgataaagattttgttttaaaaaagaaaagaaaagaaaatatttaagttttggtttgaatgtttatgttaattttggttaattaatttattttggaagaatttatttatgttgattaaatttagaagaatataatatataaattatatggttaatttatatatttttatataaaatttttagtggcgtggtcgggtacggtggtttaggtttgtaattttagtattttgggaggacgaggtaggcggattatttgaggttaggagtttgagattagtttaggtaatatggtgaaatttcgtttttattaaaaatataaaaattagttgtgcgtagtggtgtatatttgtagttttagttacgtaggaggttagggtatgagaattgtttgaatttgggaggttgcggttgtagtgagttaagattgtattattgtattttagtttgggtaatagattgagattttattttaaaaaaaaataataataataatttaattgggttgggcgtagtgatttacgtttgtaattttagtattttgggaggttaaggtgagtagattatttgagtttaatagtttaaagattagtttaagtaatatagtaagatttttgtttttatagaagatttaaaaattatttaggtatggtggtttgtatttgtagttttagttatttgggaggttgaaatgagaggattttttgagtttagaaggttgaggttgtagtgaatcgtgattgtattattgtatttttatttgggtaatagagtgagatattattttaaaaaaaaaaaaaaaaaaaaaaatttttgaattgtataatttttttttttttgagatggagaaatacggatgttttttttgnacgagatgtcggtaattttattnggattgatggtttaatagacggtaagtttttttttgtgttgtgatttttttttcgttaattatggatatagttagtttttttggtagtataggaggtttttattttttttttaggtaaaatgtttatttttttttttaatattttttatttttttaaattgtttttttggttaaaggtagagttagattttttgatnttttgttntgtngttttntgnnntttattntttagggtaatattaggggttattttgttttttttttttgtttttagttttacgtttttagttttttttttttaagatgatgatagtatatgtttgaggatttttaagaataagttgtggaaagaggtaagtagatagtttttttttttttttaagatatggtttaggtttggtggttgatagtagttttgttttttttttttattttggttttgggtttttttgtttgggttagataagaggtttattagttgtaggtagtagaggtatagaaggaatgggttttggagatattggatttttgttttgtgtttttatagggttatttgggttatattttaatttatataattagaagtttttttttttttgaggtaatataattttagtaaagatttagtaagtatttgttaagaattgtgttggtattgtaagtttagtttataagattggtttttatcgggcgcggtggtttaggtttgtaattttagtattttgggaggttaaggtaggtggattatttgaggttaggagttcgagattagtttggttaatatggaaatttcgtttttattaaaaatataaaaattagttgggcgtggtggggtggtatatgtttgtagttttagttattcgggaagttgaggtaggagaattatttgaatttaggaggtggaggttgtagagagtcgagatcgcgttattgtattttagtttggttgatagagttagattatgttttaaaaaaaaaaaaaaaaaaaagattggtttttataaagattttaaaggtatattagaaattgagattgaagttgataaataatagtaggatgaggtttagaatttgattttatttgattataatgttttttaggtattttttttttttgtttttgtatttttatattttaaatttttattggaagtttatatttattagttttttttgtggagtgttagtttttttttttttttttgggtaatgtttttttagagttttgaatatatattgttttttagtttttttttttttgatttgggttttagttgtagttttgttataaagtagtagtgtgatgttgggtaagttattttatttttttgggtttttgtttttttatttgtaaaattagggagttggataaattgattttggaggtttttttttgtttggatagtttagaatttttagtaaatttttattcgtgtttttatttttttttgttagtttttttttttatgttatttttttattttttgatatttattttttttgtatttgttttttttgtcgttagtaagagattttaagtagatttggtaaggtttttttgatttttacggttagatattgtgtttatgtgtacgtatatagatatatcgtgttatattagtatagggaagtaggttaggatgaaggaaatatgggagaggggaagtattttgggaggttaaggtggaaggattgtttgagtttaggagtttgagattagtttgagaaatacggtgaaaatttatttttattaaaaatgtagaaattagttaggtataatggtatatatttgtggttttagttatttaggaggttgaggtgggaggattatttgaatttgaaaggttacggttgtagtgagttatgattgtgttatcgtattcgagagtttgggtgatagagtaagattttgttttaaaaaaaaaaaaaaaaaaaaaaancggttaggtgtagtggtttatatttgtaattttaggattttgggaggttgaggtaggtggattatttgaggttaggagttcgaaattagtttggttaatatggtgaaatttttatttttattaaaaatataagtaatagttaggtatggtggtgtatgtttgtaattttagttattttggaggttgaggtaggataattgtttgaatttgggaggcggaagttgcggtgagtcgagattgtattattgtattttagtttgggtaataagagtaaaattcggttttaaaaaaaaagatatgtaaatagataaatatatgaaaagatgcgtaaattattagttattaaggggtcgggcgcggtggtttatatttgtaattttattattttgggaggtcgaggcgggtggattacgaggttaggagatcgagattattttggttaatacggtgaaattttatttttattaaaaatataaaaaaattagtcgggtatggtggcgggcgtttgtagttttagttatttgggaggttgaggtaggagaatggcgtgaattcgggaggtagagtttgtagtgggttgagattatattattgtattttagtttgggggatatagcgagatttcgttttaaaaaaaaaaaaaattattagttattagggaaatgtaaattaaaattatgagatattatggtttataattattattaggatggttgtaaagaaaatataaaattaaaaaattttgaaaatattatgtgttggtgaggatgtggagaggagaaattagaatttttaaacgttgttggtaatgtaaaatggtgtagttattgcggaaaataatttggtagttttttaagaagttaaatatagggtttggtgtngaggtttacgtttgtgattttagtgtttagaagtttaaggtaggaagattgtttgagattaggattttaaggttattttgggtaataaagtaagagtttatttttataaagaattttttttttttttttgagatagagttttattttgttgtttaggttagagagtaatggcgtaattttggtttattgtaatttttagttttacggtttaggtgttgtgtttgtgatcgatagtagcgtttataaagatttgtaaaaatttttattatttaggagttgtattaggaggattatttgaattcgggtagtaggaggttgtggtgagttgagttcgagttattgtattttagtttgggtaataagagtgaaattttattttaaaaaaaaaaaaaaaaaaaaaaggtttatttagatgggaatgatttgaatatatgttataataatttgatttaagtagaaagtagaaagacggaaaaatttgagttatttatttttgatttaaataattttttataaaaggaatataatattgagataaaatttatttttaaattatttgagttaatatgggaaagttttttttttatatttttttttttagtagaaaaaaaatttttcggtcgggtacggtggtttaagtttttaattttagtattttgggaagtagaagtaggtggattatttgaggttaggaggtcgagattattttggttaatatagtgaaattttatttttaataaaaatataaaatttagaagggcgtggtggcgggcgtttgtaattttatttatttaggaggttgaggtaggagaatcgtttgaattcgggagaaggaggttgtagtgagttaagattacgttattgtatattagtttgggtaataagagtaaaatttttgttttaaaaaaagaaaagaagttaagaaaaaaaattttttatatagtaattttttttaaaatttatagattatatagtttattattttagaggaaattaatatattaatattaaaaggtgtattaagattattatataagtcgaatatatttgggggttgggaagaatttgttgatagttagaaaagttagttttataatgcgattatttttttttttaatattttggtattgttgtttttattttagtttttatttaaaagataatatagtatgatttaaaaagagtttgggttggttaggaatagtgatttatatttataattttagtattttaagaggtttaagtaggtagatcgtttgaatttaagagagcgagatttagtttgggtaatatagtgagattttgtttttattttgaagataaaaaattagggcgtggtggtttacgtttgtaattttaatattttgggaggttgaggtgggcgaattataaggttaggagttcgagattagtttggttaatatggtgaaatgttgtttttattaaaaatataaaaagttagttgggcgtggtggtaggtatttgtatttttagttattcgggaggttgaggtaggagaatcgtttgaattcgggaggcggaggttgtagtgagttgagatcgcgttattgagttttagcgtgggcgatagtgagagattttgttttanaaaaaaaaaaaaaaaaggataaaaatatgtaaaaatttaaattaaaaaaagaattaaagttttgaaagaggtaagggttttgttatgttaattagataggagtgtagtggttatttataggtacgattttattaatgtttaaaatgggagttttgatttgttttggtttatttttatttaggtaatttggtggttttttatttttgggaggttattatattgatgttaaatttaatgtagatatttgatcggtttagtgtattatagtttaaaatttttggatttaagtaatttttttattttaatttttttagtagttgggattacgggtatatattattatgtttggattttaaatgtttttgtgagaatcgaagagagtataagaggtagaatttgattattgtttagtataaagtaggtatttagttatagataatgttgatttgttttagttttttatgaaatttagggtatttttgaaaaaggattaatgtttattttgtttattttaaattttattttttttttttttatttatggtaaggtattagtagtttaatgatagagaaagagttttaagtattttttaaatatttaaatatttttagtggaaatgggtttaataaatatttttaaaattttttggtgttattttagtttttatttgttagtgttttagaggttttttaaattttaatagtttttatttttagtggaagttgtgatattatttttttttataaatagagggtattttttgattgttgtgttatttatatttgtattt

SEQ ID NO: 1317 - DNA, 17674 bp, Artificial Sequence
  chemically treated genomic DNA (Homo sapiens)
tgttatgtgattattttttattatttaattttttataaaagttagtttttgaaaaagaaggttaagtatgttaatagaatttttgttaatggagttatatggtaaagttaggggatcgagaggtagaggttggaagatagttgaaattttaaaaattataacgtttaggttgtggttgggataggtaggtggtaagagtaaagagaaaagtggatgtttgggggaatgaaggaattttaggaagtaatgatttgaatgattggagaaaggttaaaggaaaaaattaagaataatagagtaaattaagataattaaatttaaaaagaaaaaaggttaataaaggtagaaaaattataagaaaaggtaaagcggaagaggaagatagaggtgaaagattaaaaatggtatgaatagtagaaataaaagtgtatgagtggtggaaagaaatattattttaggaagtttttgttttaatagttaatgatttattgtattaaagttaaaattttagtaaaaagtatatattgatgggcgtggggaggagaattttattaaggttattatgttagtttatattttaaagtttttatttgaaaataaaataggtttggtgttgtgatttatatttgtaattttagtattttgggaggttaaggtgggaggattgtttgagtttaggagtttgagattagtttgggtaatatagagagatattgattttaataaaaaaaaaattaaaaaattagttaggtatggtagtgtgtatttgtaattttagttatttggaaggttgaggttggaggtttgtttgagtttgggggggttaaggttgtagtgagtcgtgattattttattgttttttagtgtgggtaagagagtaagattttgttttaaaaataaaaataataataataataataataataataaaaacggtatgttatggatttttagaaattgaatttttgtttttggagtttaataaaaagatataaggtggtttataaatatattatagtggaaagaaaatggttttggtatataggagttttgatgtaggttgtcggttattagattagataggaggttattaaagggtttttagttatcgaagttttttttataaagaaatttataagtttaatgtataaaatagatagggtagagttgtttaatttggttgttaggtaggtagtttgttttttagttattgagtttttcgtttttattttttgtttttaggatatttttgtagaatttagaggatttagattgtttagtttttgggtaggtaagttttgtagttttttattttttaatgaattgtttgtttaaattgaaaattaggatattttattaaaaaaaagaaagttaatttttttttgaataattggagttgtgggttgtgtagttttttattttttaatgaattgtttgtttaatttgaaaattaggatattttattaaaaaaaaaaaagttaacgtttttttgagtaattggagttgtgggtttttggaaatagtaattgatgagagagttgaaaaatagttttttttagtgggttattttttttttgttatagtttacgtgtggttaacgttttgaatttttattatttatttgattttatagttatttcggtttagtgaggtttattgtaaaatttttgggatatatatatggttttttggggatgttttagtttaagatattttgtagttgtagaaaaattattattatattaaattaagttgttattaaattataaatttttattaatttttattttagtaaggagaagttattgttttagttattttgtttttaagttatagtttttatatttgtttagttagaaattatgttggtagtataataaaatgaattagaatgtggttgattgttttttgttggtagtttttatttttgtttaggtatttttttttttgtttttgtttttaatttatttttagtattgagaggttgttgagagtaagaattttttttttttttttttgagaattttatagtttagttttattattaggtatatgttgatgtttttttagaagtttttttattttggttaatttgttttaaatattttaggtttttatgttttatttattcgagttaatttgtaaatatttatttattttgtgaatgttttaggatataatattagatatattattatttcggttttggggatagattttttattttgttgtttagtggtgttttaattattaggaggagttaaagagttgttttttaagttggtattttagatattttttatattttttttgatttttaagttagatggtaataatgaatgatgtatagatataatatatatataatttaaaatattttaagtaaatataggagtattcgattttaaaatttagtataaagaataagtttttaggttgagagaatttttttagtattattgtttggggtggttttaggtacgttttttatttgttttgaaggtcgagttgtttttaaagaaagatatttattataacggttttgaaattttatgaaattatttaaaatgtagaataaggttagaatacgtgaaggggagggtagattatgtaggatagttttggatttttagataatagttgtatttttgattttaaaaaggtaattaatatggatatgattttgattttatttaagagaggtttttaaagttataaataagtattgtaaggtttgggtaaaaaggaaattattagtaaatttgagaaaagtggttaggtatagtggtatgcgtttgtaattttattattagggaggttgtggtcggaggattttttgagtttaggagttttaggttaatttggataatatagtaagattatattttgaattattatatatgtatgagaaaaagtggaaattataaattaaaattaggatttgtttttatgaaggtagttaagtttggaaaatgtgtagtggaggggatgtggtttttgtattagttagtatcgggaagatggtgtcggggaatacgttaagtttatattgtacgtttgagtttttagagttttgttagtagagttgtattattagataaattacgaataagagtgcgtttaaaattataacgttgttttggaaggttttttaaaaatttaattgataggtgataaaaattttttaaatatgatttgcgttattatgatattaattgtgtaagaaggggaaaggtagaaaagataattttggcgagtagatagatttgttgtttatggtagatattagggatggtatttgggtgtttattttgtttttttttttattttggtttttgttttttaaaaacgaaaggagtaaaaagaagtggaaagtcgtggaggtattcggtttagtttttacgtagtttaaggagattaggagggagttggttggtggaggttttgtttatttgttatatttcgtatttgggtaagtttgtgagttattgtcgggaatatggtttttttcgttaaggttagtattgattattattcgtgtatcggtaaacgtagggagtgtgttacgtgttttgatagtttagcgcgacgatttaagaagtcgcggttaggtgtttttttttttatttttttacgtttttttcgtagttcgggaatttgggagagaagattatcgtatttagttagacgtagaaataatattaagtagttattagtttaaaattataggaagagatttcgcgcggtcgttttaagttttagtattaaacgatagtgggcgttttagcgggggtattcgagcgcggatttttatatttttcgaggaacgtcgtattcgcgtggcgggggtgggtagatggattttagcgagtttcgttttttagtcgtgttacgtaataattttgtagtcgttattttcgttttaattgtgtagggggcggtgtttgtgcgtggagttttttttttcggtttcgggtcgtcgcggttttcgggagaggcgtcgggatattttaatcgttgttttcgtcgcgtagttttgcgtagttgttcggtcgcgttaatttttttttcgtcgtagcgcgtttcgagtgttggtagtttgttagtcgttatttttcgtttttttttttgtttattttaaggtagagggtttttttcgggagtgtgcggggaaggggaggtcgaggttcgggttacgttcgggtagtcgtaattcgtagtgtttagtcggtaataggtagtttagtaggttgcggtttttaggaagataaaaagcgtttttgcgagtaagtgagggtcgcggggagcgtagagttatcgcggcgatcgggagggtgaagggagttaagagcggacggggcggtgggacggggggttttcgggttttttcgtaggttcgtttcggtcgtgtcggtcgcgtgggtcgttgcgtaatattcgttgcgtcgggaatggggcgttagttttcgcgggcgttcggacggcggtggttttggtcggggagggacgcgagttggtagtggcgtcgtcgcggagggggagttgagggcggggaggcggggcggggtcgcggagtgttcgtttcggttcgtttttgtcggtcgcggttattggcggcgggtcgggggcgggtgcgggcgcggcgattggggtcgcggtcgttagttacgcggggttggcgggcggcgacgtagcgcggcgttcggaattgatttattaatatattacgcgttcggttttgttttattaatatatttttttcgtgcgattacggcgttcgcggatttaggcgcgttcgttcgtttttcgcgtcgcgttttcgtcgtcgttcgtttttcgtcgcggtttcggaggttcggttcggttcgagtttcgagcgtcggcggttcgattttcggtcgttttttttttttttttcgtcggttcgagagtaggaatacggtaagcgtttcgtttatcgtcggtcgggggttcggcgatcgtttttagggcgcgttgcgggcgggcgggcgggcgcggggtgcgggtcgcgttgtgtgcggggtcgggttgtaagttgggttcgttagcggcggcgagtgcgcgcggggtatttattatataaatttttgttgttttgttaggatgggattcgttattttaaggtggttgttttgattgtagcgttttcgcgtcggtacgtagttttggttggtttgcgtttttttttcgttgttgttgtataatgttttttgattttaggaaaattgatgttttggtaaagaagagcgttaggtaggttgagtttttttcgagcgggaagatgtttttttttttttagtgtttttttttttcgttttttttttggggttggcggcgtaggggggagaggaatggggggttgaggaatggggaatagttttaatttgtttggtgagaaaagggttggtagcgtgaacggtgacggtattcggagaatgtttgcgcggcgtttgtttgtgttaggggttgtgtttgtatagacgttttttattttgtttgtcgttagcgtgttttataagttttcgggaaggttgtgggatttgtttttttatatattgtataatttgtttacggtgaaatgttggtaagaattgcgggttgatgtgggaatatgcgcgtatgtgtgtaatgatttggtaattgaggcgtagcgttggatattagatcgttatttacgtttatattacgttttaaataaataggttttaaaacgatattataaaatttaaaagtaagaattgttcgtattgaattttgattttgggtattattggggttcgtttttttaatgtttttagttgttatttttaaatttgggacgaattattgtgacgtttatttttttatttttttaattttaatgtattttattcgattagtttttttttttattttattgttattgtttttttagatacgataagataaattatataatagttttttggaaatgttgtattatgtaattgtcgaatttgttggtagtgagtatagagagagggagttaattacgtgattttataattttgttataaagaaagtaggatagttttagtttttaagaatgttattataatagttttttttttttttttaaggatattttaaataggaaagtagataatcgggtaagtatggagtttgtttatgttgtcgaatgtgtgttttttgttttaaatgaaacgtacgtttttttaaatttagttttattatattttaataattgtggtttcgtagtgttatttttggtgttttttttagggttgtgtgtaaatataagtttaaggttatttgttgtagttttaattttacgttttcggagatttttgataagattgtatttttaggaaggtatttcgtagcgttcggtgatttgttggatgttggtttttatttatgtttttaaaggatattttaggaaattgttgttttttgagaatagtagggaatggttaagtgttattttttgtttttggtttttgtaaataataatagtaagtgaggttagaagtatttatttatttttagattagatatgatttatgggaaatagatataggttagtagattgtttttttgtttggatattttggttttatttatgtgaagatgtgtgaatatgtaatttatttaaatattaaatttttttttggattgttatatagtgattatgtgtgaatatatgtatatgatgggatgtatatataacgtaatatttaaattaagtgtagggtttttttttgtgggaggtggggggtggacgtttttggaatagagtatattattttaaataattgtagtcgttttttaagaagttagttgttttaggtttttagttttagatttcgatttattttgcgagttcgggtgggagttttaggtttgtaggggtcgcgtggcgttatttttcgatcgcgatttttaatggcgagttcgtgcggtttttagtgcgtcgtttttttttgcgggtcggtggggtttgcgagaattcggggttgggggcgggtttggtagtggcgggcggggatttcgggtcgggatcgagaagcgttttcgaacggtagttatattggggttgtttagtggtttgagtttttttttgttttttttttatatttttttgttttggcgcggggggttttcgcggcgtcgaggtttcgttgcgtcgtttattcggagggaggagggtttttgggaggcgtcgcgtgggggcgcggttcgtggagttcgggcgttagggatcggtcggggtcggcgtacgggtgcgttttgggttcgttcgggtcgcgggagttagggagttagggagttagggatttcggttttcgtacggggtagataggggtagcgcgggcgattcggagcgtttgcgttttcgcggttttttttttaatagggtaaatttaggggtttgatttcgcgtttgttttgcggtgaggtttagaaatttgtagatatttttgttttaagagtttttattgtatttcggaattaagcgcgtttttatttttgaagtgaaaaagattttaagaaaaatttttaaacgtttatcggttatagaaattgggggtggaggcgttttagtattgatagtgattaaaaggaaggttttagtttgattttggttagttgagttgagtcgattttttttaatttttaatttatgtggttaaaggttagaggagagagaatattgatttttagagtttaaaataaaatttaaacgtttatatagacgttgttgttttattgtaaaattatagtatttttattttcgtataaagatttttaagattgtatttatgtagtaatttatggagatattatagatgtttttttgaagtatattaacgtaatttgttttttgttgaaaattgatcgaaaatttgttttttttggtattatattttatatcgttatttttaattagttttttttttgttataggtagtagttagagaataggtttcggtgaggtatagattttaagagcgtaggttttgggtttataagaattttgggttttaggttttagtttgttattttttaatattgttttgatttttattattttttagggtaaattgagggaataaaatttgttgatttagttggttgtgaggagtttaataaatgttttttgtgttattgattaggaattagaatttgtgtgtgtgtgtgtgtgtgtgtgtgtgtgtgtgtgtgtatttatttttatttttttttttgtaaattttttcgtagtaatagtaaggattcgtgttggaattaagtttgtaagattttttttgagatattttttttgttttaataatatatatattttttaatttgttatcgtgtttaatgttaattttagtttgaggggaatttttgataggattgtagaattttaaattttttaagttattgggttaatgttttggggagttgtttgaaggaatagagagatgagtcgattatagtagtaggaatgacgtgataattgttatattaatagtttagttttttttaatttttttatatattttgtgatttattttttgtagtttggatgatttttttatttaaaattttgtggtttgagattagtagtggatggtgagattttatagataagtttttttgtagggggtatatgtagtttgaaaattaaggttagttttgtgaaattgttgatatttgatttttttgattaaatttttatttggtttatttttatatttgcgatataggttagggttttagtaagagttacgagtagtaaaaatagtttggaattgataggtatcgttgttttttgatattgattattttttagaaaagagataaagagttagtatttattaaatatatattttgtatgtgttaggtatagtgttgaggggttttgttattatttatattttatagatgaggaaatggaaatttagagaaatgaatttgtagtttaggtcgtagagtttgaaaattagatggggaaatttgtattttaataaagtgtatttttatatttattgtagtttttgaaataatttttttttttgggttaaagatttatttttgtgtagtgtagttataatattattgtgatgtaatagtttgaaaattaaaattttttgtgagaggtttttcggacgttgagtaatgtgtttgatttattagttgagtggatttttttagttgattttgttttggttattagagttaatttcgagatgtaaatgcgattgtagtatggaatggaaaaggtgtagttatattgtttgggttttatttttatttaggttaaatttatatattttatgatttttattgtaatttagatgttattgatgttgttaaagttgtttatttttaatttgtattgaggaatgagagtatatttgggatttaatttaaaatataatagaaataatgtaattgaaattgtttttaatatttattttttgtttttgtaaggtatgtttgtattttacggggtttaatatattgtttgatattttgttatttttttaaattatatttgagttgatttttatttaggttggatttgtatgagaatgttgaaagacgttgatttttgattatagatattataatatgaattttttagttttaaaatgaatttttattattattattttagttattttttatatttttttgtaagtaattttattgtagttaaaaaaaaaaaaaatatttaaaattgttttttatatggttttaataatagagtataaatttgtttttatgataagaaagtttattagagatttgttagatgttatttgttattaatttgtgttttgaggatttagttttataggatttagaatgatgtttataagttttttagttattagaatatgatgttttttattaattagttttttaggggttttaaattgtaattaattggtttttaaataaatattataaataagtatttgaaaatttattttatttataaggtagaaaatgatatttataattatttattgattggaaaagtggaaaaagaaattaaaaagttaagtgaagtaagttgggatgattttatattattattagaaatttttaagaatttttttagtttgattgtttttttagtttattatttttgttattattatattatgttgtatgtattatttatttattggggaattttttataattgggttattttgtgattgttggtgtttttttaagattttagattagttgttatattgattagttatttttttagaagttttaagatattaatagtttttatatttaagtttttatagatttttaaaaaattattattgttttgttttttttttatgttattatttatttttagtgagagttgtttttattttttaagttgtgtagttaattggtcgtgttagcgtgtatgtgtttattttgtgtaggttttagaataatttaattgtgtattaagttttaaatattgacgattttttaaagaagaatgttaagttatattattttatattttaattatttaaattatattagtgatgtaataaaatgtaatgttgttatcgtatttattaaatttaaatttaatttttagttagttttttgtcgaatttgaaatatttttatttattataaattggattaggttttgatatatttatttatagaggtatttaaatagaaaaagtaggttaatttgttgttatgatagaatagattttggtagtgtgcgagagtgtgtgtgtatgtgtgtgtgtgcgttttgtttgttttgattaagtgtatatttttttttaattttggggtaagttgttttttggggatagaatggtttttagagaggtttaatatagtttttttagtttaaaaattttttttttttttaacgggattagaaaatttttttgtaatttcggtgttttttgattgagtttttttattttttattttttttgggttgtatatgtatagtgaattttttttttattttatttttgtttttaaatattagattgtttttttatttatgaaaagaagtaaagtattttattgacgtagatattgtgaattttatttataggaagaaaatgtagggttaatatattgttagtatttatattttaaaagtataaagagatgtgaattgattaattgatttgatttttttatgaaaatgatatttatttaaaaaataagtatttgttgttttattggagaggtggtttatagtttaatataatttaggtttattttgaagatattttttttttttttattgttatttgtattatataatagggagaaaataatatatttagagagtagagggaaaataagataattttataatgtttttaaattattgggtatattaaatagtattttattttttattgatagaattttaaaaataaaatatatattgtaatttgtaataaaatttattttttatagataattaataataaaatgtttttagagtagattttaatgtttagattattagtaagattttagatgattgaaataaagtatgtttattttttttttttgtggagtttggattgttaaatattagttttgggagagattagggaagataaaggtttattataaatataattaatgagataattttttaaggataaatttggtttagaattattgttatgaggttatatttttttatagaattttttaaattaaattttgtatttaattaaaaataatagggtaatttgatttaaattttaaaaatttgggtttatgaaatataatttttgttatataatttttgtttagagaagtagtgtgatggattatataaaagtattaattagtgatggtattttcggagtatgtatggaaaaatatgttaattggtaggtaataatatttgtttttaaattttttttttttatttgtgtttttaaggagagttatattatttaatgtgtgtaatgaagttaatcgtgttgaatatattaatattatagaattggtatgtagtgttaattatttattaaaaaagaaatttaagtaatgattaatatattataatattagatgttgatttgaaaagatgatgtatagatgaagtaattgttaaattaattataagggaaaatattgaggtttgaaataaatttgttaggttagtataaattttgaggttttttgaaggtatcgtaaattatttttgtatttgttttaagtttattgttgaggggtataaggagagtttagagtttatttgtgtttaattgttgtgtggttttgggaaggttagtttgttttttagttgattaatttgtaaaatgagagggttagagagatattgtttttcgttttatgttgaaaatagattatatttttggatttgttaaaaaaaaaaaaaaaagaagaagattataggtgataatgtttatagttattatatttttttttttttatttaatataattagaatagttaggaggttaaaattttagtaaagatatgaaaattaataaaatgtttttttaatttataaatagtgttagatttgaaatatttaaggaggatggagaaaagttttagatagtatttttgttggttaaagaagttaagatagtatttaagagaagttaaggagttaggcgtgacggtttacgtttgtaattttagtattttgggaggttgtggtaggcggattatttgagatcgggagtttaagattagtttgattaatatggagaaatttcgtttttattaaaaatataaaattagttgggtatggtggcgtatgtttgtaattttagttatttgggaggttgaggtaggagaatcgtttgaatttaggaggtggaagttgtggtgagttaagatcgcgttattgtattttagtttgggtaataagagtaaaatttttttttaaaaagaaaaaaaaaaaaaaagaagaagtagttaagttagtatagtgttttattgcgtttaaagtaatttagtaaaagggtatgtattatttagaaatgaaagtgatataaaagagaattgtgtgtaaatgagattgtattgtaaagatgtagaattatttgtgaaagtgtaggagagagtaaaggaattgggtttgaatgtacgttttgttatttagttatgtgatattgggtaagttatttgatttttttgagttttagtttttttatttgaaaattgttattaaaagtgaatgaaagaaagtaggttaggtttttagtgtttattttgtggtaagtgtttaataaatggtattaattatgattgtttttgttattatttttatgataagaagaaagtttgtattttaggtttatgtttgtgtaattttgtatttatatttggtttttttttgtttatttgtttgttttttatttatttacgattgagcgtttggtttcgggagtttggtttttttttttttttttatgtgtttttagtttttttttgtgtttagtatatagtaggtgttttatatgtgttgaataaataaattaatgaataagagaatttttttgttaataagtaaaatattttttttataatttatataatattaaaaagaaagtattaaaaaagttttttgtttataaaatttttttatataaggtatatgggtgattgttaatgaaatgttgagtatttaatatttttaggtttttgttagaagataagtatattttaattttcgttttgaagtaattcgtagtgtagttgggtataaaagataaatacgtggaaatatatatagtgtatatgattgtgtttgttttcgtattattttataatgttgataaattttttttaatattgtaagattatttgatagataatattatagaaaatattttaagatagtgtggtgatttgttattgagttgtagagattatgaatgtaatatatatagatgagagtagaattatagatttatagtgatatgttatgaaatttaaataggaagaagatgattaaaaataaatgaggtggtttggcgaggtggtttacgtttgtaattttagtattttgggaggttaaggtaggtagattatttgaggtcgggagtttaagattagtttgaattttttatggagaaattttatggagtttttttatttttattaaattttatttttattaatatggagaaattttatttttattaaaaatataaaagtagttgggtttagtggtatatgtttgtaattttagttatttgggaggttgaggtaggagaattgtttggattttgtaggtagaggttgcggtgagttaagatcgtattattgtattttagtttgggtaataagagtgaaattttgttttaaaaataaaaaagtaaatgaagttttttgtaggttaatgtattaataaagttgtagagatgataaagtagttatatagtatttagatatttagaagatatgagttaaggaaattttaagataaatggggttattttagttaaatagaaataggatttattgtgaaggtttttttttaattgggttttaattttgaaaaggttttagaagtttaggaagagtaattaaggtagatagaatggcggggtattttaaaagtattattgtaaatttagtaagtgaggtaaaataaaggaatttgatttttttttttaagaaggaataaataagataatatatggaagagaaagatttttaggtggagaaaataattagaataatagtttgtaagggattatatgatgtttaaaaattaaaagtggaaaaaagtagtggttaagagtatagtggagatttgaaaggtgttttgggaaaggttagtgtaattgttttttttaattgggatatttttttttttatttttttatttattttattttagtaggaggattttgttgaatggtagagtgtagattttaatagaggaaagaatttatttaatatgtaaaggaaattgggtttttatattagaggataaaatttaaatgtaaattagaggaaatagtattgttggtcgggcgtggtggtttatgtttgtaattttagtattttgggagttcgaggtaggtaaattatttgagattaggagtttaagattagtttgattaatatggtaaaatttcgtttttattaaaaatataaaaaaattagttgggcgtggtggcgcgtaattgtaattttagttatttaggaggttgaggtaggagagtcgtttgagtttgggaagtagaggttgtagtgtattaagattgtattattgtattttagtttgggtagtagagcgagatttttattaaaaaaaaaaaaggaaataatattgtttaaatgataaataggaagattttttttttgtaatattattgttgattgtgatatattttttgtttttattttttattaaagttttattattaaaaaataaatagaaatttgatattaataattataaatttttttgagttacgattagttgtttttttaattatgttggtttagtttaatgggtaaaaatttggtatgaaatattattttttatgattttgaaattattatataattttttttattttttggaaaagataaaagaagttggtaggtttttttaattgataaaagtaaattttattttattagttattatgaaattaggcgtaagaaggagatagtggtattatgtaagaatattatatttttttttttttttttttttgagacgaagtttcgtttttgttttttaggttggagtgtaatggcgcgattttggtttattgtaattttcgttttttgggtttttgggtttaagcgatttttttgttttagtttttcgagtagttgggattataggcgtttgttattatattcgattaatttttgtatttttagtagagacggggttttattatgttagttaggttggtttcgaatttttgattttaggtgattcgtttatttcggttttttaaagtgttgggattataggtatgagttattatatttggtttattatatttttttagtagggtagaataaagtgttattgtgtgtagatcgtgttgatggaattgttgtattatgtttatttaacgaaaaatattattgattggaatattaggtagagaattagtgtttagaaatatagttaaatttaaaagtttttatgtaatgattgttattggaatataatatggattttattatttcgagttaaggtaattgttaggttaaatttgtagtgtaagtattttattaatggaagaggaaattaatgaatgattttatttttgagttgttatattttatttgaaattaatttatataaatgaaagaaatttttttttgtaattatatttttttggtttaaaagaattttattttaagaatgtattatatttttaaaaattttttttgaatagtaagtgtttttttgttttgtgtggggtttttttttttttttttttttttttgatagagttttgttttgttattaggttggagtgtagtggcgtgattttagtttattgtaatttttgttttttaggtttaagtaatttttttgttttagtttttcgagtagttgggattataggtatatattattatatttagttaatttttgtattttttagtagagatggggttttattatgttggttaggatggtttcgattttttgattttgtgatttgttcgtttcggtttattaaagtgttgggattataagtgtgagttatcgtgtttcgtttagtaattgttttttagtttaaagttattatgtaattgaaatttgaaatttattttgatagaatttttaagattataaaaagtattttggatattttaattttgaatgtttgatagaataaatttaaaggaattagaaaaaaaaattttaattttttaaatttagatgtttgtaaagagatggtttgatggagaagaattttttttatttagttgtagtgagttatttggtggaatttgttgggatataagtttattaggtagttaaggatgtgatgggtaggtttatgtttacgttaaggtgtagattaaaattaatagtttcgttgttaatgtggtttttattttagtttttgtagaagaagtttgtttttatttgtattttattttatataggagtgtagaattttttttttatttacgttaaagtttatttggtaaagttttttttaagaggtgagtatatttgtttggtagtgatgtaaatattaggtaatattatttagaagtattacggtatgtatgtattgtttagaaatttattaattagaggttatttgttattttttttttgtaattgtttatatttaattatttttttatttcgttttattaaatatagtttttttttatttttttttgggtagaggttattttattttttttttatttttttggattatatatttttttattgataggttttattagggatttgttttttatagttttatagtttaggtatttgggaatttattttttttttgaaaatgttaatttgttgaaagaaagaattgtggttatgttttatttgtgtttgtatgttttaaatgtttagtatatttttttgtatataatttgtaataaatatttatttagtgaataattggttttttttttatttatgtattgtaga

SEQ ID NO: 1318 - DNA, 17674 bp, Artificial Sequence
  chemically treated genomic DNA (Homo sapiens)
tttgtaatatatgaataaaaaaaaaattagttatttattggataaatgtttattataaattatgtataaggaaatatgttaagtatttagggtatataagtatagatgaggtatggttatagtttttttttttaataagttagtatttttaaaaaggaaataagtttttaaatatttaaattataaagttgtaaaggataaatttttaatgaggtttattagtaagagaatatgtgatttaggaaagtgagggaaaaataaaataatttttgtttagagagaagtagaggaaggttgtatttaatgaggcgaaatggagaaatagttgggtgtgggtaattataggaaggaaatgatagatagtttttggttggtaagtttttaaatagtatatgtatatcgtggtgtttttaaataatgttatttaatatttatattattgttaagtagatatgtttattttttaaaagggattttattaagtaaattttaacgtgagtaaaaaaaaagttttgtatttttatatggaataaaatataaatggagataaattttttttataaaaattaaagtaaaagttatattaataacggagttgttggttttaatttatattttaacgtggatataaatttgtttattatatttttgattgtttggtaggtttatattttagtaaattttattaggtgatttattgtaattaaatgaaaaggatttttttttattaagttatttttttataagtatttgagtttaagagattagaatttttttttttgatttttttgaatttgttttattaaatatttaagattgaagtatttaaaatgttttttgtgattttgaaaattttgttaaaatagattttaggttttagttatatagtagttttgaattaaaaaatagttattaggcggggtacggtggtttatatttgtaattttagtattttggtaggtcgaagcgggtagattataaggttaggagatcgagattattttggttaatatggtgaaattttatttttattaaaaaatataaaaattagttgggtgtggtggtgtgtgtttgtaattttagttattcgggaggttgaggtaggagaattgtttgaatttgggaggtagagattgtagtgagttgagattacgttattgtattttagtttggtgatagagtaagattttgttaaaaaaaaaaaaaaaaaaaaaaaaattttatataaaataaaaaaatatttattatttaaagggggtttttaaaagtatagtgtatttttgaaatgaaatttttttaaattaagagaatatagttatagaaaaaaattttttttatttatatgaattagttttaagtaaaatataataatttaaaaatagaattatttattagtttttttttttattgatgaaatatttatattataaatttggtttgatagttgttttagttcgagataataaaatttatgttatgttttagtagtaattattgtatgggggtttttgaatttaattgtgtttttagatattgattttttgtttaatgttttagttagtaatatttttcgttaaatagatatggtataatagttttattagtacgatttgtatatagtggtattttattttattttattaaaaagatgtaatgagttaggtgtggtggtttatgtttgtaattttagtattttgggaggtcgaggtgggcggattatttgaggttaggagttcgagattagtttggttaatatggtgaaatttcgtttttattaaaaatataaaaattagtcgggtgtggtgataggcgtttgtaattttagttattcgggaggttgaggtaggagaatcgtttgaatttaggaatttaggaggcggaggttgtagtgagttaagatcgcgttattgtattttagtttgggggataagagcgagatttcgttttaaaaaaaaaaaaaaaaaaagatgtaatgtttttatatgatgttattattttttttttacgtttagttttataatgattaataaaatgaagtttatttttattaattggaaaagtttgttagttttttttgttttttttagggaatgaaaggaattatgtaataattttaggattataaagaataatgttttatgttaggtttttgtttattaaattgagttaatatagttaagggaatagttagtcgtaatttagagaaatttgtgattattaatattaagtttttgtttgttttttggtaatgaaattttaataggaaatgaaggtaaggagtgtgttatagttagtagtgatgttgtagagaaggaatttttttatttattatttaaataatattatttttttttttttttttgataagagtttcgttttgttgtttaggttagagtgtagtggtgtaattttggtgtattgtagtttttgttttttaggtttaagcgatttttttgttttagttttttgagtagttggggttatagttacgcgttattacgtttagttaatttttttgtatttttagtagagacgggattttattatgttggttaggttggttttgaatttttgattttaggtgatttgtttgtttcggatttttaaagtgttgggattataggtatgagttattacgttcggttaataatattattttttttaatttgtatttaggttttgttttttaatatgaaaatttagttttttttatatattgaatggatttttttttttgttgaagtttgtattttgttatttagtaaagtttttttgttaaagtaaaatgagtggagaagtaaagaggaagatattttagttaaagaagataattgtattgattttttttaaggtattttttaaatttttattatatttttggttattatttttttttatttttagtttttaaatattatatgattttttgtagattattattttggttattttttttatttgagaattttttttttttatgtgttattttatttgtttttttttaaaaaaaaaaattagatttttttattttgttttatttattagatttatagtaatgtttttgaaatgtttcgttattttgtttgttttagttattttttttaaatttttaggatttttttaaggttggggtttaattgggaaggagtttttataataggttttatttttatttaattgaaatagttttatttgttttaaaatttttttaatttatgttttttaggtgtttaagtattatatgattattttattatttttataattttgttggtatattaatttatagaaaattttatttgtttttttgtttttgagatagagttttatttttgttgtttaggttggagtgtaatggtacgattttggtttatcgtaatttttgtttatagggtttaagtaatttttttgttttagttttttaagtagttgggattataggtatgtgttattaagtttagttatttttgtatttttagtagagatggggtttttttatgttagtagagatggggtttagtagagatggggaaattttatggggtttttttatggggagtttaggttggttttgaattttcgattttaggtgatttgtttattttggttttttaaagtgttgggattataggcgtgagttatttcgttaggttattttatttgtttttaattattttttttttatttgaattttatggtatgttattataaatttgtgattttgtttttatttgtatgtattatatttatggtttttataatttaatggtaaattattatattattttaggatattttttgtaatattatttattaaataattttgtagtgttgaaaagagtttattagtattatgggatgatacggagataggtataattatatatattgtgtgtgtttttacgtgtttgttttttgtgtttaattatattgcgaattattttagggcggaaattaaaatatatttgttttttagtaaaaatttgaagatattaggtgtttaatattttattgatagttatttatatattttatataagagagttttgtaaatagaaaatttttttgatgttttttttttaatgttatgtgaattgtaaagaagatattttatttattaatagagagatttttttatttattaatttgtttatttaatatatatggagtatttattgtgtattgggtataaggggagattaggggtatataaagagggagagaaaaattaaattttcgagattaggcgtttagtcgtgggtgggtgggagataaataggtgagtagaggggaattaggtgtgagtgtagagttgtataaatatgggtttggggtgtaggttttttttttgttatggagataataataaaaataattataattggtgttatttattgaatatttattatagaatgggtattgggagtttgatttgtttttttttatttatttttggtgataatttttagataagaaaattaaggtttagagaagttaagtgatttgtttagtgttatatagttaaatggtagagcgtatatttaggtttagtttttttatttttttttatatttttataggtggttttgtatttttgtaatgtagttttatttatatatagtttttttttgtgttatttttatttttgagtaatatatatttttttattaagttattttgggcgtagtaaggtattatgttaatttaattattttttttttttttttttttttttttttgagaaggagttttgtttttgttgtttaggttggagtgtaatggcgcgattttggtttattataatttttattttttgggtttaagcgatttttttgttttagttttttaagtagttgggattataggtatgcgttattatgtttaattaattttgtatttttagtagagacggggtttttttatgttggttaggttggttttgaattttcgattttaggtgattcgtttgttatagttttttaaagtgttgggattataggcgtgagtcgttacgtttggttttttaattttttttagatgttgttttaatttttttagttagtaaagatattatttagaatttttttttattttttttagatgttttagatttggtattatttatgaattgagaaaatattttattaatttttatatttttattaaaattttaattttttggttattttaattatgttaaatagagaaaaagaaatatgatagttgtggatattgttatttatgattttttttttttttttttttttttaataaatttaagagtgtaatttgtttttaatatgaggcgggggatagtgtttttttgatttttttattttgtagattaattagttagaagataggttgatttttttaagattatatagtagttgggtatagatgggttttgagttttttttatgttttttaataatgaatttaaagtaaatgtaaaagtagtttacgatgtttttaaaaagttttaggatttatgttaatttaataaatttattttaagttttaatatttttttttatgattaatttaataattattttatttatgtattatttttttaaattaatatttaatgttgtggtatattagttattgtttaagttttttttttggtgaataattgatattatatgttaattttatgatgttagtgtatttagtacgattaattttattatatatattagatgatatgattttttttgaaaatataaataaaaaagagaaatttaagagtaggtattattatttattagttgatatatttttttatatatatttcgaaggtgttattattaattaatgtttttgtatagtttattatattatttttttaagtaagaattatatagtaagaattatattttataagtttagatttttaaagtttaagttagattattttattgtttttaattaagtataagatttgatttagaaaattttataaaagaatataattttataataataattttagattaaatttatttttgaggagttattttattagttatgtttatgatagatttttattttttttggttttttttagaattaatgtttaataatttaagttttataaaagaaaagaataaatatgttttgttttaattatttgaaattttattaatagtttaaatattaaaatttattttgagaatattttgttattaattatttataaagggtaagttttattgtaaattgtaatatatattttgtttttaaaattttgttaatagaagatgaaatattatttgatatgtttaatgatttggaaatattatagaattattttattttttttttattttttgaatgtattgttttttttttgttatataatatagataatagtaaaggaaaaaaaaatgtttttaaggtaaatttaagttatgttaaattgtaagttatttttttagtaagatagtagatgtttattttttagataaatgttatttttatgaaaaaattaaattaattaattaatttatatttttttatatttttaaagtatgaatattagtaatatgttaattttatattttttttttgtgggtaaaatttatagtatttgcgttaatgaaatgttttatttttttttatggatgagaaaataatttagtatttaaaagtagagatgaaataagaaaagaatttattatatatgtataatttagaggaaatggggagtgaaaaaatttagttagaaaatatcgaagttgtaagagaattttttaatttcgttgaaaaagagaaggatttttaagttgagaaaattatgttaaatttttttaagggttattttgtttttaagaagtagtttattttaaagttagagagaaatgtgtatttgattaagataggtaagacgtatatatatatatatatatatattttcgtatattgttagaatttattttattatagtaataaattgatttattttttttatttgggtgtttttgtaaataaatgtgttaaagtttgatttagtttatgataaatgaaaatattttaagttcgataaaggattagttgaaaattaaatttaaatttaataaatacgatgataatattgtattttattatattattgatgtaatttaagtaattgaaatatgaaatagtataatttaatatttttttttaagaggtcgttagtgtttgaaatttaatatataattaaattattttgaagtttgtatagagtaagtatatatacgttagtacgattaattaattgtatagtttgagaaataagaatagtttttattaaagatgggtagtaatatgggggaaaaatagaatagtaataattttttaaaaatttatagaaatttaaatgtggggattattaatattttgaaatttttgaaaagataattgattagtgtagtaattaatttgaaattttaaaaggatattaataattataaagtaatttagttgtagaaaattttttaatgaataagtaatatatgtaatatggtgtaatgatggtaaaaatggtgggttaaggggatagttaggttgagaaaatttttgaaagtttttaatgataatgtagaattattttaatttgttttatttggttttttaatttttttttttatttttttagttagtggatgattataaatgttattttttattttatgaatagagtggatttttaaatgtttatttgtagtgtttatttgaaggttagttaattatagtttaagatttttaaaaagttaattaataaaagatattatgttttgataattaaaaggtttataaatattattttgagttttatgaaattgagtttttaaagtatagattaataataaatggtatttagtaaatttttagtaaatttttttattataaaaataagtttatgttttattattaaagttatatgagaaatagttttgggtgttttttttttttttaattatagtaaagttatttataaagaaatgtgaaagataattggggtagtagtaataaaaatttattttgaaattgaaaaatttatattgtaatgtttgtgattaaaggttaacgttttttaatatttttatataagtttaatttggatagaaattaatttaaatataatttagaaaaataataggatattaaataatgtattaaatttcgtgaaatataggtatattttataaaaataagaaatgaatattaaaggtaattttaattatattgtttttgttatattttgaattgaattttaagtgtgtttttattttttaatataaattaaaaataaataattttaatagtattaatggtatttggattataatggaaattatgaagtatatgagtttaatttgggtaaaaataaagtttaggtaatatgattgtattttttttattttatgttgtaatcgtatttatatttcgaaattgattttaatgattaaggtaaggttaattagaaaaatttatttagttggtgagttaggtatattgtttaacgttcgaaaggttttttataaagggttttaatttttaggttgttgtattatagtgatgttataattgtattgtataaaaataagtttttaatttagaaaaggaaattgttttaaaaattatagtgagtgtgagaatatattttgttgaggtgtaaatttttttatttggtttttaggttttgcgatttgggttgtaaatttatttttttgagtttttatttttttatttatgaaatgtggatgataatagagttttttaatattgtgtttggtatatgtagagtatgtgtttagtaaatattaattttttattttttttttgaagaatgattagtattaaaaggtaacgatgtttattagttttaggttgtttttgttgttcgtgatttttattgaagttttgatttatgtcgtaagtgtaagggtaaattaaatgaaaatttggttaaaagggttaaatattaatagttttataggattggttttagtttttaggttatatatattttttataagagagtttatttgtggggttttattatttattgttgattttagattataaagttttagatagagaaattatttaagttatagaaaatgagttatagaatgtgtaagggaattggaaaaagttgagttattaatatggtaattgttacgttatttttgttattataatcgatttatttttttatttttttaagtagttttttaaaatattaatttaatgatttgggaagtttgaggttttgtaattttgttaggaattttttttaaattgaaattaatattgaatacgatggtaaattaaaaaatatatatattattagaataaaaaaagtattttaagaaagattttatagatttaattttaatacgaatttttattgttattgcgaagagatttataaagagaaaaatgaaggtaaatatatatatatatatatatatatatatatatatatatatagattttggtttttgattaataatataggaaatatttattgaattttttataattaattaagttaataggttttatttttttagtttattttggagagtgatggaaattaggatagtgttggaagataataagttggggtttgggatttagggtttttgtgagtttagggtttgcgtttttaggatttgtattttatcgaaatttgttttttaattattgtttgtaataggagggaaattgattagggatagcggtgtagggtatgatgttaaagaaagtaagttttcggttagtttttaataaagagtagattgcgttgatatgttttaggagaatatttgtgatgtttttatgaattattgtatgggtataattttggaagtttttatgcgaggatgaaagtattgtagttttatagtaggatagtagcgtttatgtgggcgtttagattttattttgaattttggagattagtgtttttttttttttagtttttgattatataaattaaaggttaaaaaaaatcggtttaatttaattggttaaagttaagttgaggttttttttttaattattattaatattggagcgtttttatttttaatttttgtggtcggtggacgtttggaggttttttttaaggttttttttattttaagaatggagacgcgtttggtttcgaaatataatgaagatttttggaataaaggtgtttgtaggtttttgaattttatcgtagaataggcgcggagttaggtttttggatttgttttgttggaaggagggtcgcggagacgtaggcgtttcgggtcgttcgcgttgtttttgtttgtttcgtgcgggagtcggggtttttggttttttggttttttggttttcgcggttcgggcgaatttagagcgtattcgtacgtcggtttcggtcggtttttagcgttcgggttttacgggtcgcgtttttacgcggcgttttttagagattttttttttttcgggtgggcggcgtagcggggtttcggcgtcgcgaggatttttcgcgttagaataaaggaatgtggggagggggtagggaggagtttaggttattgagtagttttagtataattgtcgttcggaggcgtttttcggtttcgattcgaggttttcgttcgttattattagattcgtttttagtttcggattttcgtagattttatcggttcgtaggagggagcggcgtattgggggtcgtacggattcgttattggagatcgcgatcggaaggtggcgttacgcggtttttataggtttgggatttttattcgagttcgtaaagtaggtcggggtttgaagttgggggtttagagtaattagttttttggaaagcgattgtaattatttggggtaatatattttgttttagagacgtttattttttattttttataaaaaaaaattttgtatttaatttaaatgttacgttatatatatattttattatatatatatatttatatataattattatgtaatagtttaggaagaaatttaatatttgggtaaattatatatttatatatttttatataagtaaaattagggtatttagataaaaaaataatttattaatttatatttgttttttataggttatatttggtttgggggtaaataaatatttttgattttatttattgttgttatttataaaagttaagaatagaagatgatatttggttattttttgttgtttttagagaatagtagttttttaaagtgttttttaaaaatataaatgggagttagtatttagtaaattatcgggcgttgcgaaatgtttttttaaaaatataattttattaaaggttttcgaaggcgtggagttaaaattatagtaaatggttttgaatttgtatttgtatatagttttggagaaaatattagaaatagtattgcgaggttataattgttaaaatgtgatagggttaaatttagaagaacgtgcgttttatttagggtaaaagatatatattcggtagtatgagtaaattttatgtttattcggttgtttatttttttgtttaaaatatttttaaggaaaaaaaaaaaattgttatagtgatatttttaaaggttgagattgttttattttttttgtagtaagattataaaattacgtaattagttttttttttttatgtttattgttagtaaattcggtagttatataatgtaatatttttaggaaattattatgtgatttgttttgtcgtgtttgaaaaagtaatgataataaggtgagaaaaagggttgatcgaatggaatgtattaaaattaggaaggtggggaggtaaacgttataatggttcgttttagatttaaaaataatagttgagaatattgaaagggcgaattttagtagtatttaagattagaatttaatgcgagtaatttttgtttttaggttttgtagtatcgttttaaaatttgtttatttgggacgtaatatagacgtaaataacgatttaatatttaacgttgcgttttaattattaaattattgtatatatacgcgtatatttttatattagttcgtaatttttgttaatattttatcgtgggtagattatgtaatgtatgaaaggataaattttataattttttcgagggtttgtaaaatacgttgacgataaatagggtggaaaacgtttgtgtagatatagtttttgatataaataaacgtcgcgtaggtatttttcgaatgtcgttatcgtttacgttattaattttttttttattaagtaaattaagattattttttattttttaattttttattttttttttttttacgtcgttagttttagagaaggaacgagaaagaaagatattagagaggaaagagtattttttcgttcggagagggtttagtttgtttggcgtttttttttattaaaatattaatttttttgaaattaggagatattatgtaatagtagcggggggagagcgtaaattagttaggattacgtgtcggcgcgaaggcgttgtaattaaagtagttattttaaggtggcgagttttattttgataaggtagtaaaagtttatgtaatgaatgtttcgcgcgtattcgtcgtcgttggcgagtttagtttatagttcgatttcgtatatagcgcggttcgtatttcgcgttcgttcgttcgttcgtagcgcgttttgggagcggtcgtcgggttttcggtcggcggtgggcggagcgtttatcgtgtttttgttttcgggtcggcgaggagaaagaaaggggcggtcgggagtcgggtcgtcggcgttcggggttcgggtcgggtcgggttttcggggtcgcggcgggaggcgggcggcggcgagggcgcggcgcgggaggcgggcgggcgcgtttgggttcgcgggcgtcgtggtcgtacggagagagtgtgttagtaggatagagtcgagcgcgtagtgtgttagtaggttagtttcgagcgtcgcgttacgtcgtcgttcgttagtttcgcgtgattggcggtcgcggttttaatcgtcgcgttcgtattcgttttcggttcgtcgttaatggtcgcggtcggtaggggcgggtcggggcgggtatttcgcggtttcgtttcgttttttcgtttttagtttttttttcgcggcggcgttattattagttcgcgttttttttcggttagggttatcgtcgttcgagcgttcgcgagggttggcgttttattttcggcgtaacgagtgttgcgtaacggtttacgcggtcgatacgatcggagcgagtttgcggaggagttcgggagtttttcgttttatcgtttcgttcgtttttggttttttttattttttcggtcgtcgcggtggttttgcgtttttcgcgatttttatttgttcgtagaggcgttttttgtttttttgagagtcgtagtttgttgggttatttgttgtcgattgagtattgcgggttgcggttattcgggcgtggttcggatttcggttttttttttttcgtatattttcgagaggagttttttattttggggtgggtaggagggaaggcggggggtggcggttggtaagttgttaatattcggggcgcgttgcggcggggaaggggttggcgcggtcgggtagttgcgtagggttgcgcggcggaggtagcgattaaaatgtttcggcgtttttttcgagagtcgcgacggttcggagtcgggagggaaagttttacgtataaatatcgttttttgtataattagggcgaagatgacggttgtaaagttgttgcgtaatacgattgggaaacgaggttcgttgaggtttatttatttattttcgttacgcgggtgcggcgtttttcggaggatgtgaaggttcgcgttcgggtgttttcgttgggacgtttattgtcgtttggtgttggggtttgagacgatcgcgcgggatttttttttgtgattttgagttgatagttgtttagtgttatttttgcgtttaattggatacggtagtttttttttttaaattttcgggttacggaagagacgtaaaaaaatggaaaaaagagtatttagtcgcgattttttaagtcgtcgcgttagattgttaaggtacgtggtatattttttgcgtttatcgatatacggatagtggttagtgttggttttggcgaagggagttatgttttcgatagtgatttataggtttgtttaaatacggagtgtggtaggtgggtaggatttttattagttagtttttttttggtttttttgaattacgtgggggttgggtcgagtgtttttacgattttttatttttttttgtttttttcgtttttaaaaagtaaaaattaaagtaaagagaagagtagagtgaatatttaggtattatttttagtgtttgttatgagtagtagatttatttattcgttaagattgttttttttattttttttttttttgtatagttaatattataataacgtaagttatatttaaaaaatttttattatttattagttgagtttttggaaagttttttagggtagcgttgtggttttgaacgtatttttgttcgtgatttatttggtagtatagttttgttgataaggttttgaaaatttagacgtataatatgggtttagcgtgtttttcgatattattttttcggtgttgattaatgtaagaattatattttttttattatatattttttaaatttgattatttttatgagaataaattttgattttagtttataatttttatttttttttatatatatataataatttaagatgtggttttattatgttgtttaggttggtttggaatttttgggtttaaaggatttttcggttatagtttttttggtagtggaattataggcgtatgttattgtgtttggttattttttttaaatttattgatagttttttttttgtttaaattttataatgtttatttgtagttttgagaattttttttagatgaaattaaaattatatttatattagttgtttttttggggttagaaatgtagttattgtttagaaatttagggttgttttgtataatttatttttttttttacgtgttttgattttgttttgtattttgaataattttatggaattttaaagtcgttgtagtaaatgtttttttttaaagataattcgatttttaagataggtaaagaacgtgtttggagttattttaggtagtgatgttggaggagtttttttaatttggaaatttattttttatgttgaattttgaaatcgaatgtttttatatttatttggagtattttagattgtgtatgtattatatttgtgtattatttattgttattatttaatttggaaattagaggaagtgtgaaaggtatttgagatattagtttagaaaataattttttagttttttttggtgattaggatattattaaataataggatgaaggatttgtttttagggtcgaagtgatgatgtatttaatattatattttagaatatttatagagtaggtaagtatttgtagattaattcgagtaaatggagtataaaaatttaagatatttgaaataaattaattagggtggggaggtttttaggaagatattagtatgtgtttgatggtggagttgggttgtaaggtttttaggaggaggaggaaggggtttttgtttttagtaattttttagtgttaggggtggattgagggtaggggtaagggaggaggtgtttggatagggatgagaattattagtagaagataattaattatattttaatttattttattatattgttaatatggtttttgattaagtaaatataagagttatagtttgagaatagaatgattaaaatagtgatttttttttattaaaatgggaattaataggaatttgtaatttagtaataatttaatttaatatagtaataatttttttatagttgtagaatgttttgagttggaatatttttaagaggttatatatatattttagggattttatagtggattttattaggtcggagtaattgtaaagttagatggataatgagaatttaggacgttagttatacgtggattgtggtaaaaagaaagtgatttattgaagaagattgttttttagtttttttattaattgttgtttttaggagtttatagttttaattatttaaaagaacgttgatttttttttttttggtaaaatattttgatttttaggttaggtaagtaatttattaaaaaataaaagattgtatagtttatagttttaattatttaaaagaaagttgatttttttttttttggtaaaatattttgatttttagtttaggtaagtaatttattaaaaaataaaagattgtaggatttatttatttagaggttggatagtttgagttttttgagttttatagagatgttttgggaatagggggtggagacgggggatttagtggttaaaaagtaggttgtttatttggtaattaaattgggtagttttattttatttgttttgtgtattggatttatggatttttttgtagaaaaaatttcgataattaaaagttttttggtgattttttgtttggtttggtggtcggtagtttgtattagggtttttgtgtgttaggattattttttttttattgtagtatgtttatggattattttgtgtttttttattaaattttaggaatagaagtttagtttttgggaatttatagtatatcgtttttgttgttgttgttgttgttgttgttgtttttgtttttgagatagggttttgtttttttgtttatattggagggtagtggagtgattacggtttattgtagttttgatttttttaggtttaagtaaatttttaattttagttttttaagtagttgggattataggtgtatattattatgtttggttaattttttaattttttttttgttagagttagtgtttttttatgttgtttaggttggttttaaatttttgggtttaagtaatttttttattttggttttttaaagtgttggaattataggtgtgagttatagtattagatttgttttgtttttaagtggaggttttaagatgtgagttagtatggtagttttagtgaggtttttttttttacgtttattagtgtgtgttttttgttgggattttggttttgatgtaatgagttattgattgttgaggtagaaattttttggaatgatatttttttttattatttatgtatttttatttttgttatttatgttatttttaattttttatttttgtttttttttttcgttttgtttttttttgtagtttttttatttttgttgattttttttttttttaaatttagttattttgatttattttattatttttagtttttttttttggtttttttttagttatttagattattattttttgggatttttttatttttttaaatatttatttttttttttgtttttgttatttatttattttagttataatttagacgttatagtttttaagattttaattgttttttagtttttgtttttcggttttttaattttgttatgtggttttattagtaggagttttattagtatgtttggtttttttttttaaaaattagtttttgtgggaaattgggtaatagaagatggttatataata

SEQ ID NO: 1319 - DNA, 6397 bp, Artificial Sequence
  chemically treated genomic DNA (Homo sapiens)
atgtttttataagacgaaatgatttggacgtggatatagagggataattatatgaggatagggagaagatggttatttgtaagttaaggagagaagtttttaagtaaattaatgttgttaatatattgttgttgaatttttagtttttagaacgataaaaaatatttttgttgtttaagttatttagtttgagatattttgttttggtagttttaataaatatattttttaagggtttatttttatttttggtttagtgtattttagttgatgattatagtttaattttttttttttttttggggttttttttttttgtattttttttttttatattttatataggtagatttgtttttgtttttttatttatattacgagtttcgtatagtttttttttttttggtttcggtttttttattaatttttttgttattaacgttattaattcgttaaattatttttttatttttttaaatttttattaattttggtattttataagtgttagttaaataaatgaagaattatattaattttttttttttttttttttattttaaatttttggtgagatttttttgtatttatgttttcgtttttttattttttatttatttgttagtttttttatttttggttttttttattatattgaaatatatttgaaaaagttatgtaagattatagttattgcgtattagtgttatttgagagttaataaagttttttttttttttaagatagcgagtagagtgaatagaagaaagattggtttttgtttttggttgtatagttatgtttcgaggtcgggtttaggattttataatttataaagttaattgtttttttttttttttattttttaggaattgtttgtagtatttgatattgttgagagtttttatattttttaaatttttttttttttggttttttgagttttttttttatttttgatggtattgtaggagtttttaagtattttttttttatattaattttagaaataaagttatttttcgaatttttgtatttagttttttgttttttaattttttgattattaatgttttagaaatatttttttgataattatcgtatttttgtagttgtttttatttttaacgttatgtttttttgagtagtagttttgagtttttaattgtatatttattagttatttttatatggatattttattaaatttgttatattaaatatgtttaaaatatgtatgtttatatgttatatgtatgtttggtatgtgggaatgtattatatttttatagatttttttttagttatagtgttattattttaattatttagattagaatatttagagttatttatgagttttttttttatttaaattgtatatataatttataaataggttttgttgattttattttttaaaaattttttatatgtttttttttatattattggataatagtttagtgtggtggttaatattatgtatattggagttaaatttgttaggtttaaattttgattttttttttatttattaattatgaaattttaggaaaattatttaattttttatttgtaaatatggggattataatggtgatttattttatatgattgataattaaataagtgaatacgtgtatagtaggtattaattatatgtttagtcgatttattttaattttttaattaattagaagaattgtagttttttgtttttttgtatttaagtggggttatggaatgtgggtagaagtgttgtgttatttttatttagaggtaattaaaaagaagatatattttttttatgtttttattgttaatgaatatattatatagattttaattttagaattttttttatattggtatttttaaaatagttttatgagaagggaaatttgtgtagttttaatgatttagtgatgttatggtttgggtatttgttttttttaaattttatgttgaaatgtgattttaattttggaggtggggtttaatgggagatgtttcggttatggaggtggattttttataaatagattgatgttattttttgtaaggaggagaggatgagtgagtttttattgtattagtttttatgagagttggttgttaaaaagtttggtattttttttttttttttcgttatacgatttttttgtatatattattcgtttttgttttttattgagtggaagtagtttgaggtttttattagacgtatatgttggtgttatgttttttgtatagtttgaagattgtgagtttaataaatttttttttattataagttatttagttttgtgtattttgttatagtaatataaatgaattaagataagtgataaatataaaataatttgttttttagataatattgatgtttgaaattttatattgaggtatttttttttttttcgtagtttgataatggtaaatattttttgatattttaggatggatgaatttgtaagagatatttttggaagtaggtttgtatagtgtagagaaaatgttgggtaataaagtaggaatggaggagggttaattagtaagttaaaaagtttttatagttttgtttgttgtgttgtatggaattatatttttttaaaatatatgtttaagttttaattataggtatttgtgaatatgagtttatttggaattaggatttttgtaaatgttattaagttaagatgaggtaatattggattggggtgggttttaaatttaatgattggtgtttttataaaagaaaggtgagggagagttgaatatagcgatataaaggaaatacggggaaggagattatgtgataatgtaggtatagaatggagtgttgtagttaagttaagaatggtaaggattgttggagttattagaagttaggaggaggtaaaggatttttttttagagtttttagagggattatggttttaatggtattttgagtttagaattttaggttttaggattgtgatagaataaattttcgttgtaagttgtttagtcggtggtaaatttttatagtagttttaggaaaatatgtttgtttaatattttattttgaattttaagtttattttatggaattattttgagtttggagtttgatttaattttttttagtaattaacgttttttattttttatttttaaatatgttatattggttttatttttataataattgtatttatttattttttggtaatggggttgttattttttgtagaatgaaaagtagagtgtgtatgtttatattttttttttttttttttttttttttttttttttttttttttttttttttagagtatcgttttgtttcgtttaggttggagtgtagtggcgtaattttggtttattgtaatttttgtttttagggtttaagcgatttttttgttttagtttttggagtagttgggattataggcgttcgttattacgttcggttaatttttttgtattgttagtagagatggggttttattatattggttaggttggttttaaatttttgattttaggggatttattcgttttggttttttaaagtgttgggattataggtgtgagttatcgtattcggtttatagaattttttaaaaagttattgtgtttagtttttatggattttttaaattttagttgtttagtttttcggagttaaatgagattatttaaaggtcgattgttggggtttttaaggtcgtttcggagatttattttataggtaattaaatggatcgttgggtttttgtgtgtgtgggttttttttgtttattttttttttttagaaaaatattttattaagaaggtttttataatttattggaggaggaggatggagagtgggtacgaaaggattaggatgaatatgttataagtaatttaaatgttattgtaatattgtttggtgaggatttgattattgatgttttaaagttaagtttttagttgttattttatttagtagtgaaataatgagttttaaaatatatatttcggtttaagtttttttatgtggggaggtaatttattcgaaggtatttttagtttgtatttaatatagtgtttagtattaaagtagtttagatgttagtgaatggtggttattgggaggtttgttagtgggtgttagtagcggtttttttagagaaaaagaaaatttttttttgttagattagtattttatgagttgtgaattaaaattattgttattattattattataattttatttatagtaattattataaaggtttaataatgttttgtagatgaatattttgagtaattgttttataattaggagatttaagatcgtattaaaaattagtagagggttatattttattgggtataagtcgtttatgataacgaaattgtagtttaatttgtgaagagatgtgaatgtaattgagatacgtttaaatggaatatatagatgagttttatttttatatttggtatgtttggatttatgtcgattttttagttgttcgggtttgtttttaggggttatggatcgtatgattttattagcggtattgttatcgtcgtcgttttcgtgttgtttgcgtttttcgattattgattgggttcggtaggcgttttttgggggtttttttatcggttttagtttttgggattcgggagcgttttgttaggaagttagagtttcgtaggggtcgcggcgtttaggtcgtttaacgcgcgtttttcgttcggcgtttcgaagcggtttcgaggggcgggagtcgaggcgagcggtaaggtcgggtcgggggcgtatagcgtttttagaagtgcgggttttttttattttcggtagcgattttatttttcgttttcgttgcgtgcgcgcgtgtgttcgtttgtttgtatgttttttcgacgttagtgggaatttttagttaggaagtgagagagtgagcgagatagaaagagagagaagtgtattagcgagtcggggtaggaagaggaggtttcgttatcggagcggttcggcgacgcgttgatagttttttttgtttttttcgtcggtcgggtcgttagtcgtcgtagttttcggtttgtacgtagttatcggtttcgttttcggagtttagcgtcgtcgaggtcgtagtcgttcggttagtaaggcggcgtcgtcgttcggttatcgcgcgttttgcgttttttttcgttcgcgttgcggttatggcgcggcgttgattggtttggttcggtttcgtcgcgttttcgttcgtttcgattcgtattcgggttcgttcgggtttcggtttgtcgtcgttttttttttttttagtcggtaggttcgcgtcgtttaggagggagagtttattcgcgttaggaggtcgaacgcggattcgttattcgggtaagttaaattcgggcgagtgggggttcggtaggggacgcgtggtttaagttttgtcgtttagtttttcgtattttttttagttttattcggatttttttatttttgcgttaatcgttgggttagatcgtgggaggaggttgatagtagttgagaggtatatgggattagcgatagcggggaaagatatattcggatttcgtaggggttagtcggtcgaagggtcgcggtcgttcggcggttatttttttttacgttttttcgcggggcgggaacgcgaatcggaggggaatttttataaatttttaaaatttttaattttagttttatttgggggatggtgagaaggttggagtgcgttgcggcgcggaggagagagggaaggtggttggtgtagtgtagaattagattttatttaagggcgttttatgaaatgaaagtagaagtgtttgttagtttttttggttgggaaagttttttttagttttttagaattgaataggagagtttatttattttttttttatttttaaaagaaatttggttcgttttttgtttttttttttttttttttttttttttttcgtgcgcgcgcgcgcgcgtatatatatatatatatatatatatatatatatatacgatatagttatttgttataggatttgattttgatttttcggggtttggtatttgagagagaaaataaattatttatttggatatttagagtattttttagatttgattatgtaaaatttttggatagtgttattatgtattatgtatgatcgttgaaataaaaataatgtaaaaataaggtttattttaaatgtaagtttttttatggtttttaaaaatagatattagggaatgtttgttttgatttgttggtttattttgaaatttaaatgggatttaatgatataggatttaattattaagattgatatgtttatggattttgttaagtagaggtttttagtattatagtttatgaaataatta

SEQ ID NO: 1320 - DNA, 6397 bp, Artificial Sequence
  chemically treated genomic DNA (Homo sapiens)
tggttattttataaattgtaatgttgaaaatttttatttaataaagtttatgaatatgttaattttgataattaaattttgtattattaagttttatttgagttttaggataaattagtaagttagggtaaatattttttggtgtttgtttttaaggattatagaaaaatttgtatttaggataggttttgtttttatattatttttgttttagcggttatgtataatgtatggtggtattgtttaagagttttatataattaagtttaaaaagtgttttaagtatttaggtaggtaatttatttttttttttaaatgttaggtttcggaggattagaattaagttttatagtaggtgattatatcgtgtgtgtgtgtgtgtgtgtgtgtgtgtgtgtgtgtgcgcgcgcgcgcgcgtacggagggggggaggggggagagagagagagatagagagcgagttaggttttttttagaagtaggagagggatgaatagatttttttatttaattttggggagttggggagggtttttttagttaagaggattgataagtatttttgtttttattttatggaacgtttttaggtgaaatttggttttgtattgtattaattattttttttttttttttcgcgtcgtagcgtattttaatttttttattattttttaggtggggttggggttggggattttaaaagtttgtaagagttttttttcggttcgcgttttcgtttcgcggagggacgtgaagagaaatgatcgtcgggcggtcgcggtttttcggtcgattagtttttgcgaggttcggatgtgttttttttcgttgtcgttaattttatgtgttttttagttattgttaatttttttttacggtttagtttagcggttagcgtaggaatgaggaagttcgagtggggttggagggggtgcggagggttgggcggtaggatttgggttacgcgttttttgtcgggtttttattcgttcgagtttggtttattcgggtggcgagttcgcgttcggttttttggcgcgggtgggtttttttttttaagcggcgcgggtttgtcggttggagaaggaagaggcggcggtaggtcggagttcgggcgggttcgagtgcgggtcggggcgagcgggagcgcggcggggtcgggttaggttagttagcgtcgcgttatggtcgtagcgcgggcggagggaagcgtagggcgcgcggtggtcgggcggcggcgtcgttttattggtcgggcggttgcggtttcggcggcgttgggtttcgggagcggggtcggtggttgcgtgtaggtcgagggttgcggcggttggcggttcgatcgacgggaagggtaggggaagttgttagcgcgtcgtcgggtcgtttcggtggcgaaattttttttttttgtttcggttcgttggtgtatttttttttttttttgtttcgtttatttttttattttttggttggaaatttttattgacgtcgagagagtatatagatagacggatatacgcgcgtacgtagcgggggcgggaggtagggtcgttgtcgggggtgggggaagttcgtatttttaggggcgttgtgcgttttcggttcggttttgtcgttcgtttcggttttcgtttttcggggtcgtttcggggcgtcgggcgaggggcgcgcgttaggcggtttggacgtcgcggtttttgcggggttttggttttttagtagggcgttttcgaattttaagggttggagtcggtagggaagtttttaggaagcgtttgtcgggtttaattaatggtcggggaacgtaggtagtacggaggcggcggcggtggtagtgtcgttgatagagttatgcggtttatagtttttaagggtaggttcgagtagttggagggtcggtatggatttaagtatgttagatataaaaataaagtttatttgtatattttatttaagcgtgttttagttatatttatatttttttatagattaaattataatttcgttattataaacgatttgtgtttagtaaagtataattttttattggtttttggtgcggttttaaattttttggttatagagtagttatttagaatgtttatttataaggtattgttaggtttttatgataattattgtggatagaattatagtgatggtggtagtaatggttttggtttatagtttataaaatattgatttggtagaggggagttttttttttttttgaagagatcgttattggtatttattgataggttttttagtggttattatttattggtatttgagttgttttagtgttgggtattgtattaggtataggttggggatattttcgggtggattatttttttatataagaaagtttgagtcgaaatatatattttagagtttattgttttattattgggtggagtgataattgaaagtttagttttaaaatattagtaattaggtttttattaggtaatattgtagtggtatttagattgtttatggtatgtttattttagttttttcgtgtttattttttattttttttttttagtaggttataaaaatttttttggtggagtgtttttttggaaaaaaaaaataaataaaaaaaatttatatatataaaaatttagcgatttatttgattgtttatgaggtgagttttcgaggcgattttggaggttttaatagtcgatttttaagtgattttatttagtttcgggaggttgagtagttggaatttagaggatttataaagattgaatataatgattttttaagaaattttgtgagtcgggtgcggtggtttatatttgtaattttagtattttgggaggttaaggcgggtggattttttgaggttaggagtttgagattagtttgattaatatggtgaaattttatttttattaataatataaaaaaattagtcgggcgtggtggcgggcgtttgtaattttagttattttagaggttgaggtaggagaatcgtttgaattttggaggtagaggttgtagtgagttaagattgcgttattgtattttagtttgggcgagatagagcgatattttgagaaagaaagaaagagagagggagggagagagggagggagggagggaggtgtgagtatatatattttattttttattttgtaaggggtggtagttttattattaaaagatagataaatataattgttataagagtagagttagtgtgatatatttgggagtaaaaaatgaagagcgttaattattgaaaaggattaaattaaattttaaatttaaaatgattttataaaatgaatttaaaatttagggtagggtgttgagtaggtatatttttttggggttgttgtaaaaatttattatcgattgaatagtttataacgggaatttattttgttatagttttggagtttaaaattttgaatttaaggtgttattaaggttatgatttttttgaaggttttagggaagaattttttgtttttttttagtttttggtagttttagtaatttttgttatttttggtttggttgtaatattttattttgtgtttatattgttatatggttttttttttcgtgttttttttgtgtcgttatatttaatttttttttattttttttttatgaagatattagttattggatttagagtttattttaatttagtattattttattttaatttgataatatttgtaaagattttagttttaaataaatttatgtttataggtatttgtggttaggatttgaatatatgttttggggggatgtaattttatgtagtatagtaggtaaaattataaaagttttttggtttgttgattaatttttttttatttttgttttgttatttaatattttttttatattgtataaatttgtttttaggaatattttttataaatttatttattttaaggtgttagaaggtatttgttattattaggttacgaagaggaaaaaaatgttttaatgtggaattttagatattaatattgtttaaaagataagttattttgtgtttgttatttgttttagtttatttgtgttgttatggtagaatatataagattaggtagtttataatgaaaagaggtttattaggtttatagtttttagattgtataagaagtatggtattagtatatgcgtttggtgagggttttaggttgtttttatttaatggaaggtaaaggcgggtggtgtgtgtagagagatcgtatggcgagagagaggggagagatgttaaattttttagtaattagtttttataggaattaatgtagtgagaatttatttatttttttttttttgtagggaatagtattaatttatttgtgagggatttatttttatgatcgaaatattttttattaggttttatttttaaaattggggttatattttaatatgaggtttagaggagataaatatttaaattatagtattattaaattattgaaattatataaatttttttttttatgaagttattttggaaatattagtgtggagagaattttgaggttgagatttgtgtagtgtgtttattggtaatgagaatataggaaaagtatgttttttttttaattgtttttgagtaaaggtgatataatatttttgtttatattttatggttttatttagatgtaagagagtagggaattatagtttttttggttggttaggaggttgaaataggtcggttaagtatatggttaatatttgttatatacgtatttatttatttggttgttagttatataaagtggattattattataatttttatatttatagatgaaaagttgaataatttttttaaggttttataattagtaaatagaaggagagttaggatttgaatttaatagatttggttttagtgtgtatgatattaattattatattaaattattatttaatgatataaaaaggagtatgtaagagatttttagaagatgaggttaataggatttgtttatagattatatatgtagtttgagtgagaggaagatttatagatagttttgagtgttttagtttgagtgattagaatagtaatattgtaattgggaaaaaatttgtgggaatgtaatgtatttttatatattaaatatatatgtaatatgtaaatatatatattttagatatgtttagtatgatagatttagtgagatgtttatatggaaatgattaataaatatgtaattgaaaatttaaggttgttgtttagagagatatggcgttggaaatggaaataattgtaaagatgcgatagttgttaggagagtgtttttaaaatattagtggttaaagagttaggagataaggggttaagtataggaattcgaggaatgattttatttttggggttggtatgagagagagatgtttaaaaatttttgtagtgttattaaaagtgggaggaaagtttagaaagttagagaagagagagtttaaagggtatgagagtttttaatagtgttagatattgtagatagtttttaaaggatggagaggggaagagatagttgattttgtgaattataaaattttaagttcggtttcggggtatggttgtgtagttaagggtagaaattagttttttttttgtttattttgttcgttgttttggaggaaaagggaattttattaatttttaaatagtattgatacgtagtggttgtggttttatatgatttttttagatgtgttttaatataatgaggaaaattaagaatgaggagattgataagtgagtgggaaatggggaaacgagggtataagtgtaaaagaattttattaagagtttggagtgagagggaaggaaagaggagttagtgtgattttttatttatttgattaatatttatggagtgttagagttaatggaagtttggaaaggtggagagatagtttaacgagttaatagcgttaataatagaaagattaatgagggagtcggagttagaagaaaggagattgtgcggagttcgtaatgtaggtgaggaggtaggaataaatttgtttgtgtgagatatgaggaggaagagtatagagaagagaggttttaagaagagggggaggattaggttataattattagttgaaatatattaaattaaaaatgagaataaatttttagagaatgtgtttgttagggttgttaaaataaaatattttagattgggtggtttaaataatagaaatattttttatcgttttagagattggaagtttaatagtaatgtgttggtagtattggtttatttgagggtttttttttttggtttgtagatggttattttttttttgtttttatgtggttgtttttttgtgtttacgtttaaattatttcgttttataaggatat

SEQ ID NO: 1321 - DNA, 5183 bp, Artificial Sequence
  chemically treated genomic DNA (Homo sapiens)
tgtgtttagtttaataaagaggttttttaagtttagatagatgaggttttagtaagtgataagttattttgagttagtttaaatttttaggttaatatgtattaggaattgttgaatttgatagaggggtatacgagggtttattatattattttttttatttttttttttttgagatagcgtttgtttgttatttaggttggatggaatgtagtggtacgaatatggtttatagtagttttaattttttgggtttaagtaatttttttattttagtttttcgagtagttgggattataggtatttattattatatgtggttaatttaagtagatatgaggtttttttatgttgtttaggttgtttttaaatttttgaggttaagtgatttgtttgttttagttttttaaagtgaaaatttttgtatgtttgaaatgttttttaataaaggttttgttttgtttatttttagataaattacgttttagattgttgtaattaaaatagtttaatttttaggggtgtttttagagatgttgtggagatttaaagaattcgtgttgattttggtggtaatttatgagtattttgaaaggatagatgtgattagtggtaattagtacgggtttattaagttagagtatattaagatgaatttattttattatatatttaatttttaatttttaatttatttatttagagatttagttatgagataggttaatttttgtatttttgtggggaaaagtaagagagattagattgttattgtgtttgtatagaaagaagtagatataggagattttattttgttttgtattaagaaaaatttttttgttttgagattttgttaatttatgattttatttttaatttcgtgttttttgaaatatgtgttgtgttaaatttagggttaaatggattaagggttgtgtaaggtgtgttttgttaaatagatgtttgaaggtagtatgttcgttaagagttattattattttttaattttaagtatttagggatataaatattgcggaaggtcgtagggatttttgtttaggaaagttaggtattgtttaaggtttttttttatgtgatagtttgaaatatggtttcgtgggaagggaaagatttgatcgttttttagttcgatattcgtaaagggtttgtgttgaggaggattagtataagaggaaggaatgttttttgtagttgagataagaggaaggtatttgttttttgttcgtttttgggtaatggaatgtttcggtataaaattcgattgtacgttttatttattgagatagggaaaaatcgttttagggttggaggtgggatatgtaggtagtaatattgttttgtaaagtattgagatgtttatgtgtatatatatttaaaagtatagtatttaattttttattttgtttatgatgtaaagatttttgtttgtttgttgattttttttttattattgttttgtgattatgatatattttttttttagagaaatatttatgaatgattaataaatattaagggaatttagaggttggcgggattttttatatgttgaatgttggtttttcgagttttttttttatattttgtttttgtgttttttttttttttaagttttttattttattttacgagaaatatttataggtgtggaggggtaatttatttttttaattttttgagacggggttttattatgttgttaaggttggtttcgaatttttgggtttaagtgatttattagttttggttttttgaagtgttgaaattataggtgtgagttattatgttcggttttagtttattttaatttaaggttaggaatttgatttattagagaaacgtagtagataatatatttggattttagtaaattgtttggtagaattttatgatatttgtttgagaggtttatagtaaggtggaaagggttgttttgttttatataaatttaggggagaaagttttattttggagttaatagattgggtttgaattttggttttgtttttttttagttgtgtgtttggttgttattttatttttttgagttttaatttttttattagtaaaagtaatatttattttttagggttgttgggagggagaataagaatttttaaagtattcgaatttagtaattaggatattatatttgtaggtaagatgaagaggggtggggaagtaataggaaatagtttaaatcgagagttataatagtttttttttatttagtgttagtgtaggtttgtgattttgtttttaaaaacgtttggggtaagttgtaggaaagattcgagatagtttatgttttattataagtttaagggaggaggattttaggtagggagattatttatggtatttgttaaggagaaacgttattgattagagagaggtttagttatgtatttcgtgtttggtgaatttttgttttgatttcgttgtttttagaagtgtttaggtggaaattggaaggtttataagaggtaattcggtagtatatagtggtttacgtttgtaatttaaaatttaagtattttggaaggttaaagtaggaggattatttaagtttaggagtttaagattagtttaggtaacgtagtgagatttatttttattaaaaattttaaaatttgttaggtatggtggtgtgtatttgtagttttagttatttaggagagttagagaatcggcgtatttcggagttcgaggttgtagtgagttatgattacgttattgtattttagtttgggtgatagagtaagatattgttttaaaaatataaataaataaataaataaataaataggtcgtgcgtagtggtttacgattgtaattttaatattttagaaggcggaggttagcggattatttgaggttaggagttcgggattagtttgattaacgtggtgaaatttttaattttattaaaaatatataaattaggcgggcgtggtggtggtcgtttgtaattttagttattcggtaggttgtagtaggagaatggtttgaattcgggaggtagaggttgtagtgagttaaaatttttttattgtattttagtttgagattaaaaaaaagaggcgattttttatatcggtggaaatttgagttgtttaaattttggatgttttttttagttttaatattttagatttttttggtggataaatattttatttttttttttttgagtagagtttttgagttttggttcgttgggaatttgttatttttaaaaaagttcgaggttcggattgtttttttcggagttttgaggttgatgagacggagcgagagaggggtcggggtcgaatggagtttattcgcgggtttagggaggtcgttagagggcgttcgggatcgatcgtaagaataattttttttttttttcgttaatttttcggtagcgcgtcgtttagggtgggggtttcgagggttggggtcgtcggtttttttttggggatttttcgttttagagaaagttaagcgttaggcgtagttaaagtcgagaggtagcggaagttttcggttcggggtggcgttgggttagcgggtattttttcggcggttttttggtcggtcgaattcgcgtttggtgttttgttatttcgtttttcgttttgagtgagtttgtttttttttaggggcgcgttcgagtcgtttcgggttggttgcgttagtttagagttaaatttttagttaatgaaaaagggcgcgaggcgtgacgtacggaaacgttatgggaattttttttttcggggggtcgagaaggggttttttcggttttgagttttgttggtaggcgaggtgtcgcgatcggttttaggtgggtcgggcgcggagagaagtcgtaattagagtcgtcgttacggtgagtggttggatttagatttttgggtggtcgggataagagaaaagagggaggagggtttttagcggatagcgtttggggttggagagtagtagttgtatatagtcggaaagggcgcgtaggcgacgatattcggatttacgtcgatatcgttgtataaagatacgcggattcgtacgtatatttgtatttgtgttggcgtatatacggtagcgttcgtgtagtcgtattcgtatatatatgtatacggagacgtgtttatcggtgtattggtgtttgtatttatattttttacgtataaatttaagatacgtttattcgtgttcgtatattaagataggcgttgatatatatttatattgagaagttcgggatttatttatttatatatatgttcgtttgtatatttatgttgacgttatggatatataatatgtaattaagtattatagtcgaaatatatttgtggagttgtgatggagatatatttttgtattaggtgggggggggggggggggagcgtgtagagatttttttgtcgtttgcgcgtttagaatcggtgcggtgtgggattagttgttgttgtgaggtttgggagagagagaaaagagtttatttcgaggaggagatatttttttcgtagttttagaatcgcgttttcggggtagaatttcggggttttttataggaaagagttttcgtttataggttgttcgaaggggaggtcgttcgatagtaggaatgtttttttaaaagttttcggggtttattagtcgtggttttttttttggtagaaaattttaaggttgttttagatcgggggaggggagcgggaggcggatttggttttagattgttagttttttttcggtcgtgaaagatttttttgttttttgttttggagggaggagggggtttaatttttatcggggtttttcggatttttttagatttttgttcgttgaaaagtagcgggagttcgtagattgtcgagggtttttcgtttttttcgtcgcgagggcggggttagtggcgttatttttaggttcgtttttttcggtttcgtttttttttggtattttcgggatttttttaagttgttttaatttttttgtttttttttcggttaagtttaatttcggatttcgttttttatcggattttattcgttatattcggataggcggttggaggaggtcggatttttttttaaatttgggtttttatttttcgtttatttttatttagatttgatttttttttttacgttattttttttaattttagg

SEQ ID NO: 1322 - DNA, 5183 bp, Artificial Sequence
  chemically treated genomic DNA (Homo sapiens)
tttaaagttgggaggagtggcgtgggggagggggttagatttaaatgggggtgggcgggagatgggggtttagatttgggggagggttcgattttttttagtcgtttgttcgggtgtggcgggtgagattcggtggagagcgagattcggagttgggtttggtcggggaaggggtaggaaagttagagtagtttaggaaagtttcgaaaatattaaggggaggcggggtcggagggggcgggtttggaaatgacgttattggtttcgttttcgcgacgggaggggcgggaggttttcgatagtttacgggttttcgttgttttttagcgggtagaggtttaggagaattcgggaagtttcggtgggggttaagtttttttttttttttagggtagggaataggagggttttttacggtcgggaggaggttggtagtttggggttaagttcgtttttcgtttttttttttcggtttggagtaattttgggattttttgttaggagggaggttacggttgataaatttcgggggtttttggggggatatttttgttgtcggacggtttttttttcgaatagtttgtaggcgggggtttttttttgtgggaggtttcggggttttgtttcgagaacgcgattttggggttgcgggaaaagtgtttttttttcggagtgggttttttttttttttttttaaattttataatagtagttggttttatatcgtatcggttttgggcgcgtaggcgatagggagatttttgtacgtttttttttttttttttttatttaatataagagtgtgtttttattatagttttataagtgtgtttcggttgtagtgtttggttgtatgttgtgtgtttatggcgttaatatgagtgtgtaagcgagtatgtgtgtagataggtgaatttcgagttttttagtgtgggtgtgtgttagcgtttgttttgatgtacggatacgggtgagcgtattttgagtttgtgcgtgaagggtgtgggtgtaggtattagtgtatcggtgggtacgttttcgtgtgtatgtgtgtgcgagtgcgattgtacggacgttgtcgtgtgtgcgttagtataggtataggtgtacgtacgggttcgcgtatttttgtataacggtgtcgacgtggattcgagtgtcgtcgtttgcgcgtttttttcggttgtgtgtagttgttgttttttagttttaggcgttgttcgttaaaggtttttttttttttttttttttgtttcggttatttaggggtttgaatttagttatttatcgtggcggcggttttggttgcggttttttttcgcgttcgatttatttgggatcggtcgcgatatttcgtttgttagtagggtttagggtcgggaaagttttttttcggtttttcggaggggggaatttttatgacgttttcgtgcgttacgtttcgcgtttttttttattggttgaaagtttaattttggattggcgtagttaattcggagcgattcgggcgcgtttttgagaggggataggtttatttagggcggggagcggggtgataggatattaggcgcgagttcggtcggttaggggatcgtcgagaaggtattcgttgatttagcgttatttcgggtcgggagttttcgttgtttttcggttttggttgcgtttaacgtttggttttttttgaagcgggggatttttagggggaagtcgacggttttagttttcggggtttttattttgagcggcgcgttgtcgggaagttagcggaagaggaaggaagttatttttgcggtcggtttcgggcgttttttggcggtttttttgggttcgcgagtagattttattcggtttcggtttttttttcgtttcgttttattagttttaaggtttcgggagagatagttcggatttcgaatttttttagaagtgataggtttttagcgggttagggtttaggagttttgtttaggagaagggaaatgaagtgtttatttattaaggagatttggaatattagaattgaaaaaggtatttagagtttaaatagtttaaatttttatcgatgtgggaaatcgttttttttttttagttttaggttggaatgtagtgaggggattttggtttattgtaatttttgtttttcgggtttaaattatttttttgttgtagtttatcgagtagttgggattataggcggttattattacgttcgtttaatttatgtatttttagtagagttgggggttttattacgttggttaggttggtttcgaatttttgattttaggtgattcgttggttttcgttttttaaaatgttggaattatagtcgtgagttattgcgtacggtttatttatttatttatttatttatttatgtttttgagatagtgttttgttttgttatttaggttggagtatagtggcgtgattatggtttattgtaatttcgaatttcggggtgcgtcgattttttgatttttttgagtagttggggttataggtgtatattattatatttggtaaattttaaaatttttagtggagatggattttattgcgttgtttaggttggttttaaatttttgggtttaagtgatttttttattttggttttttaaaatgtttggattttggattatagacgtgagttattgtatgttgtcgaattgttttttatagattttttaatttttatttgaatatttttagaggtagcgaggttaggatagaaatttattaagtacggagtatatgattggatttttttttggttagtagcgtttttttttagtaggtgttatgagtaatttttttgtttggagttttttttttttaggtttatggtagaatataaattatttcgggttttttttgtagtttgttttagacgtttttaagaatagaattataggtttgtattggtattaagtaaagagagattattatggttttcgatttgggttgttttttattatttttttatttttttttattttgtttgtaaatatagtgttttagttgttaggttcgggtattttagaagtttttatttttttttttaataattttaggaggtgaatattatttttattgatgaagaaattaaggtttagagaggtggagtaataattaaatatatagttagaaagggatagagttaggatttaaatttaatttgttgattttaggatgaagtttttttttttaagtttatataaaataaagtagttttttttattttattgtgggttttttaaataaatattataagattttgttaaataatttgttgaaatttagatatgttgtttattacgtttttttggtaagttagatttttaattttaaattaaaatggattaaggtcgggtatggtgatttatatttgtaattttagtattttaggaagttaaggttggtggattatttgagtttaggagttcgagattagttttggtaatatggtgaaatttcgttttaaaaaattgaaggggtgggttgtttttttatatttgtgggtgtttttcgtgaggtggaatgagagatttggaaaagaaaaagatatagagataaagtatagagaaaggattcgaggaattagtatttagtatatggaggatttcgttagtttttgagtttttttagtatttattgattatttatgggtgtttttttgagagggggatgtgttatggttataagataatagtggggagagggttagtagataaataaaggtttttgtattatagataaggtaaaggattaagtgttgtgtttttagatatgtatatatataaatattttaatgttttataaagtagtattgttgtttgtatgttttatttttagttttaaggcggtttttttttattttagtagatggaacgtataatcgggttttatatcgagatattttattgtttagggacgggtaggagatagatgttttttttttgttttaattgtaagaggtattttttttttttatattaattttttttagtatagattttttacgggtgtcgggttgggggacggttaggtttttttttttttacgaggttatattttagattattatatggggagaaattttggataatatttggtttttttagatagaggtttttgcggtttttcgtagtgtttgtgtttttgggtatttgagattagggagtggtgatgatttttaacgagtatgttgtttttaagtatttgtttaataaagtatattttgtataatttttaatttatttaattttgagtttgatatagtatatgttttagagagtacggggttgggggtaaggttatagattaatagaattttaaggtagaagaattttttttagtatagaataaaatggagttttttatgtttatttttttttatatagatatagtaataatttgattttttttgtttttttttataaaaatataaaaattagtttgttttataattaggtttttaaataaataaattaaaaattaaaaattaaatgtataatggagtaaatttattttggtatattttagtttagtaaattcgtgttggttattattgattatatttatttttttaaagtgtttataaattgttattaaaattagtacggattttttgagtttttataatatttttaaaagtatttttaagggttgagttattttagttataatagtttaaggcgtaatttatttaaagatgaataaaataagatttttattagagaatattttaaatatataaagatttttattttgggaggttgaggtaggtagattatttgattttaggagtttgagaatagtttgggtaatatagggagattttatgtttatttaagttagttatatgtgatggtgagtgtttgtagttttagttattcggaaggttaaggtgggaggattgtttgagtttaggaagttgaggttgttgtgagttatgttcgtgttattgtattttatttagtttaggtgatagatagacgttgttttaaaaaaagaagagtggagagaatagtataatgagttttcgtgtgtttttttgttagatttaataatttttaatgtatgttagtttggagatttaaattaatttaaaatagtttgttatttgttagagttttatttatttgggtttaagaaatttttttgttaggttgggtata

SEQ ID NO: 1323 - DNA, 5941 bp, Artificial Sequence
  chemically treated genomic DNA (Homo sapiens)
aaaagaggttgtaaatttagagtttataggttttgtttagttaatagatgtagaaatgtattgtgtttagtttttataatgtttttatgtttgtttgaggtaaggttttatttttttgttgaggttggagtttagtgatatagttatggtttattgtagttttaacgttttaggttcgagtaatttttttattttagttttttaagtaggtgcgattataggtgtatgttattatatttggttaatttttttatttttatttttatagcgatggggttttattatgttgtttaggttggttttaaatttttaaacgtaagtgatttttttgttttatttttttaaagtgttgggattgtaggtatgagttacggagttgggttaattttttttatttttttaataatagaaggttattattgaattgaaggtgttatatgttaaaagttgtttgagttaagtatgagggaagtatatattttgatttaagttgttggagattttattttttttagatttaaatggtttgttttatttatttgtgaaatttgtttgttttttatgcgtaagtattttgagtttgagattttttaaagttttgatttttattaaattgtagaatttgtagtaaaggaaatatattaaggatttgacggttttatttttattttattataaatgaaggttttgatagttgtttttttttttttttttttttaattgagatagagtttttttttgttgtttaggtaggagtgtaatggtacgattttagtttattgtaatttttattttttagggttaagtgatttttttgttttagtttttcgagtagttgggattataggtatgtgttattacgtttggttaatttttgtattttgagtagagatggggttttattatgttggtcgggttggttttgaatttttgattttaggtgattagttcgttttagttttttaaagtgttgggattataggtcggagttatcgtttttagttttgtttttttatgggaaaagatttatagtttgggggttttttgttttgaagaggatgtagatagttgttattacgatagtaagaaagaagataatttgagattgaaagtagaatatttagaattttatagtggggttgttagttgggagtgtatttgttttgttttttaggaattttgttatggttcgttttttttttagtttagttgtattgagtaataggtagtttgattttagagttgaatttgttgtagttaaaataatttagttttaattggttaggttagttgatataggttattttgttttgaggattttggattatttggttgaatttgtagattttttttatggtattttaggtaataggttttgtttatattgtgtttgttttatgtaggaggagtgtttgaagtgtttgtagttaaattaggttttggcgatgtttttttttttatgggggtgtttttggagtattattggtcgttttgttattttttacggttgcgttttgggttaaaatataaagtagttttgaggtgtaatttattattttgttttatgtattaaaaaggttaaataatattaaaaattagttatttaaagtattttgttttgttttgttttgttttttgagatagagttttattttgttgtttaggttggcgtgtaatggcgcgatttcggtttattgtaatttttgttttttcggtttaagtgatttttttgttttagttttttaagtagtatttgtattattatattcgattaattttttgtatttttagtagagacggggttttattatgttggttaggttggtttcgaatttttgattttatgatttatttgttttagttttttaaagtgttgagattataggcgtgagttattgcgtatagtttatagttttaatattttttttaacggttatgttagttagaatgtttgataatgaggaggagaaaaatttgagtgttgaagggtttataaaggttttttttttttttttttttttttttgagatagggttttagtttgttgtttaagttggagtgtagttgtgttattatggtttattataaattttattttttaggtttaagtaatttttttatttttgtttttggagtagttgggattataggtatttgttattatattttgttaattatattttttgtagagataagagtttagttttgttgtttaggttggtttttaatttttgggtggtaagtaatttttttgttttagtaatttaaagtgttgaaattatagtagtgagttataatttttggtttataaaggtttttttaaattaaaattagatttttttgttgttttttgtttagtttgtttatggttttaatttttaagtgtatatttttttttatttacgttgtaatgtttgttgatttaaattatatagcgttatagatgatggggagaaaatttgttggattatattatttaaaattgttttttagagtcgtaggaaaataataggtatttttttggaaatttttattgtagggataagttattaaggtttagtattttttaatttttgtaaaaggtattatgataaattaaggaacgtttgtgttttatttttattattaggtgttatataaaataattaggaataaatattaagattttgaaggttattagaaatataaaattatagaaggtggtgtaaaaaaattttattttttagatatttttattttttataattatttttatatttgaagttaaatatttttttttgatgtattttttataattgggatatttagagtttgatgtttttgtatttgtttaaaagaagtgattatttttagatgggggttaggggatatttattttttattttttttaatagttggagtagaaaatatttttgagtatattttaaattatagtgtagttagtttgatttttatagcgtgtttttaaaagtgttaatattaagattgttttggttaaatgattaatatattgttaaggggtttttgggtaaatttttatgtattttagtttttttttagggaagtaggaataatatttattttataagattagttttgagaataatgtggtatataaggcgttggaatttttttaaaaatttatattttgatatttttaagagttatggttatttttataaaggagagttaggtatgtatttgtagataagtaatatgatttttaagttagaaaagattttaagtaatatttaatttaattttattataaaagttaagtatattataaaaaagttaattgatttttttaattaatgtgtagttaagtaaagatagaatttggaattgagatgttttattgtagttattgttttattttgttttaattattgtagatttgtatattataaatttgtagagataatggtgtttatttttgggaagtttttattgtaatatgtgattattattattttggagggtttatttgattttaatttttttttttttatatttggtttttttttatcgagttagattttttttattttaatattaggggaggggtggagatacgaagagaggggaaggattggttagtataaggttagttaaggtaaagatgattgtaataattattagaaatttttgtagaattatagaggttttttgggattaattttgaagagttttgatcgaagtttgttttattttgtttgtattaattttattaagtagatgaatttagtttatggtttgtaggtttggaggtggaggtggagtggagagtataaattatatttttgtaggtgaaattagagtatagtgagtcgaaatttttttttatttaggtggcgtgaatgggtttaattgttattgttttttaggataagagagtaaggaggggcgggtaggatgggattattttgagtttttcgtaggatgtttggtaattatttttttagtggtttttaaggtttaatcgcggttaaggtattaattaaatttattttttagtttttttttttaagtttttttcgaatttgggtgtttagaagtaggtttacgattttttttttgcgggagtataatgtaggttagatagtataaacgaatagttatttatgaatataatagttattttgttattgtaaggtatttataattattattataaatattaatattttgttttatttgggaaataaaaaaaattatggttttatttagtagtttttttatatagggagcgtttgttttttttttagttaatagggttgtttatttttaggaagtgatttgagagttttttaaggatttaggttttttatttttttaaagtttttataatttttatttggcgggggtgcgtgggggggtgggggcgaagttaaaagtttttttgttgtaaagagtttggtataggtagaaatatcggcgcggtttgtagttttttaattatagtgcgtttttttttttagaagtttggggaaagtaaatttttacgtttagttattatttttatttttgcgtttttaaaagattaaaaaacggaaaggatcggtaggttggtaaattttaaagagggatcgtttattaggtcggcgtttttgggattttagtagtcgacgattttaatttaaatcgatcgtgggaaattttagggaaagaaggtttatttgtagagggataggattatagggtgtaggttgtagggaagtatcggggggagggggtttggtcggaaggattttttagttattcggcgtttattaaaaagttttttgttcgtgattttagtggtttatcgtagggagttttttcgatgaattttagtttagggtttaggtttttttttttttttagtagaggacgaagttagttttttttttttggtttgattggtttggaaatttttcgagtttgatttcgttttagagaaatttttagttagcgtttatagggcgtcgcggcggcgttgtagagtttatagtagttcgtgtcgtcgtttcgttcgttagcgttttagcgaggaagtagcgcgtagttcgcggtttagcgtattcgtagtagcgttcgtagttcgttcgcgttatgttttaggcggtcgagcgtttttaggagtgggttatggagggttttcgcgacgggttgaagaaggagcggttattggacgatcgttacgatagcggtttggattttatgaaagacgaggagtacgagtagatggttaaggagttgtaggagattcgtttcgagtcgtaggaggtgtcgcgcggttcggagttttggaagtagtagtttatcgaggacggggattcgtaagtggcggaggttcggggttgggggtcgtcgggagggcgggacgcgcgcggtttgggggtgggaggcgtcgggtttggagttcgagtcgggggattagcgatgtagtcgggcgggcgtcgcggtatttcggggtttttgtatcgtttcgaacgttgtagggttgtagggtcgcgcggggtatcggtttaattcggaggggcggcggttgggttttggtggatggtagcgtcgttatacgttttttttttttagattcgttttttaggtcgggggcggggcggtagcggggacgcgaagttttcggttgtataaggcggggcgggagtttttggtcgttggcgggcgtcgagtagtcgggaggggaagtatagggcgtttcgagttggcgggagggcggggcggtttggtcggcgttcgtcggggtcgcggggggaggggggcggaaagtttttgggcgtttgttaggaatatttagtttataataatttcgcggaaaatatcgcggtttcggtttttagaaatttcggttttgcgtaatttttcgtagttcgcgtttttttgggttttacgcggtgtatttattatttttggggttttttttttttttttttatagg

SEQ ID NO: 1324 - DNA, 5941 bp, Artificial Sequence
  chemically treated genomic DNA (Homo sapiens)
tttgtggggaagagagggaaaaattttaggggtggtgagtgtatcgcgtggggtttagggaggcgcgggttgcgggggattgcgtaaggtcggggtttttggaggtcgaggtcgcggtgtttttcgcgaggttattatgagttgagtgtttttggtaggcgtttagggatttttcgttttttttttttcgcggtttcggcgggcgtcggttagatcgtttcgttttttcgttagttcggaacgttttgtattttttttttcggttgttcggcgttcgttagcggttagaaattttcgtttcgttttatgtaatcggggatttcgcgttttcgttgtcgtttcgttttcggtttagaggacgggtttggggggagggggcgtgtggcgacgttgttatttattagggtttagtcgtcgttttttcgagttgggtcggtgtttcgcgcggttttgtagttttgtagcgttcggggcggtgtaggagtttcggggtgtcgcggcgttcgttcggttgtatcgttggtttttcggttcgggttttaggttcggcgttttttatttttaggtcgcgcgcgtttcgttttttcgacgatttttagtttcgggttttcgttatttacgagttttcgttttcggtgagttgttgtttttagggtttcgagtcgcgcggtattttttgcggttcgaggcggattttttgtagttttttgattatttgttcgtatttttcgttttttatggagtttaggtcgttgtcgtggcggtcgtttagtagtcgttttttttttagttcgtcgcgggggttttttatggtttatttttgggggcgttcggtcgtttggaatatggcgcggacgagttgcgggcgttgttgcgggtgcgttgggtcgcgggttgcgcgttgttttttcgttggggcgttggcgggcgggacggcggtacggattgttgtgggttttgtagcgtcgtcgcggcgttttataaacgttggttggggatttttttggggcggggttaggttcggggaatttttaagttagttagattagaaaaagagaattggtttcgttttttgttagggggaaaaagaagtttaaattttgagttggggtttatcggagaaattttttgcgatgagttattagggttacggatagggaattttttgatgagcgtcgagtggttggaaagttttttcgattaggtttttttttttcggtatttttttgtagtttgtattttgtaattttgtttttttgtaagtgagttttttttttttggggttttttacgatcgatttgaattggggtcgtcggttgttgagattttaaggacgtcgatttgatgggcggtttttttttggggtttgttaatttgtcggtttttttcgttttttgattttttgaaaacgtaagagtggaaatgatggttgggcgtagggatttgttttttttagatttttaaggggaaggacgtattgtggttagggggttgtaggtcgcgtcggtgtttttgtttatattaggttttttgtagtaaaggaatttttagtttcgtttttatttttttacgtattttcgttaggtagaagttgtgaaagttttggaggagtgaaaagtttaaatttttggagaatttttaaattattttttagggatgaatagttttgttgattgggggaggggtaaacgttttttgtatggggaaattgttgaataggattatgattttttttgttttttaagtaaagtaaggtgttaatgtttgtagtggtggttgtggatattttgtaatagtagagtagttattgtgtttataagtagttattcgtttatgttatttgatttatattgtgttttcgtagaaaaaggatcgtgagtttatttttgggtatttaaattcgaggagaatttagagaaggaggttgaagaatgagtttagttagtgttttaatcgcgattggattttaaggattattaagaaagtagttgttaggtattttgcgggaggtttaaggtagttttattttgttcgtttttttttgtttttttgttttgggggatagtagtagttggatttatttacgttatttgggtagaaaggggtttcggtttattatgttttggttttatttgtagaaatataatttatgttttttattttatttttatttttaagtttgtaagttatggattgaatttatttatttggtagaattggtataggtaaaataaagtaaatttcggttagagttttttagaattagttttaggaggtttttgtagttttgtagagatttttggtgattattgtaattatttttattttgattggttttgtattaattaatttttttttttttttcgtatttttattttttttttaatattagaatgaaagaaatttgattcgatagagagagattaagtatgaagggaaaaaaattaaaattagatagattttttagggtaataatgattatatgttataatgaaaattttttagggatagatattattgtttttgtaggtttatgatatgtaaatttataatgattgaggtaaggtgaaatagtgattgtaatgggatattttaattttaggttttatttttatttgattgtatattagttggagaggttagttaatttttttgtggtatatttaatttttataataagattagattgaatgttatttaaggttttttttagtttaaaagttatattgtttgtttataaatgtatgtttaatttttttttgtaagggtgattatggtttttggaaatgttagggtataaatttttgaaagaattttagcgttttatgtattatattgtttttagaattaattttgtaagatagatattgtttttatttttttaaaaagaaattgaaatgtatagaaatttatttaggaattttttggtagtatattaattatttggttaaagtagttttagtattaatatttttgaaaatacgttgtgaaaattagattgattatattataatttggaatgtatttaaaagtattttttattttaattgttagggaaaataaagggtgggtgttttttgatttttatttggggatagttattttttttaaataagtatagaaatattaaattttaaatgttttaattatagaggatatattagaagaagatatttggttttaggtataaaaatggttataaaaaataaaaatatttgaggaataaggtttttttgtattattttttatggttttatatttttggtagtttttaggattttggtgtttatttttgattgttttgtgtgatatttagtggtaagagtaaggtataggcgttttttgatttgttatagtgttttttgtaaaaattgggaggtgttgagttttgatgatttgtttttatagtggagatttttaaggaggtatttattgtttttttgcgattttgggaaatagttttgaataatgtgatttaataggttttttttttattatttatagcgttatatggtttaagttaataaatattataacgtgggtgaaaaagaatatatatttggaaattagaattatgagtagattgggtagaagataataagagggtttggttttgatttagaaagatttttatgggttaggagttgtggtttattgttgtaattttagtattttgggttgttgaggtaggaggattgtttgttatttaggagttggagattagtttgggtaataaggttaaatttttgtttttataaaaaatataattagtagagtgtggtggtaggtgtttgtagttttagttattttagaggtagaagtgggagaattgtttgagtttgggaggtggagtttgtagtgagttatgatggtataattgtattttagtttgagtaatagattgagattttgttttaaaaagaaaaaaaagaaaaagaaagatttttatggattttttagtatttagattttttttttttttattgttaaatattttagttaatataatcgttaaaaaaaatgttaaaattgtaggttgtgcgtagtggtttacgtttataattttagtattttgggaggttgaggtaggtggattatgaggttaggagttcgagattagtttggttaatatgatgaaatttcgtttttattaaagatataaaaaattagtcgggtgtggtggtgtagatgttgtttaggaggttgaggtaggagaattatttgaatcgaggaggtagaggttgtagtgagtcgagatcgcgttattgtacgttagtttgggtaatagggtgagattttgttttaaaaaataaaataaaataaaataaaatattttagataattgatttttaatgttatttggtttttttaatgtataaggtaaaataataagttatattttaaagttgttttgtattttggtttaggacgtagtcgtaggaaatgataggacggttagtgatgttttaggagtatttttatgggaaaaggagtatcgttagggtttggtttggttgtaggtattttaggtattttttttgtatggaataagtatagtatggataaaatttattgtttgaagtgttatggagagagtttataagtttagttaggtggtttaaaatttttagggtagggtggtttgtgttaattggtttggttaattaaaattaaattgttttggttatagtaaatttaattttggaattaggttatttattgtttagtgtagttaggttggaagaaagacgagttatgatagagtttttgaagagtaaggtaggtgtatttttaattggtagttttattgtgaaattttaaatattttgtttttagttttaggttgtttttttttttgttatcgtggtagtaattgtttgtattttttttagaatagggagtttttaagttatggatttttttttatagaaaaataaggttgggggcggtggtttcgatttataattttagtattttgggaggttgaggcgagttgattatttgaggttaggagtttaagattagttcggttaatatggtgaaattttatttttatttaaaatataaaaattagttaggcgtgatggtatatgtttgtaattttagttattcgggaggttgaggtaggagaattatttgattttgggaggtgaaggttgtagtgagttgagatcgtgttattgtatttttgtttgggtagtagagagagattttgttttaattaaaaaaaaaaaaaaggaaaaatagttgttagaatttttatttgtagtgaagtgaaaataagatcgttaaatttttaatgtgttttttttgttataaattttgtaatttaatggagattaaagttttaaaggattttaaatttaaaatatttacgtatagggagtaggtagattttatagatgagtgaaatagattatttgagtttgaaaggagtgggatttttaatagtttaggttagggtgtgtattttttttatatttagtttagataatttttggtatgtagtatttttagtttagtagtgattttttattgttaaagaaataaaaaaaattggtttagtttcgtggtttatgtttgtaattttaatattttgagagggtgaggtaggaggattatttgcgtttaggagtttgagattagtttgggtaatatagtgagattttatcgttataaaaataaaaataaaaaaattaattaggtgtggtggtatatatttgtagtcgtatttatttgggagattgaggtgggaggattgttcgaatttgggacgttgaggttatagtgggttatgattgtgttattgagttttagttttagtaaaagagtgagattttgttttaaataaatataaaaatattatgaaaattaaatataatgtatttttgtatttattggttaaatagagtttataagttttgagtttataatttttttt

SEQ ID NO: 1325 - DNA, 7069 bp, Artificial Sequence
  chemically treated genomic DNA (Homo sapiens)
cgggttttgttttgttatttaggttggagtgcgatggtgcgattatggtttattgtagtttcgaaattttgggtttaattgatttttacgttttagttttttttgagtagtttggtttataggtatgtgttattatgtttagttaattaaaaatattttttttttttttttggagtggtagtattgttattagaaaggggttttgatttagattttaagagagggttttttggtttcgtgtaagaaataatttgaggtaggaaaaaaaaaatttaaggtgaatttataaagtggaagtaagtttattaagaaagtaaaggattaggtcgggtgttatgttttatgtttgtaattttagtattttgggaggttgaggtgggtggattacgaggttaggatatcgagattattttggttaatatggtgaaattttatttttattaaaaatataaaaattagttgggcgtggtggcgggtgtttgtaatgttagttattcgggaggttgaggtagagaattgtttgaatttggaaggtagaggttgtagtgagtcgagatttcgttattgtattttagtttggtaataaagggagatttcgtttgaaaaaaaaaaaaaaaaaaaaagtaaaggaataaaagaatgtttattttataggtagaggggttattttttgattatatgttaaataagggtggattgtttgtgagttttttgggaaagggatgggtaatttttttttttttttagttgagtgttttttttttttgtagattatatagggtaatttttggttgtttttatggtatttgtaaattgttatggtgttgatgggagtgttttttagtatgtgaatttattatagttagtatataatgagtagtgagggtgattagaggttatttttgttgttattttggttttggtgggatttgatcggtttttttattattgtttgattattaaggtttttgtaatttgtgttttatgttgatttttttttttttttttgaggcggaggtttgttttgttgtttaggttggagtgtagtggtgcgattttagttcgttgtaatttttattttttgggtttaaataattttgttttagttttttaagtatttgggattataggcgcgcgttattacgtcgggttaatttttgtatttttagtagagatagagttttattacgttggttaggttggtttcgaatttttgattttaggtaatttatttattttagttttttaaagtgttgggattataggtatgagttatcgtgtttagtttttgtgtcgattttttattttattttgtgattaagaatggttagttttttgggaatgtagtttagtaggtttaagtttttttttatttagtttttatttaagatggagttgttttggttcgaaagtttttgatagtattttattatattgtgtaggttggttttgagtttttggttttaagagatttttttgttttagttttttaaagtggtgggattataggtgagagttattatatttggtttttttttttatttttaatttttggtaattattaaattagtttattttttatgtttatatttttgttattaatattttataaatgttaaatgtaataatataatagataattttttatgtttggtttttttttagttagtataatttttttgaaatttatttaagggaattatgtatattgtatgtattaatagtttgttatttttttttattgttgagtagtattttatagtatggatgtagtatagtttgtttaattatttatatgatgaaagatatttgggttgtttttagtttttggttattataaataaagttgtaatgaatatttgcgtataggtttttgtgtgaatagagtataagtttttatttttgttggataaacgtttaatagtgtaatggttgggttatatggtaagtatatgtttagttttttaagaaattatcggtcgggcgcggtggtttacgtttgtaattttagtattttgggaggtcgagacgggcggattacgaggttaggagatcgagattattttggttaatacggtgaaatttcgtttttattaaaaatataaaaattagtcgggtatggtagcgcgtttttgtagttttagttatacgggaggttgaggtaggagaatggcgtgaattcgggaggcggagtttgtagtgagtcgagatcgcgttattgtattttagtttgggcgatagagcgaaatttcgttttaaaaaaaaaaaaaaaaaaaaaaaaagaaattattaaatttttttagagtggttgtataattttatatttttattagtaatgtggatttagtttttatatttttttaatagcgtttggtgtattattatttttattttagtattttgataggtatgtagtaatattcgattttggttttagtttgaatttttttggtggttaatgatgttgaatatttttttatgtgtttttttgtttttgtatattttgtttaatgaaatgtttatttatgttttttgtttattttttaattggatttttttaatttgttgagcgtttagagttttttaaatatttaaatttttaaatgaagagaaggtttttatttgatatgtggtttggaaatatttttttttattttagtttgttttttcgttttttttaaaaggttttttataggataaaggttttaaattttttttttgtagggtatagtggtttacgtttataattttagtattttgtgaggttaaggtgggcggattatttgaggttaggagtttgagattagtttggttaatatggtgaaatttcgtttttattaaaaatataaaaattagtcgggcgtggtggtgtacgtttgtagttttagttattcgggaggttgaggtaggagaattatttgaacgtgggaggtagaggttgtagtgagttgagattcgttaaggtattttagtttgggtgatagagtaagattgtattttaataaataaataaataaataaataaataaaggtcgagtacggtggtttatgtttgtaatttttgtattttggtaggtcgaggtagatggaatatttgaggttaggagttcgatattagtttggttagtatagtgaaaattcgtttttattaaaaatataaaaattagggttaggcgcggtggtttatgtttgtaattttagtattttgggaggttgaggcgggcggattacgaggttaagagtttgagattaatttggttaatatggtgaaatttcgttttttttaaaaatataaaaagtagtcgggtgtggtggtgggtatttgtaattttagttgttcgggaggttggggtaggagattcgtttgaattcgggaggcggaggttgtagtgagtcgagatcgtattattgtattttattttgggcgatttggtaaggtttcgttttaaaaaaaaaaaaaaaaaaagaaaaagaaaatatcgggcgtggtggtagacgtttgtagttttagttacgcgggaagttgagttacgagaatcgtttgaattcggatggcggagtttgtaatgaatcgatatcgtgtaattgcgtttcggtttgggcgttaaagcgatattcggttttaaaaagaaaaaaaagaaaataggagaataatgaaattttatttatttattttatttattttttatttttttgagatcgagtttcgttttgttatttaggttggagtgttttggcgtaatttcggtttattgtaatttttgtttttcgggtttaagcgatttttttgttttagtttttcgagtagttgggattataggcgtttgtaattacgttcggtttatttttgtatgtttagtagagacggggttttattatgttgttcgggttggtttcgaatttttgagtttaagtgattttttcgtcgttgttttttagcgtgttgggattataggcgtgagttatcgcgttcggttaaaagttttaaattttagtaagttttaatttattaattttttttttgtatagattggttttttggtgtcgtttaaaaattatttgtttggttttaggttttgaggattttttttaattttttttttttttataagtgatttattgttttatatttaaatttatgatttattttgagtaaattttgtataaggtgagaggtttaggttgaggttttttgggtttatattcgtttaattgttttagtattatttgttgaaacggtttttgattttatttttgtatttttttttcgtttatttttttttagagtagtgggaatgtttttttgttagtgatgatgttatgttttgtgtaaaatttgtattagtattttataatataagatttggttttattttaacggtattttttattattcgatgtttatcgtaatatttggttttcgaagaattattgggttggtttttttattttatgtaggtttattttattattatttatttagagatttttttggttttttttttatagtatttataaaatgcgatttattatatattaatttgtttatttgttttttgtttttttatatttttattttttttagaagttttaagagagtatattgttttatttttagggtttagaataatgcgtttacgtagtaggtatttaaaattttttgtttgataggttagaaaaggtgaataaatataaagcgggagcgaaaagtttatttttaggttaggtattttttggattttacgtaacgtgtgagcgttatttttcgggaagttaatttgttcgcgaacgaaggaagtgagttagagaattcgggggtggagagaagaaagtaagtagttaatcggaaaggtttgaaaaagttagcgtcggaagttaaattgtagaaagttgttttttagaatgattgtttatttttaagaggaagcgtgggcgagcggtgttttgtaaaatgggtttttcggtagcggatttgcgtagaagcgtttcgtgcgtgtaagtgttgcgaattacgtgggtttcgggcgcgtttcgggtgttggcggttgtagtcggagtttaaatttaagtagttggaagggtaagaggtgttcgggattttgagaggaaaaagaaaggagtgtagtcgcgggagtgggttaggtgaggagttagtgaagagatgagtttagttttaagaggcggcgaggaggatcggatgggaggaggggtagggagcgtttgtggataagtgtagatcggtcggcgtacgttttacgttacgtggattcgtttttgtcggtggtcgtttttttcgttaggtcgcgacgatagggttgtgttttatttgtgtttgtcgagagtagtgtcgggtacggagttggcgttttgtaagtgtttgttgaataaatgacgggtgtgtgtgttatttatttagtaagtattgagtgtttattgttgtgttatcgggatcgatgtggagggatatttttagggtgtatttttggcgttttagttttgtttttttttggataatttatgtttgtttcgtattttatcgtgcgatttttcgtagtttttgggttttgtttttttttttttttttttttttggaagttgtagaatggtgataaatgattttttttgtttttattgattgttaggttttgtggttaggtattatagagtttttatataggattaagttagtttggtgtgtaggggaggtagatatataaatagaaaattggattatagtgttaagatgttgtaagaagaggttaattaaaggataggaagatggggttaagagatggtgttattgtttattttagggatcgttttttaaggcgaggggttttttattttaagttgtgatatagggtaggttatgagcgtagttttttgtaaaatgagggatttggacggaatagttattttttaggtttttttttagtatgatgtttcgtattagatatttttaatgtttgtagtttttttatattttatcgtttattggttagttaaaatattttttgtattgtaaagtgtagtataatattataagaatggattaatgggttgggaatgttgggttttggtttttattttggtgttgtggttttgtttttttatttgtaaaatgaagggggttgtaaagatatattttttaaaatttttaatgttatggttgtggtattaagttaaattattattttttattgttttgtatcggatattatttttatattagtaaaattttttattagtgtagttttttttaagtttgattattgagaaagatagtgttttgtttttaatattttgtattttagttttatcgtagtgtttggtatatagtagatgtttaaaagaagtttattaaattaaatggtggttaggtttatggggtttacgtttttaattttagtattttgggaggttgaggtgggtagattatttgaggttaggagttggagattagtttggttaatatggtgaaattttatttttagtaaaaaaaaatatagaaattagttgggtgtggtggtacgtatttgtagttttagttatttaggaggttgaggtaggagaattgtttgtttgggaagtggaggttgtagtgagttaaggtcgtattattgtattttattttgggcgaaagagtaagattttatattaaaaaaaaaaaaaaaaattaaatggggttgggtgtggtggtttatggttataattttagtattttggtaggttgaggtgggtagattatttgaggataagagttcgagattagcgtgggtaatatagcgaaattttatttttaaaaaaattttataaaaattaaaataaatgaaaataaaataaattaaatgggatagaaattatagtttttgtttttggatttttttttatattgatatattagtttatagattaggggattggggaggaattgggtttttattagagggagatttggagttgatttgatagatttaaattagttttatgggataattcgtttgagacggatgacgttgtaggtaagtgatttattgttgttttatttttttatttgtttatttttaga

SEQ ID NO: 1326 - DNA, 7069 bp, Artificial Sequence
  chemically treated genomic DNA (Homo sapiens)
tttggggataggtaggtagaggaatgaaatagtagtgaattatttgtttatagcgttattcgttttaagcggattattttataaagttggtttaaatttgttaggttagttttaggtttttttttggtaaaaatttaatttttttttagttttttgatttatgaattaatatgttaatgtgggaaaggatttaaaagtaaggattataatttttattttatttgatttattttatttttatttgttttggtttttgtggggtttttttagagatggggtttcgttatgttgtttacgttggtttcgaatttttgtttttaagtgatttgtttattttagtttattaaagtgttgggattatggttatgagttattatatttagttttatttgatttttttttttttttttggtatggagttttgttttttcgtttaggatggagtgtagtggtgcgattttggtttattgtaatttttattttttaggtaagtaatttttttattttaattttttaaatagttgggattataggtgcgtgttattatatttagttaatttttgtatttttttttattagagatggggttttattatgttggttaggttggtttttaatttttgattttaagtaatttgtttattttagttttttaaagtgttgggattaaaggcgtgagttttatgagtttggttattatttgatttaataagttttttttaaatatttattgtgtattaaatattgcggtggaattaggatataggatgttaaaaataaggtattattttttttaataattaagtttgggagaaattatattgatgaaaagttttattaatgtgaaagtgatgttcggtataaagtagtaagaaataatagtttgatttaatgttatagttatagtattaggggttttagagaatatatttttataattttttttattttataaatgaggaaataggattatagtattagaatgaaggttaaaatttagtatttttaatttattaatttatttttgtaatgttatgttatattttataatgtaaagaatattttgattagttaataaacggtggggtgtgggagaattatagatattaggaatatttgatacgggatattatattgaaaggaagtttagagagtaattatttcgtttagattttttattttatagaagattgcgtttatgatttattttgtattatagtttgagataggaggtttttcgttttgaaagacgatttttaaagtagatagtagtattattttttggttttatttttttgttttttagttaatttttttttatagtattttagtattgtagtttaattttttgtttgtgtgtttgttttttttgtatattaggttgatttagttttgtgtagagattttatggtatttagttatagggtttagtagttaataggagtaaagaaaattatttattattattttgtaatttttaaaaaaaaaaaaagagagagagataaagtttaaagattgcggagaatcgtacgatggggtgcggggtaagtataaattgtttaggagaaaataggattaaagcgttagaaatatattttaaaaatgtttttttatatcggtttcggtgatataatagtaagtatttagtgtttgttgaatgaatgatatatatattcgttatttatttagtaagtatttatagagcgttaatttcgtgttcggtattgttttcgatagatataaataaggtatagttttgtcgtcgcggtttgacgagaaaggcggttatcgataaaggcgagtttacgtggcgtgggacgtgcgtcgatcggtttgtatttgtttataggcgttttttgtttttttttttattcgatttttttcgtcgttttttagagttgaatttatttttttattaattttttatttaatttattttcgcgattatatttttttttttttttttttaggatttcgaatattttttatttttttagttgtttaggtttgaatttcggttgtagtcgttagtattcgaaacgcgttcgggatttacgtggttcgtagtatttgtacgtacggaacgtttttgcgtagattcgttgtcggagagtttattttgtagaatatcgttcgtttacgtttttttttgggagtaggtagttattttagggaataattttttgtagtttaattttcggcgttagtttttttagattttttcggttagttgtttgtttttttttttttattttcgggttttttgatttatttttttcgttcgcgagtaaattggtttttcgagaggtggcgtttatacgttgcgtgaagtttaaagagtgtttgatttagaagtagatttttcgttttcgttttgtgtttatttattttttttagtttgttaagtaaaaaattttgagtatttattacgtggacgtattattttaggttttagggataaaatagtatgtttttttggagtttttgggagggatgggagtataggaaaataagaagtaaataagtaaattaatatgtaatagatcgtattttgtaagtgttgtgaagaaaaggttagagaaatttttgagtaagtgataatagaatagatttgtatgaagtgagggagttagtttagtgatttttcgagagttaagtattacggtggatatcgagtggtggaaaatgtcgttagaatagagttaaattttatgttgtgagatgttaatatagattttgtataaggtatgatattattattaataaaaaaatatttttattgttttaaggggaaatgaacgggggaaaggtataaaaatggaattaggagtcgttttaataaatgatgttggagtaattggacgaatatagatttaaagaattttaatttaaattttttattttatataaaatttatttaaaatgaattatagatttaaatgtaaaataataaattatttatggggaaaaaaaaagttaaaaaaaatttttaggatttagggttaggtaaatagtttttagacgatattaaaagattaatttatatagggaaaaagttgataaattggaatttattgaaatttaaaatttttggtcgagcgcggtggtttacgtttgtaattttagtacgttggaaagtagcggcgggaggattatttgagtttaggaattcgagattagttcgggtaatatagtgaaatttcgtttttattaaatatataaaaatgagtcgggcgtggttgtaggcgtttgtagttttagttattcgggaggttgaggtaggagaatcgtttgaattcgggaggtagaggttgtagtgagtcgagattgcgttagggtattttagtttgggtgatagagcgagattcggttttaaaaaaataaaaaataaataaaataaataagtaaaattttattatttttttgtttttttttttttttttttgagatcgagtatcgttttggcgtttaggtcggagcgtagttgtacgatgtcggtttattgtaaatttcgttattcgggtttaagcgattttcgtgatttagtttttcgcgtagttgggattataggcgtttgttattacgttcggtattttttttttttttttttttttttttttttgagacggagttttgttaggtcgtttagggtggagtgtagtggtgcgatttcggtttattgtaattttcgtttttcgggtttaagcgaattttttgttttagtttttcgagtagttgggattataggtgtttattattatattcggttattttttgtatttttaggagagacggggttttattatgttggttaggttggttttaaatttttgatttcgtgattcgttcgttttagttttttaaagtgttgagattataggtatgagttatcgcgtttggttttaatttttgtatttttagtagagacgggtttttattatgttggttaggttggtatcgaatttttgattttaagtgttttatttgtttcggtttattaaagtgtagggattataggtatgagttatcgtgttcggtttttatttatttatttgtttatttatttattgagatgtagttttgttttgttatttaggttggagtgttttggcggattttagtttattgtaatttttgttttttacgtttaagtgatttttttgttttagtttttcgagtagttgggattataggcgtgtattattacgttcggttaatttttgtatttttagtagagacggggttttattatgttggttaggttggttttaaatttttgattttaggtgattcgtttattttggttttatagagtgttgggattataggcgtgagttattgtgttttgtagaaaagaaatttaaaatttttgttttgtgaaagattttttgaagaggacgaaaaaataagttagagtggaaggaaatatttttaaattatatattagataaaggttttttttttatttgaaggtttgaatatttgaagaattttgaacgtttaataggttaaaaaaatttaattagaaaatgggtaaaagatatgaatagatattttattgaataggatatatagaggtaagaaagtatatgaaaagatgtttaatattattagttattagggaaatttaaattaaaattaaaatcggatattattatatgtttattagaatgttaaaatgaaagtagtgatatattaaacgttattaaggaggtatagaaattggatttatattattggtaggaatataaaattgtatagttattttgaaaaagtttgatagtttttttttttttttttttttttttttttgagacggagtttcgttttgtcgtttaggttggagtgtagtggcgcgatttcgatttattgtaagtttcgtttttcgggtttacgttatttttttgttttagtttttcgtgtagttgggattataggggcgcgttattatgttcggttaatttttgtatttttagtagagacggggttttatcgtgttagttaggatggtttcgattttttgatttcgtgattcgttcgtttcggttttttaaagtgttgggattataggcgtgagttatcgcgttcggtcgatagttttttaaaaaattaaatatgtgtttattatatgatttagttattgtattgttgggcgtttatttaataggaatgaaaatttatgttttgtttatataaaaatttgtgcgtaaatgtttattgtagttttatttgtaataattaaaaattggaaataatttaaatgttttttattatgtgaatggttaaataaattatgttatatttatattgtggaatgttatttaataatagaaaaaaataataaattattaatatatgtaatatatataatttttttggatagattttaagggaattatgttgattgaagaaaagttaaatataaaaagttatttattgtattattgtatttaatatttgtgaaatattaataataaaagtatagatatagaggatagattagtttagtggttgttaggaattagagatgagggaaagggttaggtatggtggtttttatttgtaattttattattttgggaggttgaggtaagaggattttttgaagttaggagtttaagattagtttatatagtataataagatattgttagaggttttcgaattagagtaattttattttaaataggggttgggtaaaaagaggtttagatttattgggttgtatttttaggaggttagttatttttagttataggatgagatagaagatcgatataagggttgggtacggtggtttatgtttgtaattttagtattttgggaggttgaggtgggtggattatttgagattaggagttcgagattagtttggttaacgtggtgaaattttgtttttattaaaaatataaaaattagttcggcgtggtggcgcgcgtttgtagttttaggtatttgggaggttgaggtagaattgtttgaatttagaaggtagaggttgtagcgagttgagatcgtattattgtattttagtttgagtaatagaataaattttcgttttaaaaaaaaaaaaaaagattaatatgagatatagattataaagattttggtgattaaatagtggtaaagaagtcggttaaattttattaaaattaagatggtaataaaagtgatttttggttatttttattgtttattatatgttaattataatggatttatatgttaaaagatatttttattagtattatgatagtttatagatgttatggaaataattagaagttattttatatggtttataaaggggaggagtatttaattgggggagaggggaaattgtttattttttttttagaaaatttataaataatttatttttgtttagtatataattaagaaataatttttttgtttgtagagtagatatttttttatttttttatttttttttttttttttttttttagacggagtttttttttgttgttaggttggagtgtagtggcgggatttcggtttattgtaatttttattttttaggtttaagtagttttttgttttagtttttcgagtagttggtattataggtattcgttattacgtttagttaatttttgtgtttttagtagagatggggttttattatattagttaggatggtttcgatgttttgatttcgtgatttatttattttagttttttaaagtgttgggattataggtatgaggtatggtattcggtttagttttttatttttttaataaatttgtttttattttatggatttattttgaatttttttttttttgttttaaattattttttgtacgaggttaaagaatttttttttgggatttggattaggatttttttttggtaataatattgttattttaaaaagagaaagaaaatgtttttaattagttgggtatggtggtatatgtttgtaggttaagttgtttagaggaggttgaagcgtgaggattagttgagtttaggatttcgaggttgtagtgagttatgatcgtattatcgtattttagtttgggtgatagaataagattcg

SEQ ID NO: 1327 - DNA, 11473 bp, Artificial Sequence
  chemically treated genomic DNA (Homo sapiens)
tttttgtatagttttttatatattgtaaataatttttagattatatatagtatttaatataatgtaaatgttatataaatagttgttatattgtatttttatttgtatttttttattgttgtattgtttttttttttaaatatattttattggaggttggttgaattagtagatatggaatatataaatataggaggataattatatttaaatttagattaatgtaagcggtgagaaaatattttattttcgtttaagtaggttttattagaggggaaattagatttatttaaagattgttttgattaatttatatatagtttagtgatggatagagtgttagtatttgttatatgtgttattattttatgttagaggtgttaatagattatgtaatttttttgaggaattataatataataattgataataatattgattatataaatatagatttttttgatataggattgttatagatttttaatttgtaaaaaaaaaaaaaatgtaatatttgtggaagtattataaagagaagtagaataaggtagatatgtttgtataagattaagggagaattttaaaagttgtaagagatgtataagggatttttaataaatttatatatttgtggttagtgaatttttgataagagtgttaagtttatttaatgatgaaataatagtttttttaatatatgttgtgagagaaatggatttttatatgtaagattaaagttgggttttattttatattatatgtgaaaaataatttataatttaaatataagaattaaagttatatagaggaaaacgtaagagtaaatttttatgattttgtgttttgggtttttagataagatattaaaagtttaggaagaaataataaaaaataggtaaattggagtttataaaaaatgtgaaatttttatattaaaggatatttttaagaaagtgaaagataatttatagaatgggagaaaatatttgtaaattttatgtttgataatatttagaatatgtaaagaatatttataattcggtcgggtgcggtggtttacgtttgtaattttagtattttgggaggtcgacgtgggcggattatttaaggtcgggagtttgagattaggttgattaatatggagaaattttgtttttattaaaaatataaaattagttaggcgtggtggcgtattttcgtaattttagttattcgggaggttgaggtataagaattatttgaatttaggaggcggaggttgcggtgagtcgagatttcgttattgtattttagtttgggtaataagagtaaaatttcgttttaaaaaataaataaaaaatttataatttaataataaatagataaataatttaattaaatggttaataaaggatttgaatagatatttttttaaggaaggtatataaatggttagtaagtatatgaaaagatgtttaaagttattagtttttagggaaatgtaaattaaaattataatgagatattatttcgtatttgttaggatggttataatttagagggaaaaaaaagaaatataataaatgtgcgtgagaatgtagagaagttggaatttgtgtatattgttggtgaaaatgtgaaatggtgtagacgttgtggaaaatagtttggttgttttttagaaagttaaatatagaatgattatagaattgtaatatcgataattttattttaaggtgtataattaaaattattgaatatagggattgaaatagatatttgtatattaataattattgtaatattatttataatagttaaataatagatgagtggataaataatgtttggtattttttttttttttttttttttttttttttttttttttttttttttttttttttttttttttttttttttttttttttttttttttttttttttttttttttgttagttttgtttttgttgtttaggtttgagtgtaatgatataattttagtttatcgttatttttgttttttgggtttaagtgatttttttgttttagtttttcgagtagttgggattataggtgtatattattatgtttagttaatttttgtgtttttagtagagatggggtttttttacgttggttaggcggtatatatatttttttattattcggttataaaaaggaatgaagttttgatgtatattataatatggatgaaatttagtaataaggtttttgaggaaaaaaagtttagtgaaaaggttatattttgtaggattttatttatatgaaatatatgtaatagataaatttatggagatagaaagtagattagaggttattaggagtggaaggaggggagaatggggatttattatttaatgagtgtagtgtttttatttgtttttgtttttgtttgagatagggtttcgttttgttatttaggttggagtgtagtgttacgattttagtttattgtagttttcgttttttgggtttaagtaatttttttgttttagtttttgagtagttgggattataggtgtatattatttggtaaatttttgtagagatggggtttcgttatgttggttaggttggttttaaatttttgattttaggtgatttgtatgtttttgttttttaaagtgttgggattataggcgtgatttatggtttttgatttaagtgtttttatttgggatgatgaaaacgttttgaaaataaatagttgtaatggttgtatagtattttaaaggtaatttatgttattgaattgtatatttaaaatggtgaaaatagaaaattttatgttatatagattttgttatttaaaaaataaaataaaaaatttaaaatttttatgttattatgaagaagtagttttttaaaggaatagggatgttggtagtagaagggaaagaaattttattaaataaaaataaaagtaatgatttttttaggaggtggtttagttagtttagttttattttagtattatgatggtttattttatttagaaatagaaatatggggcgttggggagaagaggagatgtgtatttgttttatttgtttttttgtttagaatgtcgatttcgatttttgttttttattaaggttggggattaaatgaaaagtgagaatttggaaatttttagagatgatgtttgtcgttggagttgattttattttattttagtagtatgattttttttttaaatttaggatgtaattatggttaattttattagtgtgtagtaattgtttagttttaatattagattagtaggaagttttgttattttttttttgaggatgggtttttattgaattgttttggaatttattattatttaggttataaaagatttagggaattaggttagtttagtttttaattttaagtagggagtaatttgtttagtttacgttgtgatagtttttcgttgttataaggtggtgatgttgtattatatacgcgtatgatgggcgcgtaggcgttaatgtttttaggatttgttgttttatttttaaatgaaagttgtttttaggatttggatttataagataaggtagtttattttttgttggggagtttaggggtaagagggtatttcggagggagggtatatttttatttttgaagataaggagaatattattagtatatagattaattttagtagtgtattttaggatggggagggttattgtgagttatagtaaaatgaacgaatgaatgaattaataaatgtttgagagggaaagttttaacgatttttaggaggtataattaagagttgtagttattttcgttaggaacgttttaaatataggggaaattttttttttttttgttttattgttggagtggggttatttcgggatattagaaattaaggaattgagtttggagaagggatttggggaggttatagtggtaggtgattgttaaatgaggtggtagaagttagtaagcgttggaaaaagtcggtttaaattgtttattagtatcgttttttataattttttatcggttttggttttaagatttttcgttttttaggtatttttttggttttaaattatttttttttaaacgaattttttttgtgaagttattcggtttttttcgatagtggtattttataaaggataatttagtattttaatagcgtgttgcgtttcgcgggacgtagattttttttataggtatttttcgggttgcgtttttatagttatatttattcgtttttttattttttgggtattgttaatgagttttgtattttttttttttggtttttggataaatgaattattcgtgcgtgatttttgcgagggtattttgtataatattagtatattagcggcgtcgtcggtgagtgatttttgggattggttttttttattagcgtaatttttcgggagattcgagtaagttgatgagtgtattagtggtttattttttttgttgtattacggatttttattttgtaatcgggatattagttagagatggggagcgggaggcgtagggtaggggcgtttttttttttagtatagttttttcgcgttggatttttattaatttagtttttatttgtttggaagttagtagggttttttttagttttagatcgtcgggcgaggttttagatggattttaggggcggggagtgggcggagtttaggggtcgaggcgaggtgtgggtggggcgggacgtcgttgtggaggcggggtttgggcgcggacgggcgcggagcgaggtatcgtatcgtcggggcggggagtgggcggggttcgggggcggggcggggtgtgggcggggtttacggtcggggcgggtgagtgggcggggttttcggcgtggtaggcgcgttgcgtaaagaggtttgtagtttcgcggcgcggggtaggtttcgggttgtttaggttggtatcggttcgtggttttcgggggcgtagtcgtagcgttttcgttttttaggcgttagcgagtgcgcggtttagtgcggtcggaatttggcgtaatttttagagcggtttttggggagacgcgggttttagttttgcggtttttattggggagtgcgttggtcggaaggtgagtgattttttgtcggggatcgggggatttgggaaggatagttttcggattggacggttagaacgtttttagggattttagttggtcggttatatggttttgtgggtcgtcgcgttcgggttagggattattttgtatataggatcgtgtttggtttttacggaacgcgtttatacgtagggtttcggtgtcgaatcgtttggtggaatttgtttttaattttatggagcgggtgttggtattatagttatattataagtaggaattagcgggtttaaggttagtttgtaaagggggtatcggggtttaggttcgtgcgttgtttagcgttgttttgaaggcgcggttgaattattggtttgcgttgtttttgttaaggatattgtggtattgtggaaaaaatgaaaaattagtttttttaatttataatttttttgggaaaaaaaaaaattagttttttttttttttttcgagacggagttttattttgtcgtttaggttggagtgtagtggtacgatttcggtttattgtaattttcgtttttcgggtttaagtaatttttttgttttagtttttcgagtatttgggattataggggcgtgttattacgtttggttaattttttgtatgtttagtagagacgggttttatgttggttaggttggttttaaatttttgatttcgtgattcgttcgtttgggttttttaaagtgttgggattgtaggcgtgagttattgttttcggttttttttttttttttttttttttttttagaagagttttattttgttgtttaggttggagtgtagtggggtaattttagtttattgtaatttttgttttttaggtttaagcgattttttttttttagttttttgagtagttgggattataggcgtttgttattatgttcggttaatttttgtatttttagtataggtgggagttttattatattggttaggttggttttgaatttattttttttttttttttttttttttttttttttttttgagatggagttttatttttattgtttaagttggagtgtaatggtataattttagtttattgtaatttttgtttttcgggtttaagttatttttttgttttagtttttcgagtagttgggattataggtgcgtgttattatatttagttaatttttggtatttttagtagaaatggagttttattatattagttaggttggttttaaatttttgattttaggtgattcgtttgtttcggttttttagagtgttgggattaatgaattattgcgttcggttaaaaattagtttttttaatttttaatttttgaaaaaataaattagtttaatttttaattttcgaagattatagttaaagaaatatatgaaaaggaataagtattaaataatatatatttttagttgtgttgtttatagttttgggaaaaaaatggaaataatttaaggttttagaaataggaaaatgggtataaaagggtatgtaggtaatggtttagttgtcgtatgaatatatattgaatatattgtgagatgttgtttgttagaatgtttagtacggggattgtttatatggaaagaggtataggaaaaaaagtgaaaatattataaaataattttttaaaattaaataatgtatacgttaaaaatattagagtttatttgatttggtatatatagtttaataattatatggttttttttttttgtaggtttgggtaggtgtatagtttttaaaaagggagagaattgttattgttgtggatggggtgttaagggaagtgtttggggttaagtgaatagtgatataattgtaagttaagagtttgtgttggagtttttttttattattttaaatagtatagaaaatagagttgagttatttaaatagagttgagttagttatttagtttttggattttagatttttatttttaatcgttagggggatggagatagaagttataaatttatatgttattagttatatgatgtaaatatgtaaattgggttaaggaatataaaagggagtggtgagttggggatattgaagaatggatgttttgtttagaggagtgaaaatgaagtattttatataaataatatgatttcgggtaattattttgggaattaggataaggtgtttttttagtttgtagaaatattggtaatatttataaaggtaaattattttatattattttatttttttttttttttttgagatagagttttgttttgttgtttaggttggagtgtaatggtataattttgatttattgtaatttttattttttaggtttaagtgatttttttgttttagttttttaagtagttgggattataggtatatgttattatattcggataatttttgtattttttagtagagatggtgttttgttatattgattaggttggttttaaatttttgattttaggtgatttttttatttcggttttttaaaatgttgggattataggtgtgagttattataattggcgattattttatattattttttagtttaagaggttttaagggttttttgttaggtttagaataaaatttttatttttattttaggaggggttaggttagattttttttatttttttgattgtatttattattatttattttttttttttttgaattatagtttagttaaataggttttttttttttttttttattttttttttttttttgaaatagagtttaattttgttatttagtttggagtggagtaattttttaattttagttttttgagtagttgggattataggtatgtattattatatttggttaatttttaaaaatttttggtagagatgggattttattatgttgttcgggttggttttaaatttttaggtttaagtgattttttgttttagttttttaaagtgttgggttttttgtttttttgggttttgttaggtttttttatgtattgtgatagttaaagtttgttttttataaagttatttttaggtagtgattgtttattagggtattgtagagttttttagttaatgatgaagttatttattttttttttttttttttttaagataatttttttttagattcgttattttggtttattttgtaagttatagttttattttttattgttaagtgtgggtgttattgttggtttagggagtatggattttgtaaatttgttttatcgggaggttttgaggagtgatttttaggaattagataagtaatttgttttttataattattgtttttttaagaatatttaggattttagttttagtgttaagataattatgtttttttttgatatatgttcgttgttgagaattttaggaaaagtagagggttgtgtaggcgtttttgtttttaggttaggagagttggtaaatgtttggagatttaaaggttttatttttagggcggttaatttttttgttttagtgatatatagattattttttattgtgatttatagtgtaatttatcggtttaaataatattatttgtatttataaatttttttttttttttttttttttattgtttagttttaggtttatttttgtaagtgttgttggtgttagaataggaatttttttgcgttttgaagggatgaatgtgattttttttatatttttcggtgttgtgatgtattttaaatatagtaaggtatttggatataaagtttgtgtttggagtatttttagatagatagtgtatggttttcgttatagatttagtgttattgtagatgtttttgtatggaaaatatataaatataaatatttgtagttgttaatttattattattttgtagttttaagagagtttcgggaatttaggtttttttggtatttttgttttttgtttttggtgtatagtttttatttttaggacgataagaaggttgattgagttttaatattattttatagtttagttgggaagagagttagcgataaagttagagggagttagtttttatattttttagttttagttgagttcgttttttgagggtattttttggaagtttcgtttgtgatttttgttgatattttattggttattttaattgtaaggtagtttaggaaatgtagtgtttatttgtatacgtggatttttggaattaatttagggtttgtttttggggaattagagtggggatatttagttattaaagatgtaggtttttagttgtttagtgaagttaagcgaatggggaaggatttgaagttatttttgggtgtttggagtgattagagttgtttgtttttttggggagtgatagtgttttattttgttaagttttatgtttgtttttaatttagttttagttataatgatgtagtttttttttttttttatttatagggtatttggtttgggtggagtttattttttagtatttattttattttttgtagtattttgtagattttagttttgtgtttgtgtttttggatagttggagataaggagtgggttttggaagatgtttatttaggttttgtttaagattttagttttggtggggataagtattatttttgtgtgtttttgtgttttttgttttgttgtaaagatatattgataggtttacgttgtcgtttggatataatatgcgcgatgcgtgtttttatattaagttttagttatattttttgtattgtttttttattttatttttttttattgtggtatagaatattttatataaaattgattattttaattattttttttgtttgtttgttttttgtgtttttggatagagtttcgttttgttttagtttttcgagtagttgggattataggtgtatattattacgttcggttaatttttgtatttttagtagagacggagtttcgttatgttggttaggttggtttcggatttttgattttaggtaatttatttgttttagttttttaaagtgttgggattataggtgtgagttacggtgtttgattttattttagttatttttaagggtagaattttttggttgtttttatttatgtattgatagatatttgggttgtttttatgttttagttgttgtggaaaatgttgttttgaatatgggtgggtaagtggtttttaagattttgtttttagttttttgggtttagagtaacgaatggaattgttgagttatatgttaatttttatttttttaattgtaatttttgggggtatagtatttttttagtagcggtagtattcgatttttttttagcggtgtacggggttttaattttttcgtatttttatttacgtgtgttttgttttttggtagtagtagttattttaatgcgtgtgatatgggattttattgtggttttgatttgtatttttttaatgattagtgatgttaagtatttttttatggtttattgattatttatatatttttggagaaaagtttatataagttttttgtttatttttgtattgagttgtttgttttgttgttgttaagttttatttgagttgtttttttatggtagggagagtgggtttgttggagtttttttgtattttttagaaggaagttagaattttagagatggttaggagggggtgaggttaaaggtttttttggggagaatttacgtttttttagagttttattgtgtgttagttatcgtatatagtaattgttttttttttatttttttgggttatgttgtgattttgttgatgaggaggttgaggtatagaggggtggagggatgtgttgtagggtttatagttataatgggtagagttggaaattgtattaagtttgtttgatgcgggggttttttttgtttttttggttttcgttgtatttttggagaatttttgagatttttggttagagtttgggtttaagttaatttttattatttttaagtgaggggaagggtcgataattgttagtgttggtttattagagtttggtattagtcgaggagtgtacgtatttattggtggtgtggcggtttattgattttttagttttttgttcgatttacggggaaaattggggaaggtaggaaggttaaggaggtttaatttttgttttttatcgtggtttattttttgggttttttgttgtatgattgtttggatggaaggtttagagtttttttaaaaaaggaaaaaagtatgggttttgatattttgcgtggtttgttttttgaggtttaaatttttagaagatttttggttttttttgagaggtttttttttgatgtgtttgcgtgtttgttaggaagtagtagtgatgtttagatgtggtatattcgattttatttatgtttttttttattttttttgggttcgttttgttttttaga

SEQ ID NO: 1328 - DNA, 11473 bp, Artificial Sequence
  chemically treated genomic DNA (Homo sapiens)
tttggaagataaaacgaatttagagggggtggggagaggtataggtgaggtcgaatgtattatatttaggtattattgttgttttttgatagatacgtaaatatattagagaaagattttttaagagaggttaggaattttttggagatttaggttttagaggataagttacgtaggatgttaaaatttatatttttttttttttttgagaggattttgaattttttatttagatagttatatagtaaaggatttaggaaatgagttacggtaggaagtaggagttgagtttttttggtttttttgttttttttagtttttttcgtagatcgagtagaaggttgggggattagtgaatcgttatattattaatgggtgcgtgtatttttcggttggtgttagattttggtgggttagtattggtagttgtcggtttttttttttatttgaaaataatgggagttggtttagatttaggttttaattagaagttttagagattttttagggatgtagcggaggttagaggagtagaggagattttcgtattagatagatttggtgtaatttttagttttgtttattgtagttgtgggttttgtagtatatttttttatttttttgtgttttaatttttttattaataaagttatagtatggtttagaagagtgagagagagatagttgttatgtgcggtggttggtatataatggggttttggaaaaacgtgagttttttttaggggagtttttggttttatttttttttggttatttttgaaattttggtttttttttgggagatataaggagattttaataaatttattttttttattataaaaaaatagtttagataaaatttaataataataaagtaaataatttaatgtaaaaatgggtagaaggtttgtgtaggtttttttttaaagatgtatgaatggttagtaagttatgaaaagatgtttagtattattaattattagggaaatgtaaattaaaattataatgagattttatattatacgtattagaatggttattattattaaaaaataaaatatacgtaggtgaggatgcggagaagttggaatttcgtgtatcgttggggaaaggtcgagtgttgtcgttgttggagaggtgttgtgtttttaaaaattataattagaaaaatgagaattaatatatgatttagtaattttattcgttattttgaatttaaaaaattgaaagtagggttttgaaaattatttgtttatttatgtttaaagtagtattttttataatagttaaaatatggaagtaatttaagtgtttattagtatatgaatgaaaatagttagaaaattttatttttaaaagtggttaaaatgaggttaggtatcgtggtttatatttgtaattttagtattttgggaggttgaggtaggtggattatttgaggttaggagttcgagattagtttggttaatatggcgaaatttcgtttttattaaaaatataaaaattagtcgggcgtggtggtgtgtatttgtaattttagttattcgggaggttgagatagagcgagattttgtttaaaaatataaaaaataaataaataaaaaaagtggttaaaatggttaattttatgtgagatgttttgtattatagtaggaaaaaatgggataaaaaaataatgtagagagtgtgattagggtttagtgtgaagatacgtatcgcgtatgttgtgtttaaacgataacgtgaatttattagtgtgtttttatagtaaaataaaaagtatagagatatataaaagtggtgtttatttttattaggattggaattttgagtagggtttgaatgagtattttttagggtttattttttatttttagttgtttaggagtataggtatagggttggggtttgtagaatattgtaagaagtgaggtgggtgttgaggagtgggttttatttaggttaggtgttttgtggatggaaaggaaaagaggttatattattgtggttgaagttgagttgggggtaggtatgggatttaatagagtggggtattgttattttttaagagggtagatagttttgattattttaaatatttaaaggtgattttaaatttttttttattcgtttgattttattggatagttgggaatttgtatttttagtgattgaatatttttattttggttttttaaggatagattttgaattgattttaggaatttacgtgtataggtaagtattatattttttaggttgttttgtagttgagatggttagtgaggtgttagtagaagttataggcggggtttttaagaaatatttttaagaagcgaatttagttggggttgggaggtgtgggagttagttttttttggttttgtcgttggttttttttttagttggattgtgggatgatgttagggtttagttagtttttttgtcgttttggggatggaggttatgtattaagggtagggagtagaaatattaaaggaatttggattttcggggtttttttggggttgtaagatggtggtggattggtaattgtagatatttgtgtttatgtattttttatgtagaaatatttataatggtattgagtttgtagcgagggttatgtattgtttgtttgaaagtgttttaggtataggttttgtgtttaagtattttgttgtgtttaaggtatattatagtatcggagaatgtgggagaggttatatttatttttttaaagcgtagggaggtttttattttgatattagtaatatttataagaatgaatttaaagttgggtagtgaggaaggaaaggaaaaagaaagtttatgaatataggtagtattgtttgaatcggtaagttgtattataaattataataaaagatagtttgtatattattaaaatagaagagttggtcgttttgaggatgaggtttttgggtttttaggtatttgttagtttttttagtttaggggtaggggcgtttgtatagttttttgttttttttaaaatttttagtagcgagtatgtgttagggagagatatggttgttttaatattgaggttgaaattttggatgtttttgggagggtagtgattgtgaagaataagttatttgtttagtttttgggggttattttttaaagtttttcgatgaggtaagtttataggatttatgttttttgagttagtagtgatatttatatttggtagtgagaagtggggttgtaatttatagggtgagttaaaatggcgggtttggaaagggattattttaaaggaaaaagagaggagagtgagtgattttattattagttgggaggttttatagtgttttggtggatagttattgtttggaggtgattttgtagaaagtaaattttggttattataatgtatagggaggtttggtaaagtttagggaagtagaaggtttagtattttgagaggttgaggtaggagattatttgagtttaggaatttgagattagttcgggtaatatagtgagattttatttttattaaagatttttaaaaattagttaggtgtggtggtgtatgtttgtaattttagttatttagggggttgagattagaggattgttttattttagattgggtgatagagttaggttttgttttaagaaaaaagagaaagtaaaagaaaaaaaagaaagtttgtttggttgaattgtggtttaaaaaaaaaaagagtggatggtggtagatgtagttagggaggtgggaggggtttgatttgattttttttagggtaggggtgaggattttattttaagtttgatagaaagtttttggagttttttaagttggagagtaatatggaatgatcgttagttgtggtggtttatatttgtaattttagtattttggggggtcgaggtggggggattatttgaggttaggagtttgaaattagtttggttaatgtggtaaaatattatttttattaaaaaatataaaaattattcgggtatggtggtatgtgtttgtagttttagttatttgggaggttgaggtaggagaattatttgaatttgggaggtggaggttgtagtgagttaagattgtgttattgtattttagtttgggtaatagagtaagattttgttttaaaaaagaaaaagaaaatagagtgatatgaaatgatttatttttgtaaatgttgttagtgtttttgtagattgggggaatattttattttgatttttaaagtgattgttcgaaattatgttgtttgtatgaaatgttttatttttatttttttagatagggtatttattttttagtgtttttagtttattatttttttttgtattttttggtttagtttatatgtttatattatatggttggtggtatgtgagtttgtgatttttgtttttatttttttagcggttaagaataagaatttgaggtttaagagttgagtgattaatttagttttatttgagtgatttagttttattttttatattatttgaaatagtggggaaagattttaatataggtttttgatttgtagttgtgttattgtttatttgattttaggtattttttttggtattttatttatagtagtgatagttttttttttttttagaaattatgtatttatttaggtttataggaaaaaagagttatgtggttattaaattgtatatattaggttaagtgggttttgatatttttgacgtgtatattatttaattttaagaagttattttataatgtttttatttttttttttgtgtttttttttatgtggatagttttcgtgttgggtattttaatagataatattttatagtgtatttagtgtgtatttatgcggtagttaaattattgtttgtatatttttttgtgtttatttttttatttttgggattttaggttatttttattttttttttaaaattataaatagtatagttagaagtatatattatttaatatttgtttttttttatgtatttttttggttgtgattttcggagattaaaggttaaattgatttatttttttagagattaaaggttaaagaagttgatttttggtcgggcgtagtggtttattaattttagtattttgggaggtcgaggtaggcggattatttgaggttaggagtttgagattagtttgattaatatggtgaaattttatttttattaaaaatattaaaaattagttgggtgtagtggtacgtatttgtaattttagttattcgggagattgaggtaggagaatagtttgaattcgggaggtagaggttgtagtgagttgagattgtgttattgtattttagtttgggtaataagagtgaaattttattttaaaaaaaaaaaaaaaagaaaaagaaaggaagaagaatgagtttaagattagtttggttaatatggtgaaatttttatttgtattaaaaatataaaaattagtcgggtatggtggtaggcgtttgtaattttagttatttaaggggttgaggggggagaatcgtttgaatttggaaggtaaaggttgtagtgagttgagattgttttattgtattttagtttgggtaatagagtgagatttttttaaaaaaaaaagaaaaaagaaaaagagggtcgggagtagtggtttacgtttgtaattttagtattttgggaggtttaggcgggcggattacgaggttaggagtttgagattagtttgattaatatgaaattcgtttttattaaatatataaaaaattagttaggcgtggtggtacgtttttataattttaggtattcgggaggttgaggtaggagaattgtttgaattcgggaggcggaggttgtagtgagtcgaaatcgtgttattgtattttagtttgggcgatagagtgagatttcgtttcggggaaaaaaaaaaaagttgattttttttttttttagagagattataggttagagaagttgattttttattttttttatagtgttataatgtttttgataaaggtagcgtaaattagtggtttagtcgcgtttttagggtagcgttgggtagcgtacgggtttaaatttcggtattttttttatagattgattttgggttcgttgatttttatttgtaatatgattatgatattagtattcgttttatagggttgagggtagattttattagacgattcgatatcgggattttgcgtgtgggcgcgtttcgtgagagttaagtacgattttatgtatagaatggtttttggttcgggcgcgacgatttatagggttatatggtcggttagttgaaatttttgagagcgttttggtcgtttagttcgggaattgttttttttaagtttttcggttttcgataggggattatttatttttcgattagcgtattttttagtaggagtcgtaggattgggattcgcgtttttttaaggatcgttttaggagttgcgttaggtttcggtcgtattggatcgcgtattcgttgacgtttggagggcgggagcgttgcgattgcgttttcggggattacggatcggtgttaatttaagtagttcggaatttgtttcgcgtcgcgggattgtaggtttttttacgtagcgcgtttattacgtcgagggtttcgtttatttattcgtttcggtcgtgagtttcgtttatatttcgtttcgttttcgagtttcgtttatttttcgtttcggcggtgcggtgtttcgtttcgcgttcgttcgcgtttaggtttcgtttttatagcggcgtttcgttttatttatatttcgtttcggtttttaagtttcgtttatttttcgtttttgaggtttatttggggtttcgttcggcgatttgggattggggaggattttgttgatttttaggtaggtggaaattggattgatagaaatttagcgcggggaggttgtgttgagaggagggacgtttttgttttgcgtttttcgttttttatttttggttggtatttcggttatagaatgagggttcgtggtgtaatagaaagaatgagttattgatatatttattagtttgttcggatttttcggggagttacgttggtgagagaaattagttttaaaggttatttatcgacggcgtcgttggtgtattggtattatgtaagatgttttcgtaaaggttacgtacggatggtttatttatttaaagattaaaggagagaaatgtaggatttattagtagtgtttaggagataggggggcgggtgggtgtggttataaaaacgtaattcggggggtgtttgtgaaggaaatttgcgtttcgcggaacgtaatacgttgttgggatattggattgttttttgtgagatgttattatcgggggaaatcggatggttttatagaaaaagttcgtttaaaggaaaatggtttaaggttaaggaaatatttagaaaacggaaagttttgaaattagagtcggtggggagttatggggggcggtgttggtgaatagtttgggtcgattttttttagcgtttgttggtttttgttattttatttggtagttatttgttattgtgatttttttaagttttttttttaaatttaattttttgatttttggtgtttcgggatggttttattttaataatagagtagaaggaaggaaggttttttttgtgtttagaacgtttttaacgaaaataattgtaatttttgattgtattttttgagggtcgttgggatttttttttttagatatttattggtttatttattcgtttattttgttgtaatttatagtggttttttttattttaaggtgtattgttgggattggtttatgtgttgatgatgttttttttgtttttagaggtgagaatgtgtttttttttcgagatgtttttttgtttttgagttttttagtagggaataggttgttttgttttgtgagtttagattttgggaataatttttatttaggaatggaatagtaggttttgggagtattggcgtttgcgcgtttattatgcgcgtgtgtgatgtaatattattattttgtggtagcgaggagttattataacgtggattgagtaagttgttttttgtttggggttgggagttggattggtttagttttttgggttttttgtaatttgaatggtggtagattttaggatagtttagtaggagtttatttttaaaaggaaaataatagaattttttgttaatttggtattggggttgagtaattattgtatattaatgagattgattataattgtattttgagtttgaggaggaggttatgttattaaaatgagataaaattagttttaacgataaatattatttttgggggtttttagatttttattttttatttaatttttagttttagtggaaagtaagagtcggagtcggtattttgggtagggaggtaggtgaggtaggtatatatttttttttttttttaacgttttatgtttttatttttgaataaaatgaattattatggtgttaaggtaaagttaaattagttgagttattttttgaagaggttattgtttttgtttttatttaatgagattttttttttttttgttattagtatttttatttttttggaaaattgtttttttataataatataaaggttttggattttttgttttgttttttgggtagtaaaatttgtataatatgaaattttttatttttattattttaagtgtataatttagtggtataaattatttttagagtgttgtgtaattattataattatttatttttaaaacgtttttattattttaaatagaaatatttgggttaggggttatagattacgtttgtaattttagtattttgggaggtagaggtatgtagattatttgaggttaaaagtttgagattagtttggttaatatggcgaaattttatttttataaaaatttgttaggtggtgtatatttgtaattttagttatttagaggttgaggtaggagaattgtttgaatttaggaggcggaggttgtagtgagttgagatcgtggtattgtattttagtttggatgatagagcgagattttgttttaaataaaaataaaaataaatagaaatattgtatttattggataataaatttttatttttttttttttttatttttggtagtttttaatttattttttgtttttatgaatttgtttattgtatgtattttatataagtggaattttataagatgtggtttttttattaagttttttttttttaaaaattttgttgttgagttttatttatgttgtagtatgtattagaattttatttttttttatggtcgaataatagaaaaatgtgtatatcgtttggttaacgtggggaaattttatttttattaaaaatataaaaattagttgggtatggtggtgtgtatttgtagttttagttattcgggaggttgaggtaggagaattatttgaatttaggaggtagaggtggcggtgagttgagattgtgttattgtatttaagtttgggtaataagagtaagattgatagaaagaaaagaaagaagaaagagagaaagaaaaagaaaggaaggaaggaaggaaggaaggaaggaaggaaggaaggaaggaaggaaggaaggaaggaagggtattaggtattgtttatttatttatttgttgtttgattattgtgaataatattgtaatgattattggtgtataagtatttgttttagtttttgtgtttaataattttggttatatattttggagtggaattgtcggtattataattttatggttattttatgtttagttttttgaggaatagttaaattgttttttatagcgtttatattattttatatttttattaataatgtatataggttttaatttttttatatttttacgtatatttgttatgttttttttttttttttttaaattatagttattttagtaagtgcgaagtggtattttattgtggttttgatttgtatttttttaaggattaatgattttgagtatttttttatgtgtttattggttatttgtatattttttttggagaaatgtttatttaagttttttgttgattatttaattgggttgtttgtttatttgttgttgagttgtaggttttttgtttgttttttgagacggagttttgtttttgttgtttaggttggagtgtaatggcgagatttcggtttatcgtaattttcgttttttgggtttaagtgatttttatgttttagtttttcgagtagttgggattacgggaatacgttattacgtttggttaattttatatttttagtagagatagggtttttttatgttggttagtttggttttaaattttcgattttaggtgattcgtttacgtcggttttttaaagtgttgggattataggcgtgagttatcgtattcggtcgagttgtaggtgttttttatatattttggatgttattagatataggatttataaatatttttttttattttgtaggttgttttttatttttttgaaaatgttttttgatataaaagttttatattttttatgaattttaatttatttattttttgttgtttttttttgggtttttagtgttttatttaagaatttaaaatataagattatgaagatttatttttacgtttttttttatatggttttagtttttatatttaggttgtgaattattttttatatatggtgtgaagtggagtttaattttagttttgtatgtggaaatttattttttttatagtatatattaaagaaattattattttattattgaatggatttggtatttttgttaaaaatttattggttatagatgtatggatttattgaggattttttgtatattttttgtagtttttaagatttttttttagttttatataggtatatttgttttattttgtttttttttatagtatttttatagatgttgtattttttttttttttataaattgaaggtttgtggtaattttgtgttaaggaagtttatgtttatgtgattaatattattattaattattgtattgtgattttttagaaaggttatataatttattgatatttttagtatgggatagtgatatatataatagatattgatattttgtttattattgaattgtgtgtggattgattaaagtaatttttgagtgagtttagttttttttttggtaggatttatttagacggagataaaatatttttttatcgtttatattaatttagatttagatatagttgtttttttgtatttgtgtgttttatatttgttgatttaattaatttttaatggaatatatttgaaagaaaaagtaatataataataaaaaaatataaataaaaatatagtgtaataattatttatatagtatttatattgtattaggtattatatgtaatttagagattatttatagtatatgggaggttgtgtaaagg

SEQ ID NO: 1329 - DNA, 6577 bp, Artificial Sequence
  chemically treated genomic DNA (Homo sapiens)
tacgggatatgtatatatataaatagagagtaagagttacgtttttgtgttttttttacgttttatttttattatttgtgttatatttgtatgtatttatattgttatttgtttaaatattttattttaaattggttttttttaaattttaaatatatttttaaaataaaatttttattattttttgtgaggcggggtatatagtaggaatttcgttttttttttttatggttttgtatagagttggtattagatattgatatggaggggagaatatttaattttaggtaatttttagtttttattttgattttagttttttatttttttattgttatttttttttgtttttgggtgtatttatttgtagtaaaatgggtaagtatatagtgggcgtataagtggggtttagttaaggttttagatttgggttagtttttagttttgttatttataaattgagtgatattgagttggtcgtttaaattttttgtgtttcggtttttttattggtgaattggggatagtattataatagtatttgttatataacgttgttggaggattaattgagataataaatggaaagtttagggtttggttgtatttatggagtaagtattagagtaagtgtaagttgggattttagggttgtagttttgttattatttgattgtgtggttttggataagttatttggttttgtttagttttaatttttttatttataaaatggggttagtgattatttttattttataggattgttgtgtggattaaatgtttggtatgtttaagtgttttgtttagtaaacgttagttttgattaattgtttttgtagaaaagtttttaaagttgttaattttcgagggttaattggatttgaattatttttatagtttggtatagaaatagattaaattaatttagtggaaaattaattttaggataatgagtttaagatattttcgtgttgattgttgttagtatggtgtttaggatagtttgggaaggtagggaggagggtatttttttatagtagtttcggaatttttatcgttatttttcggggggtttatttgtttttcgtttgttttttaaggtgttttttgatttttttttagaagaatttatttgttgtatttattattagaagaggttaggaatgcggtttgttgggtgggtagggttaagaagaaggtagtcgtgtaggtttaggaagtcgtaggagatttgttaatttttaggagggggttagttttggattttgtagataggcgttttggggagggtattagaagtttattgtttgtttcggtttgaaggttgtttgttgtgtgattttggtgagttttttaatttttgtgtattattataattattattattatttttattttttttttttttttatttgtcggttaagagaggattgggatagtggttatggttatataatattgtgaatattttaaaaattattgtattttatattttaaaatagttaattggtaattttatgttatgtgaaatttattttaattaaaaattaaaaatatatatatgaatttaatgttataaagggagagagaggatcgggaatttaaaagtaggtgtttgtggtgggacggggatttgtttgaggaaggatattttagaaggtaagttttggtatttatttgttttttgttaaaagggaaattgttattttttgatttttagtaaggataataaatttttatttggttgattttttgtttaatggtttaaagtatttttttgtatttcgtttatttatttttatttttattattttttgttacgagaaaagttaggtttagagagaagtggtttttttaagattatatggtaggttagtagtgaagttgtgtttcgaatttgggattttttaggttaaaggaaattagaatatgttacgtttagatatgtcgatatggtattttgattatttttagttgaaggtatttgagaaagagtagttagagagagggttatttgaattgttttgttttgtttgtagtaagttataaatattttttggagaaagatgtttttttagtattaagatgagaagataatttttattagtttagagatggtattagagttatttataaatataaataaattttgttattttattttttagtttatttttatatgtttatttttttatagtttgttatttttggaagtttataattgtattcgttttgttattttttttttttttttttttttttttttttttttttttttttttttttttttttttttttttttttttttttttttttttttttttttttttttttttttttttttttttttttttttttttttttttgagataggttagggtgtagtggcgcgattatagttttttgtagtttttaatttttagatttaattgatttttttatttgatttttttgagtagttaggattatagtagttgggtatgttattatatttagttaatttatttttaatttttttgtagagattggattttattatgttgtttaggttggtttcgaatttttggttttaagtaatttgtttattttagttttttaaattgttgggattttaggtatgaattatcgtgtttagttattttgttattttttaaaatgtattgttttttatggtagatgttttataagttagagttttaagtcgtagtattgagttatttttattgaggttttttttgcgtggtgtgtattatagatattaataaatttgtttttttttttttattattaatttgttttttgttatagtgttttttttaataaataatttaagatgattgaggagaaattatattttttttttagttggttaattttaaatgtgtttttaagtttggtgtttggatttaaattttgttataggttaagaatgttatattaagtagacgttgtgttagaggggtatttgaggtgatatgtttgatagattatataattgaataattgtattttttgaaggaaaattaacgaagtgttttgaggttaagtagatgggatttttgaggattttatgaatagtaaatagtagtattttttttagaggtttttgggtgggggtattaaatgtgttaatatatgtgtttgttgtaggtatagttagaatatgtgaaagtagttatagggaatagagtgtagtaaatttttaattattttttaaaattttgttttggtgtttttttttttgtaaattttttttgaataaggtagaattagttatattagtattatattatttttttattattatagatattattttgtattataattatttatttatttttttaggttttgtattttttaaggttaggattttgattttttttttgagtgttgtttatttgaattgaatcggtatgaattattacgttcggttattttgttattttttaaaatgtattgtttttcgtggtagatgttttataagttagagttttaagtcgtagtattgagtcgtagtattgagttgaagtttgaagggaagatggttttgatatgttaaaatttattttagtttatttttattttttatttatttatttatatatttatttaataaagatttttgagttttgatatttatgttttttttgtggtttttagtttatttttgataaagttaatatattatgttgaatttaatttgggaaagataagaaggaaatgagtggatagtggtagtaaagtgttgggacggtgagattaagggtgattttttttttttttgttttttaatttttttttaatgtagttgttattttatttttatgatggaaaaatgtatatgtatgggaatattgtattttaggtattataaggaatgaaattataggtcgggtatggtggttaatttttgtaattttagtattttgagaggttgaagtgggtagattatttgagttttagagttcgagattagtatggataatatggtgaaatttagtttttattaaaaatataaaaatattagttgggtgtggtggtgtatgtttgtagttttagttatttaggaggttgaggtgggaggatcgtttgagtttgggaggtagaagttgtaatgagtagagatcgtgttatttcgttttagttttggtgatagaatgagattttattttaaaaataaataaataaataaaataaatgaaatgaaattataagaaattattatttttttatgtaagaagtgattatttttattataagggaaggaatttaattttatttgttattttattaaagtttatttagtgttaaaggatgaggtgttagtaagattaatattttagaggtttttttgtgttaatagttttttttttttttttttttaaaaattttaagtgattagtttagaggtttgtttggaataatggtattatttaatattattggttttttggaatttgggtattttttagtgtgttttatattgttaatatttttttagttttttggatttttgttataagttggaaaagtgagaggatggatagggattaattagagagttttttgttgaggaaaaaattttttagatgttgaaagtgaggttatgtggtttggttaaataaaatttggtttcgtggtgtttttattttagtagttattttgttgatgaattgttattttggatttgggattagaaagaggtgggttgggtgaagaggtattatatagagtgatgtaatagtaagattaggttatttataggttttggtagttatagttataaattagttaattgtatataagttggggatattttttttggaaattaaaaaaaaaaaaaaaaaaaagagatttttatgtaaaaataattttttggatggtatggggtgagtataaatattttttggttgttagtgtgtttataattttgtagcgagtcgaaaattgaggtttcggtcgtagagaatttagttttatttttgttttaaaatttttcggttatttttgatgaggggattgggtagttttagatagtttcgaagtttttaaggtataggtttttttttggtttgattgtttttatttcggggaggtagtgtagttagttgtaaggtgagttgtttttatttttggggaagcggttgttttgagagggttttgtttttttttttttgagaaggtttagaaaattgtgggaattttttgtttatagagagaaggtgttggaaagtttaggtaaaaaaatgtcgatatgaggtttggttatttgaatatggtattttggttagattttttttttgtaaatattagttgtggttgttatatgataaggaaaaattttttgaaaagtttaaaatgggagtttgtatttgttaagaattttttttaatagagattattttattagtttttataatatgtaatttttttataaattttggtaagatggatatattaaatttattttatggatgaataaatgagttttagttaaataatttgatttaggatatataattggtagagttaggattttaggatttgaatttaggtttatggggttataagtttttttttttttttttttttttttttttttttttttttgttttttttttttttttttttttttttttttttttttttttttttttttttttggaaatagttttgattgtttagttttaagtaatttttttgttttagtttttcgagtagttgggattataggtataagatattatgtttgtttggttaattttttaattttttgtagttaaggtttttttatgttgtttaggttgaattcgaatttttggatttaagcgatttttttgtttcggtttttcgaaatgttgggattataggcgtgagttattgtatttggtttaaaatttttatatggattatatttattatattgttttttaaagatagagtttttgtttttttgattttttttttgtttgttttaaaggagatgattttagatttcgagggatgagtgtattttttataaatattttttttttatataataaaagaggagtaagtaataatgttgagttagaataataattgtaaaatttttaaaagaaaggtagttatagtttgagtgttttttttagtaatagatttaaaattatagttgataatgagagttgttgggaagtgttttttagggttaggtaaaggtatttttgttttaacgattttcgggtttttttttattttgtttgtggttagtgatgaagtttggttgggtttggtgggttagtaggtttcgttaaggaggtttatggtgtatatagtttgtttttgttaagtggcgatggggatggggggtttattgtttttttttaagattattaggtggttttatagaattgaagtttgtgttcgaaggttttttattttaatttcgaaatagagatagaggttgtaaagtattgatgaaggggtttatgttggcgtttatatcgattttttagtgagttaattttattgagaagttttgttttgtaaatttttttttaatttttttttatttttgttttttttttttagt

SEQ ID NO: 1330 - DNA, 6577 bp, Artificial Sequence
  chemically treated genomic DNA (Homo sapiens)
gttgaagaagggaagtagaggtgagggaaggttgaagaagagtttatagaatagggttttttagtggggttggtttattggggaatcgatatgaacgttagtatgagtttttttattaatgttttgtaatttttgtttttatttcggggttggaatggggagttttcggatatagattttaattttgtaaagttatttaataattttaaggaaaaataatgaattttttatttttatcgttatttaataaggataaattgtatgtattatgagtttttttagcgggatttgttggtttattagatttagttaggttttattattggttataggtagggtgaggaagagttcggaggtcgttgaaataggggtgtttttgtttgattttgaaagatattttttagtagtttttattattaattgtagttttaggtttattattggggaaagtatttaagttgtagttattttttttttaaagattttgtagttgttgttttaatttagtattattatttgttttttttttattatgtggggaggaaatatttgtgaaaaatgtatttatttttcgaaatttgagattattttttttgaaatagataagaggaagattaaagaggtaaaaattttgtttttagaagatagtgtagtgaatatagtttatgtaagaattttaggttaagtgtagtggtttacgtttgtaattttagtatttcgggagatcgaggtaggaggatcgtttgagtttaagagttcgagtttagtttgggtaatatagggagattttgattataaaaaattgaaaaattagttaggtaggtatggtgttttgtgtttgtagttttagttattcgggaggttgaggtagaaggattgtttgaggttgggtagttaaggttgtttttaaaaaaaaaaaagaaagaaagggaagggaagggaggggaagggaggaaaggataggaaggaaaggaaggaaagagggaaagaaagaaaagaatttatagttttatagatttgggtttaaattttggaattttagttttattagttatgtgttttggattaagttatttaattgaaatttatttatttatttataaaatgggtttaatatatttattttattaggatttgtggggaggttatatgttataaggattgataagataatttttgttaaaaaaaatttttagtagatataaatttttattttgaattttttagaaagtttttttttgttatgtaataattatagttaatatttgtagaaaagaaatttgattaagatgttatgtttaaatgattaaattttatgtcggtatttttttatttagattttttaatattttttttttgtaggtagaaaatttttataattttttgagtttttttaaagaggaagaaataaaatttttttaaaatagtcgtttttttagaaatgaaggtaatttattttgtagttggttgtattgttttttcggggtaaggatagttaaattaggaagagatttgtgttttgagaatttcgggattgtttagaattgtttagtttttttattaaaggtggtcgagagattttaaagtaggaatgaggttgagttttttgcggtcggagttttagttttcgattcgttataaagttatgaatatattggtagttaagaagtatttatatttattttatgttatttagagagttgtttttgtataaaggttttttttttttttttttttttttggtttttaaagggagtgtttttagtttgtgtatagttagttaatttatgattgtgattgttagggtttgtgggtgatttgattttgttgttatattattttgtgtggtgtttttttatttaatttatttttttttggttttaagtttaaggtggtagtttattagtagggtggttgttaagatagaggtattacggagttaggttttatttggttaagttatatggttttatttttagtatttgggagattttttttttagtagggagttttttggttaatttttgtttatttttttatttttttagtttgtgataggagtttaggaagttgggggaatattgatagtatggaatatattggaaaatgtttaggttttagaaggttagtgatattagatgatgttattattttagataggtttttgaattagttatttgaggtttttggaagggaaaggaaggaaggttattggtatagagaggtttttgagatgttggttttattaatattttattttttagtattaggtaagttttggtggaatggtaggtaggattaaatttttttttttataatggaaatgattattttttatatgaaaaagtggtaattttttataattttattttatttattttatttatttatttatttttgagatggagttttattttgttattaagattggagcggagtggtacgatttttgtttattgtaatttttgttttttaggtttaagcgatttttttattttagttttttgagtagttgggattataggtatgtattattatatttagttaatatttttgtgtttttggtagagattgggttttattatgttgtttatgttggtttcgaattttgaagtttaagtgatttgtttattttagttttttaaagtgttaggattataagggttagttattatgttcggtttataattttattttttataatgtttgaaatatagtatttttatatatatgtatttttttattataaaagtaaaataataattatattagggagaagttgagaagtaaagggaaaaaaagttatttttgattttatcgttttaatattttgttattattgtttatttattttttttttgttttttttaagttaaatttagtataatatattaattttgttaaagataaattaagagttataaaaaagatatggatattagagtttaaggatttttgttgagtgaatgtgtggatgaatgaatgaaaaataggagtaaattggaatgagttttaatatattaaagttattttttttttaggttttagtttaatgttgcggtttaatgttgcggtttagagttttggtttatggagtatttgttacgaagagtaatgtattttagaaagtgataagatggtcgggcgtggtggtttatgtcggtttagtttaggtaaatagtatttagggaaagagttagaattttggttttagggagtgtaaggtttagaaaaataaatggataattatagtatagagtgatatttgtagtgatggagggatggtatggtgttgatgtagttggttttgttttgtttaaggaaagtttataagggagaggatattagggtagggttttgagggatgattaggagtttgttatattttattttttgtagttgtttttatatattttggttatatttgtagtaaatatatgtattaatatatttaatgtttttatttaagagtttttgagggggatattattatttgttatttatggaatttttaagaattttatttatttggttttaaagtatttcgttgatttttttttagaaaatgtagttatttagttatgtgatttgttaaatatgttattttaggtgtttttttaatatagcgtttgtttggtgtggtatttttgatttgtggtagggtttgagtttaagtattaggtttgaggatatatttggaattagttagttgggaaggaaatataatttttttttaattattttaagttatttgttgggaaagatattgtaataaaagatagattaataatagagaaaaaaaagtaagtttgttaatgtttgtgatgtatattacgtaggagaagttttagtgaaagtaatttaatgttgcggtttagaattttggtttatggagtatttgttatgaagagtaatgtattttagaaagtgataagatggttgggtacggtggtttatgtttggaattttagtaatttgggaggttgaggtgggtagattgtttgaggttaggagttcgagattagtttgggtaatatagtgagatttaatttttatagaaaaattgaaaataaattagttgggtatggtggtatgtttagttattgtagttttagttatttaggaggattaggtgggaggattaattgagtttgggagttagaggttgtagagagttatggtcgcgttattgtattttagtttgttttagaaaaaaaaggaaaaaaaagagggaaaggaggaaaggaaaggaaaggaaaggaaaggaaaggaaaggaaaggaaaggaaaggaaaagaaaggaaaggaaagagagaaagaaagaaagaagagaaaggtgataagacgaatgtagttgtaggtttttaggggtggtaagttgtgagaaggtaaatatgtggaagtgagttaaggagtaggatagtaaggtttgtttgtatttgtagatggttttggtgttatttttgagttgataaaagttatttttttattttgatgttgggaaagtatttttttttaaggaatgtttatggtttgttgtaggtaggatagggtagtttagatagttttttttttagttgtttttttttaaatgtttttagttggagataattaggatgttatatcggtatatttgggcgtggtatgttttggttttttttagtttgaaaggttttaggttcgaggtatagttttattgttgatttattatgtgattttggaaaagttatttttttttgggtttgatttttttcgtgataaaaggtgataaaaataaaagtaaataaacgagatataagaaaatgttttgagttattgagtaaaaagttagttaagtaagaatttattatttttgttgggagttagagagtaataattttttttttgataaagagtaagtggatgttaggatttgttttttgaagtatttttttttagataggttttcgttttattataaatatttgtttttaaattttcggttttttttttttttttgtaatattaaatttatgtatgtatttttaatttttaattggaataaattttatataatataaaattattaattaattattttaaagtgtaaaatgtaatggtttttagaatatttataatgttgtataattatgattattattttaatttttttttaatcggtaaataggaagaggaggagagtaaaaatagtgataatgattgtgatgatatatagaggttaggagatttattaaggttatatagtaaatagtttttaagtcgggataaatagtgagtttttggtattttttttagagcgtttgtttgtagggtttagggttggtttttttttggaggttggtaagttttttacggttttttgggtttgtacggttgttttttttttggttttgtttatttagtaggtcgtatttttggttttttttgatgatggatgtagtaggtgaatttttttggggagaaattaaagagtattttgaagggtaggcgggggataggtgggtttttcggagggtggcgatagaggtttcgaggttgttgtggagaaatgtttttttttttgtttttttaggttgttttaggtattatgttgatagtaattagtacgggaatgttttgggtttattattttggaattgattttttattggattgatttgatttgtttttatgttaggttgtgaagatggtttagatttagttagttttcggaagttagtaattttgaaggtttttttataaaaataattgattagagttaacgtttattgagtaaggtatttaaatatattaagtatttaatttatataatagttttatggggtgggaatgattattagttttattttatagatggggaaattgaggttaagtaaagttaaatgatttgtttaagattatatagttaggtggtggtagggttataattttggagttttagtttgtatttgttttggtgtttgttttataaatatagttaggttttgggttttttatttattattttagttaattttttaataacgttgtgtggtaggtattattataatattatttttaatttattaataaggaaatcgagatatagaaagtttgagcgattagtttaatgttatttagtttgtaagtggtaaagttgaggattgatttaggtttgagattttgattggattttatttgtgcgtttattgtgtgtttatttattttgttataggtgagtatatttaggggtaaggagaggtgataatgagagagtgggaaattgagattaaggtaggagttgaggattatttggggttgaatgtttttttttttatgttagtgtttggtgttagttttgtgtaaggttatggaaggaggagacggagtttttattgtgtgtttcgttttatagaaagtgataaaaattttattttagaaatatatttaaggtttaaagagagttagtttaaggtaaaatgtttaagtaaataatagtataggtgtatgtagatgtgatataaatgataaaggtgggacgtgaaggaaatataggggcgtggtttttattttttatttgtgtgtgtgtatgtttcgtg

SEQ ID NO: 1331 - DNA, 6419 bp, Artificial Sequence
  chemically treated genomic DNA (Homo sapiens)
tttagaagtcgttttaacgtttttattaaaggtttagtattaattttgtaatttggaagttgagtaaattttttcgttttttagtatttagtatgagttatattttcgggagggggaggtttggcggtagttgtttttcgtttttttttcgttgttttcgttttttttttttttttttttcgttttttattcgtttttgttagtaggtaggaaggaagttgtttatagtgtaagggtggggtatttttagtttatattgaatagtttcgggttgggttataaagagttagggattttcgtttagttatttttgtttttattatttaggtttttatgtatatattttaggtttaaggttttttttttttagtatagttttttaaggttaaggcgtttttcgtttagttttgtagagtattttggtttgagagggaaggtaggggtaagatttgtcgtttttttggtattatggagggggtagggggtatagggtatagttttttttagggagggatttttatttatttatagaaggttgttattttatttttggggtttgggttagtttttttcgaggcggaaatatagttattgttagggataagggggtttagtttttaattagattatttttaaagtttatttagttttagattttatgattgaagatggaaatttttttagtcgaatattaaatttttaattttgaaaattgttttttcggaaagttttttttaaaatatggttattaatatgagtagttagttattaagatgtatgggtattatttttggtagggttgtaggtatagagtaggttagtattaggtagagttttggggacggtaggtttttttcgataggcgggggaattaattgtttttattagagtattttgatggaaggtaggatatttcggataatattggttacggtttaagaaaggggaagtagggaattttttgtttagagagtatttatttttgattttttttgtttgtttaatttttttttttttttttttttttaagattttgttatggtattttttgttttaatttaaatttaatttaggtttattttgatttttagtttttagcgttgattgtattgaattggattttattttttttgtgatttttagtttttagtgttggttgtattgaattgtaatttattttttttgtggttatagagtgtttttttttgtattttttttttttatttagattgatttttttttgtttatatagatttatttagttttagttaattttttttttagtggattttttttattgtttttagagtatagtttttagtttttaggcggttgtatatatttgtaataaaataagttaatgtatgaagtaattttatttagtgtaggagtttaatttagtagaggatttttatagagaggaattgatttgtgttttttagagtatataggtttagagtatataggtttatttaagtgagaatttatatttatagagtaagttgtttaaaaattacgattaggagggtttagagaaagagttgttttcggggttttggggatagggtgatagttatttagagattatggagaaggggacgtaaggaagattttatagaggagttattttgcgattgtgttggttgggttttttaggaagtagagttttaggagttggaagtataagaggaatattgcgggtaatgtttgagaaagataatagggatcgggagtaggagtgagttgggtaggggaaggattaggtttataatgttaggtttatatttgtagaggagggaagaagaagaagggttttatattagtttagcgggggatgttacgtttatagacgtttcggggtttagttattgtttaagtgttagaaataaattttcggtgttataaaagaaatagtatttagatataaatgtttttagtaaggtaattttatttttatagaagggtgtattttatagatggagtaatggtaagagtatatttgaataagggaagggaaggggtttttatttttaaggtaggtagtttttatagttgtgttgtttttttattggttagggttggattatatcgtttgagttaattgttattggttattttaaagagagtaggggtaagagtcggattggtagggtaagtagtttggtaggaaggacggttatagaataggtgatttaggatgatttaggttagagtaggtgattagtggtgatttagttcggagtaggtgatagaagttaggagggggttgtttattgaaattaggggtaaggagacgaagagaatatgaaagttaaattttaagatgaagaataaagttgaatatattgatgtattggatttttggagaggattttagaatttattgtatttaatttataggttaaaattttagaagaggaatttattatattttatataagattttagggaagtatatggttttggattgaaggttggtatttggaagttgttagttattagtattttttgtagtaggtatttgttttttaagagggaggtttgggtggtgtatttttagagttgtttaggttgggttttaaggaagaaaaagatttttatttgttagaggcggaagggagaggtggagggaatagtatagtagcggtttaggggtagggaagtataggattattagggagatacgagaaagtttatttgtttagaatagaggatttaagtagtgtattaaggaaaatgagggttaggttaatgtgttggagtggttttgtttttggttgagggttttgggtagtgttaaagcgtaaggtaagttttgttttttagaagaatttagtagagtgtggagtttagatgggattggaaggtttgggaggggttaggtggttatagggacgggttatagttagtggtgtaggtaagaagataatggttatttatggtggtttatatttggaattttagtttattgggaggtcgaggtaggtggattatttgaggttaggagttcgagattagtttggttaatatggtgaaattttgtttttaataaaattataaaaattagtcgggcgtggtggtgggtatttgtaattttagttatttaggaggttgggttaggagaatcgtttgaatttaggaggcggaggttatagtgagttgagatagtattattgtattttagtttggataataaaagcgagattttgttttaaaaaaaaaaaaaaattagttaggcgtggtggtgggtgtttgtcgttttcgggaggttgaggtatgagaattatttcgggaggtagaggttgtaatgaattaagattatattattgtattttagtttgggtgatagagtaagattttgtttaaaaaaaaaaaaaagatagaaggatgttagtatttgatgttgtttgttattttgattttgaggatgttagttatagttttattaattgggatttaggaaaatgagttatttttggttatgtatattttaaatggtggtttaatatggaagttagatttgggatttgttgttttttttagtatggtagaagatgtttgaaaagtaggggttggattttattttttgttttattgggaaggcgaggtggtggggtgtggtggggttttaggtttggggttatgggataaagtttaggttgaatgtcgtttttttatttttttttttttgagataggggtagtagggtatattagtgtttaggagtagtttatgaggtttttttattttttattttttaaaattggtagattttatttttttggtgtgattttagagttttgagtatagttcgtttttttcgtttgtcggttttttatttaggtttattttaattttattttttattgttttttagaggagtttggttaatataaatttttttgtttgtttgtttgtttgtttgttgtttttagtttttgttttttttagttttttagttttcgttttttttttaaatttttttttagtttttgaggtttcgaaattacgaggtttcgatttttgtggattagatgtttagttagtggtttttttttagttttttagatggtatagaattataaattttagtatgtattttggtttgaagtgtttggagagtgttggtgtattttatttgtattttgggaattgtagtttttttagttttttatgtttttattagggtattaagtttttttttggtcggttgattttgttttagttttagtttttttgttgatttgcggtttcgggaagcgtgcgttattgaatgatagggtgggggtggaggtattggaaggtagttttttgtttttttgtgttttttatttgagttatgggggtgtgggggttttaggaaattggggttgggaggggaagggatattttaatgttagatttaaggataaaaagttattatatttttgttgggtttttatttttaagaatttaaaaggatttaagggtggggatttaggagtttttgtatgtatggggggaggtgaaggagagaatttgtatgattttagaggtttttgtggttattgagagtgtgggttgttattttttgttatagaaacggtgtttattttttgtttaattttttagggaaaggtatataggggtgaggtcgaaggttttttcgtttggtgttatattatagaaggatttttatgattttttggtggttttattttgttattttttaatgttttagtttttatgttgtagttttagggttttgttggatatttgggtttttatttattagttttagtttttatagcggaatttaggcgttcggttttttattttttaggttagcgggcgtggagttgaggttttagagttttttagtcgggtttgtttttgttttattgtgtatgggataggggcggggcgagggttagtattggagagtttttttttattgtttttttttttcggttttttttttttttttaaggaaaaggttagggttttgttggagtaggtagtagagtggacgtatagtaatatgggtaatttgaagagcgtggtttaggagtttgggttattttgcggtttggggttggggttgggttttgggttgtgcggtaagtagggtttagttatttcggtttttgagtttagtcgggttttagtatttttatttttattagcgttagaatataggtaagggttaggtagttaggagtaggtgggtaataagggtggtgttaaggtttgaagtttggggttgggaaggtttggaatttgtagttgagtcgggagggttaggttataaatgtaaaagggttattaatgtgtatagaataggatagtttgggaggtttagaaaggagattaggattagagtcggtaggtgaaagttgggagtaagggtgttagttatagaatttggttagggtttgaatgttgttttgtcgttaggagttgtttgattttgagtaagttatttaatttttttgaatttttatttatataaaacgagatatggtaatatttattttatggggaagtaagtttttagtttatagtaagtttttaatagtagcgatgattatttagttggagaagaaaggagttgatagtagtggttataggagtgagaaagtggggttttttagaagagggagagagttgggtaggaaattcgggtttttggggtaagtaggttgagaagatagagttattaggttttttttttttgttttagtttttttttttcgtggttgttattcgaaaattggattatgtagtttttataagagttttttcgggggtagaggttttaggagggaggaaagattcggaggtttggtggggtgttaggtcgggggtaggttggggttgtaggtagttatgtagggaaggttgagggtcggggttttgttgtttaggcgtatttttggtttgagtttttttttttttttttgtcgttggtggttttgggaggaagtgataaggtttgcgaggtttttttttatatatggggttgttgttaggaggggttgtgagtgcggagggaaattagagttgaggaatttttgtagggtttttttttatttaagtattaggttttgttttttttagggtagggtttatagtagttttgcgggggtggatattttatttttagaagaggtgaggtgggcgttgtaggtgggatgcgaatttagtttcgggttaggggtttaggagtttagtattagtagtttttgtagtttaggattttggtttataaacggaggtatagttcgtttttagtttttaaggtatggggaacgttagaaggtatgcggtaggtgggttgtgagatcgttagtgttgtaataggggttttcgggtgatatttgggaaggttgaaaggaaataaattttttttgatgattttatttttggtttttaatagt

SEQ ID NO: 1332 - DNA, 6419 bp, Artificial Sequence
  chemically treated genomic DNA (Homo sapiens)
gttgttgggagttagggatagggttattaggaagggtttgtttttttttagtttttttagatgttattcggaggtttttgttatagtattggcgattttatagtttatttgtcgtatgttttttggcgttttttatgttttaggagttagaggcgagttgtgttttcgtttatagattagggttttgggttgtaggggttgttggtgttgagtttttgagtttttgattcgaggttaagttcgtattttatttgtagcgtttattttattttttttggagatggggtgtttattttcgtaaagttgttataagttttattttgagggggatagagtttggtgtttgagtggagggaagttttgtagggattttttagttttgattttttttcgtatttataattttttttgatagtagttttatgtgtgaagggaagtttcgtaggttttattatttttttttagagttattagcggtagggaggaagggagggatttaggttaagggtgcgtttgagtagtagggtttcggtttttagttttttttgtatagttgtttgtagttttagtttgttttcggtttggtattttattaggttttcgggtttttttttttttttgggatttttattttcgggaggatttttgtgggaattgtatggtttagttttcgggtgatagttacgaggagagggggttggagtaggggaaaaaagtttggtggttttgtttttttagtttgtttattttaagggttcgagttttttgtttaatttttttttttttttgggagattttatttttttatttttgtaattattgttgttagttttttttttttttagttaaataattatcgttgttgttgaaggtttgttgtgagttagaaatttatttttttatggagtaagtattgttatatttcgttttatataaatggaggtttagagagattaagtaatttgtttaaagttaaatagtttttggcggtagagtagtatttaaattttggttagattttatagttggtatttttatttttagtttttatttgtcgattttgattttggttttttttttgagttttttagattgttttgttttatgtatattaatagtttttttgtatttgtgatttggttttttcgatttagttataagttttagatttttttagttttaggttttaggttttgatattatttttgttgtttatttgtttttagttgtttggtttttatttgtgttttggcgttggtgggagtagggatgttggggttcggttgggtttaggggtcggggtggttgggttttgtttgtcgtatagtttaaggtttagttttagttttaggtcgtagggtggtttaggtttttgggttacgttttttaagttgtttatgttattgtgcgtttattttgttgtttgttttagtagagttttggttttttttttaggaagagggaggggatcgagaggagggggtagtgggagggggttttttagtgttggttttcgtttcgtttttattttatatataatgggataggaataagttcggttgggaggttttaaagttttagttttacgttcgttggtttgaagggtggggggtcggacgtttgggtttcgttgtgaggattgaggttgataagtgggagtttaggtgtttagtagagttttggggttgtagtatgggggttggggtattggggagtggtagggtagagttattagggggttataaaggtttttttgtgatgtggtattagacggaagggttttcggttttatttttgtgtgtttttttttggagggttgggtagaaggtgagtatcgtttttgtagtaggggatggtagtttatatttttagtgattatagggatttttagggttatgtaggtttttttttttatttttttttatatatataagaatttttggatttttatttttgagtttttttgggtttttggggatagaggtttagtaaggatgtagtgattttttgtttttgagtttgatattagggtattttttttttttttagttttaattttttggaatttttatatttttatgatttaagtgggggatataaaagagtaggaagttgttttttagtgtttttatttttattttgttatttagtgacgtacgtttttcggggtcgtaggttagtagagagattagggttgaggtagggttagtcggttagggaagagtttgatgttttggtgggagtatgggggattagggaaattatagtttttagaatgtaggtggggtatattagtattttttaggtattttaggttagagtgtatgttggggtttgtagttttgtgttatttgaggggttggagaaaggttattagttgggtatttggtttataggggtcgaagtttcgtgatttcgagattttagagattgagagaaagtttaagaaagaaacggaagttgagagattgggagaggtagagattaggagtagtagatagatagataaataaataagaggatttgtgttggttagatttttttgaaaagtagtggaggataaggttggggtgggtttgggtggggggtcggtaggcggaaggaacgggttgtgtttagagttttggggttatattaagaaggtggggtttgttagttttggaggatggagggtgaaggggttttataagttgtttttggatattagtgtgttttgttgtttttgttttaggaggagggagatggaagggcggtatttagtttgggttttgttttatgattttaagtttgaggttttattatattttattatttcgtttttttagtgaggtaggggatgggatttagtttttattttttaggtattttttattatgttggaggagataatagattttaagtttggtttttatattaagttattatttgaaatgtgtatgattaaggatgatttatttttttaggttttagttaatggagttgtgattggtatttttagggttaaggtgataggtagtattagatgttgatatttttttgttttttttttttttttagatagagttttgttttgttatttaggttggagtgtagtggtgtgattttggtttattgtaatttttgtttttcggagtgatttttatgttttagtttttcgaggacgataggtatttattattacgtttggttaatttttttttttttttgagatagagtttcgtttttgttgtttaggttggaatgtaatggtgttattttagtttattgtaattttcgttttttgggtttaagcgatttttttgatttagttttttgagtagttgagattataggtatttattattacgttcggttaatttttataattttattagagatagggttttattatgttgattaggttggtttcgaatttttgattttaggtgatttatttgtttcgattttttaatgggttgggattttaggtgtgagttattatggatggttattgtttttttgtttgtattattggttgtggttcgtttttgtggttatttgattttttttaggttttttagttttatttgggttttatattttgttagatttttttggaaagtagggtttattttacgttttggtattatttaaaatttttagttaagaataaagttattttagtatattggtttggtttttattttttttggtgtattgtttgaattttttgttttagataaatgggttttttcgtgtttttttaatggttttgtgtttttttgtttttgggtcgttgttgtgttgttttttttatttttttttttcgtttttgataaatgaaaattttttttttttttgaggtttagtttgggtagttttggaggtgtattatttaggttttttttttagagagtaggtatttgttgtagaaggtgttggtggttgatagtttttagatgttagtttttagtttaaggttatgtgtttttttggagttttgtgtaggatataataaattttttttttaaggttttagtttgtaaattaagtataatgagttttgagattttttttaaagatttaatgtattagtatgtttagttttgttttttattttaaagtttaatttttatgtttttttcgtttttttgtttttagttttagtaaataatttttttttagtttttattatttgtttcgaattgagttattattggttatttgttttgatttgagttattttgagttatttgttttgtgatcgttttttttgttaaattatttattttgttaattcggtttttatttttgttttttttaaaatagttagtaataattagtttagacggtgtggtttaattttagttaataggggaataatatagttgtaggggttatttgttttagggataaaaattttttttttttttttgtttaggtgtgtttttgttattgttttatttgtgagatgtatttttttatagaagtaaaattgttttgttgggaatatttatatttgagtgttattttttttgtggtatcgaaaatttatttttaatatttagatagtaattgagtttcggggcgtttgtgggcgtaatatttttcgttgggttgatgtgaggtttttttttttttttttttttttgtaggtgtgagtttggtattgtgggtttgattttttttttgtttaatttatttttgttttcggtttttgttattttttttaggtattgttcgtagtattttttttatgtttttaatttttgggattttgttttttgaaggatttaattaatatagtcgtaggatgatttttttgtgaggttttttttacgtttttttttttatgatttttgggtggttgttattttgtttttaaggtttcggggatagttttttttttgggtttttttggtcgtggtttttgggtagtttgttttgtaagtgtgggtttttatttaaatgaatttgtgtgttttgaatttgtgtgttttggaagatataggttagtttttttttgtggggattttttgttgggttgagtttttgtattgagtgggattgttttatatattggtttgttttgttgtaaatgtgtgtagtcgtttggggattggaagttgtgttttggaggtaatggagagggtttattgagaagggaattggttgaggttagatgggtttgtgtgggtagaaagaagttagtttaggtgaaggggaggagtgtaagaaggagtattttgtggttatagggaggatgggttatagtttagtatagttagtattgaaggttgagggttatagggaggatggggtttagtttagtatagttagcgttgaaagttgagggttagagtaggtttggattgggtttgaattggggtagaggatgttatggtagggttttaagaaaaggaggaaaaaaaaaagttaaatagatagaaaaagttagagatgaatgttttttggataggggattttttgtttttttttttttgggtcgtggttagtgttgttcggagtgttttgttttttattagggtgttttgatgagaatagttgattttttcgtttgtcggaggaggtttgtcgtttttagggttttgtttggtgttggtttgttttatgtttgtagttttgttaagaatgatgtttatgtattttagtggttgattgtttatattggtaattatgttttaaagaggatttttcgaaaaaatagtttttaaggttggagatttggtgttcggttgaaagaatttttatttttaattatgagatttgaagttgaatgggttttggagatgatttggttgggaattgagtttttttgtttttgatagtggttgtgttttcgtttcggggagggttggtttagattttaggggtaaggtgatagttttttgtgggtgagtagggatttttttttggggagggttgtgttttgtgttttttgttttttttataatgttaaagaggcggtaaattttgtttttgtttttttttttagattagagtgttttgtagggttgggcgggggacgttttgattttggagggttgtgttgggaagggaaggttttgggtttggggtgtgtgtatgggggtttgggtggtgagggtaggggtgattgagcggaagtttttgattttttatagtttagttcggggttgtttagtgtgagttggaagtattttatttttgtattatgagtagttttttttttgtttgttggtaaggacgggtggggagcggggaaaggagggaagggaggcgggagtagcgggagaggggcggggagtagttgtcgttaggtttttttttttcgaggatgtaatttatgttgagtgttggggggcggagagatttgtttagtttttagattgtagaattggtgttgagtttttggtgagggcgttggggcggtttttggg

SEQ ID NO: 1333 - DNA, 5921 bp, Artificial Sequence
  chemically treated genomic DNA (Homo sapiens)
ggagatgtaagagatgatataggtttggattaggatattggtaatagggatgagaagagatgagaagtgtttagattttggatatatatatttttttttttttttttgagatggagtttcgttttgtcgtttaggttggattgcggattgtagtggcgtaatttcggtttattgtaagtttcgtttttcgggtttacgttatttttttgttttagtttttcgagtagttgggattataggcgttcgttatcgcgttcggttaattttttgtatttttagtagagacggggttttattttgttagttaggatggtttcgattttttgattttatgatttattcgttttagttttttaaagtgttgggattataggcgtgagttatcgcgttcggtttggatatatatattttgaaggtagagtttataggatttaagatagtttggatgtggagtatgagaaaaagagaggaattagtaatatttttaaggatttgggtttaaataatggaaagaatagaattgtaaaatttaattttattaggaaggaagagaaggttaagggagaagattaggttagttttggatatgttaagtttgtggtatttgtatttggaagtataagtttggagtttcgggaagtgtatgattttgagagttattagtataaaggtggtttttatagatggtatttgaatttggtagggagttaggagattggatgagattatttagggagatagaaaattagaagaggtttagggaataattatggatattataatggtaagaggttggcgagatgaagagtaattaatagggaggtagagagggaggggtttggggtaacggggggttttatatttttcgaattatatatttataaataatttttaagagtggattatttttgtttattttttattttttttttttttttattttggttttattttgttattttggttggattgtagtggtatgattatggttcgttgtagttttaattttttgggtttaagtgatttttttacgttagttttttaagtagttggggtaacgggtgtgtattattacggtttgttaatttttgtatttttttatagggatggggtttttttatgttgtttaggttgattttgaatttttgggattaagtgatttttttattttggttttttaaagtgttgggagtataggtatgagttatcgttgtatttggtatttttgtttatttttatggttatagtggtttattgttttttttgtgtttggatatattattagggttaatttcggagtttattttttaaggttataagtttttatgattgaagtgtgaatgattgataggtttattttttttagggggtatataatgaaagaaaatttttttaataaaatgaatttttatttgatgaaatattgtaggaaaaagggttattttttagagggaattatttgtatttttggtatgttgtagtttattgtagtgatgatggtattattttggttagtattaatttttgggaagttattgggaaggagaaataagtttttgggggagtattaatattgttttgggttgtaaggttttagaggttaggaaaagtatttgggatttaagtatagtttataatgtttgagtaggtgtatattgttttattttaagtaggataaagtaagaagtgggtaggtagttttttgatattgtttttaaatttagtttttgtttattatatttttggtttttttttatttaattatttttttgttttcgttgtaatttttttttttttttatgttttagtttagtgttttagtttttttttttataaatggtgttagattgttaatattgtagaaatggtgagtttagttttttttattaaggttttcgcggttttatgagaaatttgttgtttttttttattttttttttattatttattagtattaaatttttagttagtaaattagagagtataaaagtagggatttttatattagggttttttttttttatatttatagttgtttttttaattaaggaaggtgatgggaaaatgataatgatattaataggataatgggataaaagtatggataggaaatttataaaagtatggataggaaatacgaatagttattaaatagttaaaaagaatgttgatatttaataataaatgtgtagtttaaaggagtaataagagattattttatttattaaagtggcgaggattttaatgtggagggttggcgagagtaaggatataggtagatattattaattggagtagaaaggttttattgttttttggagaatggtttggtaatatatagagattaagagttttaaaataagtttatgtttttatttttttatttagggtttttatttttagaatttagtttaaggtaataattagttatgtaaatatgtaagtttaaggatatttatcgaaggtttgggcgcggtggtttatatttataattttagtattttgggaggtcgaaagaggtggttagattatttgaggttaggagttcgagattagtttggataatatgatgaaatttcgtttttattaaaaatataaaaattagttaggtatgtgtttgtaattttagttatttaggaggttgaggtaggagtagtttgaatttaggaagtagaggttgtcgtgaatcgagattatattattgtattttattttggataatagagtgagattttattttaaaaaaaaaaaaaaaaagaagaagaaaaagaaaaaaaaagaatatttattatagtttagtttattatatgtttaaaaattgaaggttaggtgtggtggtatatatttgtaattttagagttttgggaggtcgaggaaggaggttgttgtgagtttaggaatttaaggttatagtgagttatgtgcgtgttattgtattttagtttgagtgatagagtaagattttgtttttaaaaaaatagaaagtaaattgagatttatttaaatatgttataataggaaattggtttaaatgaattagtagaatattgggtgattattataaatgatgttggtttacgggtttttaaatgtgatatattggtatttgtgtttaaaaatgtataaatattagatatatttaaatttaggaatagtttataaaataattgttttgtatgtttaaaaatgttagtatcggttaggtgcggtggtttacgtttataattttagtattttgggaggttaagatgggtggattgtttaagtttaggaatttgagattagtttgggtattatggtgaaattttgtttttattaaaatataaaaagttagttaggcgtggtggtgggcgtttgtaattttagttatttaggaggttgaggtacgagaattgtttgaatttaggcggtggaggttgtagtgagttaaggtcgtgttattgtaatttagtttggattgttttaaaaaaaaaaaaaaaaaaagttaatataatgaaaggtaaagtatatttaaggtattgtatttatattaaaggaaattaaaaagattcgatagttaaatgtaacgtaggatgttaaatgagattttagattaaaggaaaaaattgttatgaaggatattatggggtaattggtaggatttgaatttggattgttaattagattatagtattatatcggtttaagttttttgatttggataattgtattatattatgtaaaagaatgttttgtttttagaaaatttgtattgatggatttaagggtaaagggtattttgtatgtaatttatttttaaatggtttagtaaaaaatataaatgtgtatttatagagaaataatgataaagtaaatgtggttaaatgatattagtggatgaatttgagtgaagggtattttggaattttttttagtatttttgttttttttttatgagattaaaagtattttaaaataaaaagttaaaaaaaggaagaaagtggtgttggtgaagtatatttttcggtaggggaaggtttttaggtgtattagtagtagttatgagtgttttaatattagggagagtatagttgttattgatattttttgttattttggatttttagttttttgtgttattaaaggaatttagtgtgtggttgattttaaagttgttttgggttgatttaagaaggtaggatgagtattttgaggtaaagaatttttttttgtgattttattgattttaattttgtattttgattggtattttttgtattttaaggattttgatagcggagggaggtagagatggaggaagtgaaaattatttaaatttagtgtttgttatagataatttagattgtaaaatttagggtagattatgtttatttattattgataatgatagttttaatatttttttataataggaagattaagatttttttaaaatcggttagtattttgtttattcgttagaaggagaaaaataagttttggtaagagttaagataaggtttagaagtttttgggtttttttagttaaggtgagtggttttaaattatgataagttgtaggttttttgagaagtatttgtaataatttggtaaattaagtatttttttttgggaggaggaatatagaattttgtaattatttaatatttgtttttaggttttgttttttttggggtatacggtagttattttgtaatttttatttttagaaaggagagattagattaataaatagtagggttgggattgtttagggggtttcgagattttttttttttttttattatttgttttttaggtatatcgttttatttttttttatttttttaggggttgttagggatagaaggttttttttttattttttttagtgtttttttatttttttttcgttttttattattagggtgtttaggatattgtgtgatttaggaaatagtttagacgtgaggtttgtagtaggtcgaggaggaagaagaggggtagtgggagtagaggaggtggtttttgttttagtgagagttttgagggtttttgtttgaagagggatagggattggggtttggagaaggggttgtggaatgtagttttttttattgttgttgttgttgttgttgttgttgttatgtgttttagtggttagatttagaggtgaggtatggcgtgggtgaggtgaggggatttagtttttttaggaggatgtttagtggggtgggggaagagggttaagttttaggtcgtgtgagggatgttggatggaggagatttttattgtttaaatagagacggtttttagggaaagacggttttgtttatggagttgttttgggtttggtgttaggggtggtgattgttgggggatgggtgagagggtgtttatttttaggaagaatttcgttagtattggtattggaggatttttgtagttatagggaagaggggaagagggaatatattgattatttgtttggggaggagatgagagggaagtaggagatggggatatgaaaggttaggtttattaagtttttttttagtttagttgtttttatttttcggatggtttaatgttcggttttttcgggaggaaattttttcgaagttttagttatttatttttcgggagttattttcgttttttttttgatttttgttgttttgttttcgagagatggagttcgaggttggatttgggaggttagagaataaataggaaaggggggtagggattagtaattgggacggagggtattggggttggggttgggtattatgtggagagtggggatagatgtgaagaagaggtggtttagagtatttgtgggagttgttgtgggtaggttttttaggagtatttagaagaggaaaggtggaggtatagtatttagggtttttattgcgtttgtttttttttttttagg

SEQ ID NO: 1334 - DNA, 5921 bp, Artificial Sequence
  chemically treated genomic DNA (Homo sapiens)
tttgagggaggagaggtaggcgtaatggaagttttgggtgttgtgtttttatttttttttttttaggtgtttttgagagatttgtttatagtagtttttataggtattttaaattattttttttttatatttgtttttattttttatatggtatttagttttagttttagtgtttttcgttttagttattaatttttattttttttttttgtttattttttggttttttaagtttagtttcggattttatttttcggaagtaagataataggggttagaagaggggcggaggtggttttcgggaggtgaatggttgagatttcgaagagattttttttcggaaaggtcgagtattgagttattcggggggtggggatagttggattaagaaagggtttagtaggtttgattttttatgtttttattttttgttttttttttattttttttttaagtaggtggttagtgtgtttttttttttttttttttttatggttgtaagagttttttagtgttagtgttgacgaggttttttttggaggtgggtatttttttatttattttttagtagttattatttttggtattaggtttaaagtagttttatgggtagagtcgtttttttttggaggtcgtttttatttgggtagtgagaattttttttatttagtattttttatacggtttggggtttggttttttttttttattttattgaatatttttttaagggagttgggtttttttattttatttacgttatgttttatttttgggtttgattattgagatatatagtagtagtagtagtagtagtagtagtagtgaagggggttgtattttatagttttttttttaagttttagtttttgtttttttttaggtagggatttttagagtttttattggggtaggagttattttttttgtttttattgtttttttttttttttttcggtttgttgtaagttttacgtttgagttgttttttgagttatataatgttttggatattttagtaatggggggcggaggaagagtggaggaatattaggggggatgaaggaggggttttttgtttttgataatttttggggaagtagggggaagtaggacggtgtgtttggagggtaggtgataggaggggagaaggaatttcggaattttttgggtagttttagttttgttgtttgttgatttggttttttttttttagggatgagaattgtaaggtggttgtcgtgtgttttaggaggggtaggatttggaaataggtattgggtggttatagagttttgtatttttttttttaggagaggatgtttaatttgttaggttattatagatgttttttagagaatttgtaatttgttataatttgaaattatttattttggttaaaggaatttaggggtttttgggttttattttggtttttgttaggatttatttttttttttttggcgaatgggtaagatgttggtcggttttggggaaattttggtttttttgttgtaggggaatgttaagattgttattattagtgataaatgaatatagtttattttaaattttgtagtttgaattgtttgtaataaatattgaatttgggtagtttttattttttttatttttgttttttttcgttgttaaggtttttgggatgtagggaatgttagttagaatgtaaaattggagttaataaaattataaaagagaattttttgttttagaatgtttattttatttttttgagttaatttaggataattttggggttaattatatattgagtttttttagtagtatagggaattgagagtttagggtggtagaaggtgttagtggtagttgtgttttttttggtgttgaggtatttatggttgttgttggtgtatttgagagtttttttttatcggggaatatattttattagtattattttttttttttttttagttttttattttaaaatatttttaattttatgggaaaggggtaaaaatattaaaaagaattttaggatattttttatttagatttatttattaatattatttgattatatttattttattattatttttttataaatatatatttgtattttttattgaattatttgagagtaagttgtatataagatattttttatttttaaatttattagtgtaaattttttaagaataaaatatttttttatataatatagtataattatttaaattaggaaatttagatcgatgtaatattatgatttaattgatagtttaaatttaggttttgttaattgttttataatgttttttatgataatttttttttttggtttaggattttatttggtattttgcgttgtatttagttgtcgagtttttttagttttttttaatatgagtatagtattttaaatgtattttgttttttattatattgattttttttttttttttttttgagatagtttaggttggattgtagtggtacgattttggtttattgtaatttttatcgtttgggtttaagtaattttcgtgttttagttttttgagtagttggaattataggcgtttattattacgtttggttgattttttgtattttagtagagatagggttttattatggtgtttaggttggttttaaatttttgagtttaggtaatttatttattttggttttttaaagtgttgggattataggcgtgagttatcgtatttggtcgatattggtatttttaagtatataggatagttgttttgtagattgtttttaaatttgagtatgtttggtgtttatgtatttttgggtataagtattagtgtattatatttggaagttcgtgagttagtattatttataatggttatttagtattttattagtttatttaaattaattttttattatagtatgtttaggtgggttttaatttgttttttgtttttttagagatagggttttgttttgttatttaggttggagtgtagtggtacgtatatagtttattataattttgaatttttgggtttatagtaattttttttttcggttttttaaagttttgggattataggtgtgtattattatatttggtttttaatttttaaatatataataaattgagttgtggtaaatattttttttttttttttttttttttttttttttttttttttttgagatggagttttattttgttgtttaggatggagtgtagtggtgtgatttcggtttacggtaatttttgttttttgggtttaagttatttttgttttagttttttgagtagttgggattataggtatatgtttggttgatttttgtatttttagtagagacggggttttattatgttatttaggttggtttcgaatttttgattttaggtaatttgattatttttttcggttttttaaagtgttaggattataggtgtgagttatcgcgtttagattttcggtaaatatttttgaatttatatatttgtatggttaattattgttttaggttaaattttagaagtgaaaattttgagtgaaagggtgaagatatagatttgttttaaagtttttggtttttatgtgttgttaagttattttttagaaagtagtgaggtttttttattttagttagtagtgtttgtttgtgtttttattttcgttaattttttatattagaattttcgttattttgatagatgaaatggttttttattgtttttttaaattgtatatttgttgttaagtgttaatattttttttaattgtttaatggttattcgtgttttttgtttatgtttttgtgagttttttgtttatgtttttgttttattgttttattggtgttattgttatttttttattattttttttagttgaggaggtaattgtgggtatggggaagaggaattttagtgtaaaagtttttgtttttgtattttttggtttgttgattggggatttggtgttggtgagtagtgaaaggaaaataggaagagataataggttttttatggaatcgcgaagattttggtggaaagaattgaatttattatttttgtaatgttgataatttaatattatttgtggaaaaggaggttggggtattaggttggagtatgagaaaaaggagaaattgtaacggagatagagaggtggttaggtggaagggaattagaagtgtggtgggtagaagttgagtttaaagatagtgttaggaagttgtttgtttattttttgttttattttgtttaaggtaaggtagtgtgtatttgtttaggtattatgagttatgtttgggttttagatattttttttggtttttaagattttatagtttaaagtagtattgatgtttttttaagagtttgttttttttttttaatggttttttaagggttgatattgattagggtggtattattattattatagtgaattgtagtatgttagggatatagatagttttttttgggaaatgatttttttttttatagtattttattaaatagagatttattttattaaagggatttttttttattgtatattttttgagaaggataaatttgttagttatttatattttagttatagggatttgtgattttaaaaggtgaatttcgaggttggttttgataatgtgtttaaatataaagaaggtaataggttattgtagttatagagataagtaagagtgttaggtgtagcggtggtttatgtttgtatttttagtattttgggaggttaaggtgggagaattatttgattttaggagtttaagattagtttgggtaatatagggaaattttatttttatgaaaaaatataaaaattagtaggtcgtggtgatgtatattcgttgttttagttatttgggaggttgacgtgggaggattatttgagtttaggaggttgaggttataacgagttataattatgttattgtaatttagttagggtgataaggtgagattagagtgagaaaaaaaaaaaaataagaaataagtaagagtaatttatttttggagattatttgtaaatatatggttcgggagatatggagtttttcgttgttttaggtttttttttttttgtttttttgttggttattttttatttcgttaattttttattattgtagtgtttatggttattttttgggttttttttagttttttgtttttttaggtgattttatttagttttttggttttttattagatttagatattatttatgaagattatttttgtgttgatgatttttaagattatatatttttcggaattttagatttgtatttttaagtataagtattataaatttaatatgtttagaattgatttgatttttttttttaattttttttttttttttgatagaattgagttttgtagttttattttttttattgtttaggtttaaatttttgaagatattgttgattttttttttttttttatattttatatttaaattgttttaaattttgtggattttatttttaaaatatgtatatttaggtcgggcgcggtggtttacgtttgtaattttagtattttgggaggttgaggcgggtggattatgaggttaggagatcgagattattttggttaataaggtgaaatttcgtttttattaaaaatataaaaaattagtcgggcgcggtggcgggcgtttgtggttttagttattcgggaggttgaggtaggagaatggcgtgaattcgggaagcggagtttgtagtgagtcgagattgcgttattgtagttcgtagtttagtttgggcgatagagcgagattttattttaaaaaaaaaaaaaaaaatatgtatatttagaatttgagtattttttatttttttttatttttattgttaatattttagtttaagtttatgttattttttgtattttt

SEQ ID NO: 1335 - DNA, 7903 bp, Artificial Sequence
  chemically treated genomic DNA (Homo sapiens)
ttgtttatggcgttattggttttgattggttggtatttgtattttatagataagttattttaatattatttttggtaaatattgagtgttttaggtattgtttgatttttatttatggggtgggatttttttatttagattgagaatagttaggttattgaggtgtattaatttgttaggatataaaaaatattatagatagtataaacgataaatatttatttttttatagttttggagtttggaagtttaagattaagatattggtaggtttgtttttttttgaggtttttttttttagtttatagatggttatttttttattgtggtataaatggttttttttttatatatatttttgttttttttttttttttttttttttttttcgtgtttttagagatagggttttattttgttatttaggtaggagtgtagtggtgtagttatagtttgtggcggttttgaatttttgggtataagtagttttgttattttagttttttaagtagttgggatgataggtgtatgttattatgtttagttaatattttaattttttgtagagatagggttttattatgttgtttaggttggttattggtttttaatttttgggtttaagtgatttttttgttttggtgtttaaatgttgggattataggtgagtattattttgtttggttttttttttttttatgagaataatagttttattggattgtggttttattattatgattttatttaaatttaattatttttttaaaggatttatttttaaatatagttataatgaggattagagcgttaatataagaatttgggggaatatattttattgtgttatataatagaatagattttaaagtatttttttttttagatttttaataaagtgataattagtatagtgtgtatatggttagaggatggggtggaaaatatttgtttggtttttatgatttaaagtgttttaatttgatttttttttttttatatattttatatgttttattttttttttttttttttttgaagtggtaatttattatttgtgtgaaaataatataattttttattgtattttaaaggtatagaaagtttttggtaatgtgtagagtgagttaattaagacgaggggtagtttgtcgggggttgggtgggattgggtagggtgtgatttggttttaaagaattaatttacgttaattatattgggattttgtttttttgtgttttttgttttttttgggttttagttttttgtttttttttttagggaatttttggtttttttttttaggagttaaggtttttggaatagagggtggtaggttagttttttatttttgttttgttttttttgttattgagtgaggtatagatggaagttttatttttagaaaagagaaataaaagtgatttttataatagaaagagaagggttggatgtgttggtttatgtttataattttagtattttgggaggttgaggtgggaggattatttgagtttaggagtttgagattagtttgggtaatatgaagatattttatttttaaaaaaataaaaataaaaaataggcgaatgcggtggtgcgtgtttgtagttttagttatttgggaggtagaggaaagaggatcgtttgagtttaggagattgaggttgtagtgagttgagattgagttattatattttagtttgggtggtagagcgagattttatttaaaaataaataaataaataataataaaaaaaaaatagggaaaaattttaaaatgttttaattttagtaattggagaaaatggaagattaaagattatggtgataaggggagtagatattttattttattttttgagatagggttttattttgttatttagattggagtgtagtggttttattatagtttattgtagttttgattttttgggtttaggtgatttttttgttttagtttttttagtagttgggattatagatgttattatatttggttaatttttgtattttttgtagagatgagattttattatgttgtttaggttggttttaaatttttgggtttaagtaatttttttgttttggttttttaaagtgttgggattataggtttgaggtattgtgtttggttagggatagatatttttaaaatcgtatatttagtttgtgatttagagagaataagagattttagttgagagggtaggaataaaatacgttttataaggtaatattgagtgatttagaatttatttttgttatttttttttagtttttttgattttgcgggtggagggtaagtgtgttattaagtatgtttttggataaggagtttttttgaagatagaagtgatgagaagatagaagaaaaggtaataaggtattaatgaattttaattatattaagattgatgatcgtttggtttttgtttataggaatgttataggaatttttttattttaaaagtaaataataaagtatagttttagttttttttatgtggatataaggtggtagtgattagaaaagataagaatagtgttgtgttttagtataaaaacgtaattatgttatgtaatatggtagttattaattatatgtgattatcgagaagttataatgtaattagtatgattaggtaattgaattatttttattatattttattttaattaattttattatttttaaatagttatatatggttagtgttttttgttttgaatagtgtgggatttattggtattgataggttggatatatttttagtttttattttgatttaatttatggttaggtgagtttagaaagaataaaagagaaagagataatggagattaattataatagttagtatttaatgtgtgtttattatatatttaggtatttatttaaatatgtaaaaggtattttgtataatttttgtaaaaatattaagattattgttattttatagatgaaaaaattgaagtataataagaattttatttgtttagaattatacgagtaaataaggggtgaagatggtatttatatataggtagttttattagagtttatttatttatattatatagatttaggaatgaggtggtatggagtgattggggttatggtttttaaattgtgttaaagtataagtttataagggtattgtggaatatttttaatttttagaggaaatatagtaatattttatattttttaaatattgtgtgatttattaatttgaggtgatttatagttggaatattagattgtgttatattttttttgatgataatatatttggttaggtgtggtagtttatgtttatatttttagtattttgagaggtcgaggtgggtagattagttgaagttaggagtttaaggttagtttggttaatatggtaaaatttcgtttttattaaaaatataaaaattagttaggtatggtggtaggtatttgtaattttagttattcgggaggttgaggtaaaagaatggtttaaatttaggtagtagagattgtagtgaggtaagatcgtgttattgtattttagtttgggttatagagtgaaattttgttttaaaaatatatatatatataaagataatatatttttataaaagatggttttagaaggtttttttgataaaaattaagtattaagtaaaaaaaaaaagtattgtgtaaaaattagtatggaatagaaaatgagggtggtagtattggatttttgtatgtgagaagttgagtagtgttaaatagatgtatatatttcgtaagtaattgtttgtggttatttaagaacgaaattttttttttaatttgtgtgtattgttatttttaaagtgttagtaagtttttaggaattagttatttattttgttgtttaggttggagtgtaatggtgtgattttaggttattgtaatttttatttttcgggtttaagttattttttttgttttagttttttaagtagttgggattataggcgtttgttattacgtttagttaattttttgtatttttagtatagatggggttttgttttgttggttaggttggttttcgatatttgattttaggtgatttatttatttcggttttttaaagtgttgggattatcggcgtgagttatcgcgtttggtttttatatataaatttttttttaattttttaaattaaaaattaaatgtaaatttaatgtaaaaatgtaaattaaatgtaaaaattaaattgtaaatgtgggtagaagtaatagttgtattttattaaagatacgttatttatgttatattttggtattcgtgtatttcgataatagaatttttttcgtgggaggagttttttagttatttgaattgtttggattaatattgcgtagattaagggattatttgtgtttttatttattaaatttatttttattttttttgtcggtatttaggatttcggaatttttgtttgagaatttttttttttttcggtttgggtttggatgtgtttttttaaattttgtattttttaagttagtattgttgtcgggggcgatttagttttttttgtttagggagtaatttagatatagtttcgttttatttttattttggggttgtataatttaaggtatgaaattttttttttttgaattttttacggtttgttattgatatagttggaatgaggttgtaaggagagggttgggggtttttttttttatttttagttttattttcgtataggtttttttgttgggaatttttgttttgcggattggaatgggtatcgagatgaaatgttgggtgcgtttcggtttttttcgttcgtttcggggtagaaggtttagggttgggaagaattttgattaggtttatagtttaggtttagtcgattgaattagggtgtgttattatggagatagggtcggttcgcgtgttcgtttgttattggttggggattttagggtaagggatataagttagagtttagattagtgagttaattgtgcgaattagattcggtagttttgtttagtttagtatagcggagcggattcgatcggatcggagcggatcggagtatatcggagtaggtttatcgagaaggcgtttgcgagattatggagaacgggtgaggagggtattaggttcgtaggatttttggggaggggtaggtgttgtgattcgggaatttggtatattgggtttagagggagttggcggagggagcgagcgtttaggggatgtagagaggtttggtattgagtttagtgtcgggagtaaggcggtagagttatgcggtagttagcgcgggtagggacgtacgcgggaatcgagttggggtggcgttatcggagtaggaaggggataggtcggtgcggtttaagttatttcgtaaaagtagtcgttgtgtgttttcgtgtgtgtgttaggggaataagtggagagtgagtatatgtatatattttttattttatattaggaggaggtttttttattttttgcgttttttataaatttttatgttagggtttgggtaaagttgcgaggtatttttggtgtttaaattcggagttttttttttagaggtaagattatttattttttttgttagttgtattttttttttttttttagattggtagtatgattaattcggtgggaagtgattgttaagtggagacggaaattagttatcgaattgagtaatagttttgtgtttattttttttattttacgtttttgaaaatttttttttcggtttgggttttggatattttagtttaagtgatttgtattaggtattatagttgtttttggatgtttagggagttagggtgtttttgaggggattgatagttaatgaggaagtgttgtgagatgtggttagatatgttatgtggcggtagttttatatatttattttttttgtattttttggggatgttatttgattaatattttattagtttaattgtttttttttattgttttgtggtttcgttgattagtttttaatttatttgatttaattgtttttttgagggtagtttggtgtattgtgtaattatgtttggtttttcgggttttgttttttaagtaaaaaattttttgtgaaagtttggttagttgtgtttagttttgttatattttattgttatttttgaaagtaacgtttggtttttttagatggatgtgagagaattggatttggaattgggagaaaagtaatacgggttgatttttgttagtgtaggggttttgggtaagtgttttgaggtttttgaagagtaaagattttcggtggagagaaaggaaattgggaggaggtagggagggggaaggataggaagaagattataggtaggtggaaagtaggagaaagatttaaatattttgtgtaatagagttataggtttttggaagttgttagtaagtatttaatttatttttagattgagtttataagatagatggggttaatttatattttttgtttatatttgagaaaataatttaaagtataaattatatgtttaaaaagataatattgggattagaatttaggtcgaattttgtttttttttagattagtaatttttaaatttggttttattttattttatttttatttatttattttggagtcggagtttcgttttgttttttaggttggagtttagtggagcgattttggtttattgtaatttttgtttttcgggtttatattattttattgttttagtttttcgtgtagttaggattataggggttcgttattacgttcggttaatttttttttttttttttttttttttgtatttttagtagagacggggttttaatatgttagttaggatggtttcgattttttgatttcgtgattcgtttatttcggttttttaaagtgttggggttataggtatgagttatcgcgtttagtttttaaatttggttttaaaattaaaattatatgggttttagaatttgttttttgtgggggttttgtgtgtgtgtgtgtgtgtgttttttatagggttttattttgttattaggttggagtgttagaatttgtttttttaataagtttttgttgagaatttgtgtagttagttttggtttaatttttgataattagtattgtggattgggtttgtttttttgtatagtagtttatttagttttttgtttggaattaatttttttgtgatttagggagttaagaatggtacgtagatttttattaggggtggttttattgtgttttattggttaaaataaaaaagaaatgtagtttttaagtttttggttgaggaaggaattggaggaatgagggtttaaaaggaaatttgagtttatttttgtttttatagtagttggttttaattatattttgaatgtttttggggaataggtaaggtaataagggggattttattaggtgggtattatttttaggaagggtttaattttattttgagtattttttttgggtttttttttggttaagtttttttattttttttaatttgattatttttttgtattttttcgtatattttggtttttttttttttaaatttttgttataaggataagtatgtagtttgttagtgtttagtggatttaatattggagttgggtttgttagtagaaataggttttattaatttttgttaggttttagaatggaggtagttttatattagatttgtagtgggtttgatttagaaagaagggtggttgagtagatggaagagtatagtatggtttttttttttgtgttagttttttcgtttttgttgttttagtatatttgttagtttttttgtatcgaaggttatttgtttgtgatgtttttggaatgggagtagaatttattttgatatttttttttttttaga

SEQ ID NO: 1336 - DNA, 7903 bp, Artificial Sequence
  chemically treated genomic DNA (Homo sapiens)
tttgggggagaaaaaatattaaggtgaattttgtttttattttaagggtattatagataaatgattttcggtgtaaaaaggttggtaggtatattgaggtagtagggacggagaagttggtatagagggaaaggttatattatgtttttttatttatttagttatttttttttttgaattaagtttattataagtttgatatgaaattatttttattttagagtttggtaaaagttaataaagtttgtttttattaataggtttaattttagtgttggatttattgaatattggtaagttgtatatttatttttatgataaaggtttagagaggaaggggttagagtgtacggggaagtgtaaggaaataattaaattagggagggtaaaagggtttggttaggagggagtttaagaagagtatttaaaatgggattaagttttttttgagggtggtgtttatttagtaaaattttttttattattttatttgttttttaaagatatttaaaatgtaattaagattaattattatgaaggtagagataaatttaaatttttttttgaatttttatttttttagttttttttttagttaaagatttaagggttatattttttttttgttttaattaataaaatataatgggattatttttggtagaggtttacgtgttatttttagttttttggattataagggggttaattttagataaaaaattagataaattgttgtataaaaaagtagatttagtttatagtattggttgttaaaggttaaattaggattgattatataaatttttagtagaagtttgttagaaaaatagattttggtattttagtttggtgatagagtgagattttataaaaaatatatatatatatatatataaaatttttataaaaaatagattttgaagtttatgtaattttgattttaaaattaggtttaggggttgggcgcggtggtttatgtttgtaattttagtattttgggaggtcgaggtgggcggattacgaggttaggagatcgagattattttggttaatatgttgaaatttcgtttttattaaaaatataaaaaaaaaaaaaaaaaaaaaaaaattagtcgggcgtggtggcgggtttttgtagttttagttatacgggaggttgaggtagtagaatggtgtgaattcgggaggtagaggttgtagtgagttaagatcgttttattgaattttagtttgggagatagagcgagatttcgattttaaaataaataaataaaaataaaataaaataaaattaggtttaggaattgttggtttggagggaagtagaattcgatttagattttagttttaatattgtttttttaggtatgtaatttgtgttttaaattatttttttaggtataaataagggatgtaaattggttttatttattttataggtttaatttgaaaatgaattgaatatttgttaataatttttaaagatttatggttttgttatataaagtatttgaattttttttttgttttttatttgtttgtggttttttttttgtttttttttttttttgtttttttttagttttttttttttttatcgaggatttttgttttttagaaattttagggtatttatttagaatttttatattagtaagaattaattcgtgttattttttttttagttttaagtttagtttttttatatttatttgggaagattaaacgttgtttttagaggtggtaatgaggtgtgatagagttgaatataattaattaagtttttataggaaattttttatttggaaagtagagttcgggaaattagatatgattgtataatatattaggttatttttagggaagtagttggattaggtaggttgggggttggttaacggagttataggataatggagagaagtaattaagttggtaaaatgttaattaaatggtatttttaaaaggtgtaaaggaaatgaatgtgtgaagttgtcgttatatggtatgtttagttatattttatagtatttttttattggttattagtttttttaagaatattttggttttttgggtatttaaaagtaattgtgatgtttaatgtaggttatttggattgggatatttaggatttaagtcgagagaagagtttttaaaggcgtggggtgggggaagtgagtataggattgttgtttagttcggtgattgattttcgtttttatttagtagttattttttatcgagttaattatattgttagtttggaaggaagggaggagtgtaattggtaaaggaggtgagtaattttgtttttaaaggaggaatttcgaatttgagtattaaaagtatttcgtagttttatttagattttagtatgggaatttatgaagagcgtagggggtgaggagatttttttttggtatggagtgagggatatatatatatatttattttttatttgtttttttaatatatatacggagatatataacggttgtttttacggagtagtttagatcgtatcgatttgttttttttttgtttcggtggcgttattttagttcgattttcgcgtgcgtttttgttcgcgttggttgtcgtatgattttgtcgttttgttttcgatattaggtttagtgttaggtttttttgtattttttgggcgttcgtttttttcgttagttttttttgggtttagtgtgttaggttttcgggttatagtatttgtttttttttaagggttttgcgggtttggtgttttttttattcgttttttatggtttcgtagacgttttttcgatgagtttgtttcggtgtgtttcgattcgtttcgattcgatcggattcgtttcgttatgttgaattgagtaaggttgtcgggtttggttcgtatagttggtttattggtttaggttttggtttatattttttgttttggagtttttagttaatggtaagcgagtacgcgggtcggttttgtttttatggtgatatattttaatttaatcggttgaatttgggttgtaaatttaattagagttttttttagttttaaattttttgtttcggggcgggcggggggagtcggagcgtatttagtattttatttcggtatttattttagttcgtagggtaggagtttttagtaagaaggtttatgcggaaatagggttagaagtagggaggagagtttttagttttttttttgtaattttattttagttgtgttaatagtaaatcgtgagagatttaaaaaggaaaaattttatattttagattgtataattttagaataaaaatgaagcgagattgtgtttgagttgttttttggataagggaagttgggtcgttttcggtaatagtgttaatttggaggatatagggtttaggagagtatatttaggtttagatcgggagaagaaaaagtttttaggtaagaatttcggggttttagatgtcgatagaaaggataaggatggatttggtgggtagggatatagataattttttgatttgcgtaatattgatttaagtaatttaggtaattagaggattttttttacgaagaaaattttgttatcggaatatacgggtattagaatataatataaatagcgtgtttttggtagaatataattattatttttgtttatatttataatttaatttttatatttaatttatatttttatattaaatttatatttaatttttaatttaaaaaattaaaaaaaaatttatatataaaggttaggcgcggtggtttacgtcggtaattttagtattttgggaggtcgaggtgggtggattatttgaggttaggtgtcggagattagtttggttaataaggtaaaattttatttgtattaaaaatataaaaaattagttgggcgtggtggtaggcgtttgtaattttagttatttgggaggttgaggtagggagaatggtttgaattcgggaggtggaggttgtagtgatttgagattatattattgtattttagtttgggtaatagagtgagtagttggtttttgagaatttattagtattttgaaaataataatgtatataaattgaaaaaaaaatttcgtttttaaataattataaatagttatttacgggatatgtatatttgtttggtattatttaattttttatatgtaggaatttaatgttgttatttttattttttgttttatgttgatttttatatagtattttttttttttatttaatatttaatttttattagagggattttttaaaattattttttgtaaagatatgttgtttttatatatatatatatttttgagatagggttttattttgtaatttaggttggagtatagtagtacgattttgttttattgtaatttttgttgtttgggtttgagttatttttttgttttagtttttcgagtagttgggattataggtgtttgttattatgtttggttaatttttgtatttttagtagagacggggttttgttatattggttaagttggttttgaatttttgattttaattgatttgtttatttcggttttttaaagtgttgagagtataggtatgagttattatatttggttagatatattgttattaaaaggaatgtagtataatttaatgttttaattgtgaattattttaagttaataggttatatagtgtttaagaaatataaaatattgttgtgttttttttgaaaattaaaaatattttataatatttttgtgagtttgtattttggtatagtttgggaattatggttttagttattttatgttattttatttttgaatttatgtagtgtaaatgaatgggttttaataaaattatttgtgtatgaatgttatttttattttttatttattcgtgtgattttaggtaagtaaaatttttattatgttttaatttttttatttgtaaaatagtaataattttagtatttttgtaaggattatatagaatattttttatatgtttaggtaaatgtttggatatataataagtatatattaaatgttggttattatgattaatttttattgttttttttttttttgttttttttagatttatttaattataaattgaattaaaataaaaattagaggtatatttagtttattaatattaatgaattttatattgtttaaaatagaaggtattagttatgtgtggttatttaaaagtaataaaattaattaagatgaaatataataaaaataatttagttatttaattatattaattatattgtaatttttcgatagttatatgtggttagtggttattatattgtatagtataattacgtttttatgttagagtatagtattgtttttattttttttagttattgttattttgtatttatataaaagaaattggaattgtgttttattatttatttttagggtaaaagagtttttgtagtatttttatagataggaattagacgattattaattttagtgtgattagagtttattaatgttttattatttttttttttatttttttattatttttatttttagagggattttttgtttaggaatatatttagtaatatatttattttttattcgtaagattaaggaaattaaaaaaaagtggtaggaataggttttaagttatttagtattgttttgtggaacgtattttatttttgtttttttaattgagattttttattttttttagattataagttaaatatgcggttttaaaaatatttatttttggttaggtatagtgttttagatttgtaattttagtattttgggaagttaagataggaggattatttgagtttaggagtttgagattagtttgagtaatatggtgaagttttatttttataaaaaatataaaaattagttaggtgtggtggtatttgtggttttagttattagggaggttgaggtaggagaattatttgagtttaggaagttaaggttgtagtgagttgtgatggagttattgtattttagtttgagtgatagagtgagattttattttaaaaaataaaataaaatatttattttttttattattataatttttggttttttattttttttaattattgaaattaaaatattttagggtttttttttgttttttttttgttgttgtttgtttgtttgtttttagatagggtttcgttttgttatttaggttggagtgtagtggtttaattttagtttattgtagttttaattttttaggtttaagcgatttttttttttttgttttttaagtagttaggattataggtacgtattatcgtattcgtttattttttatttttatttttttagagatggggtatttttatgttgtttaggttggttttaaatttttgggtttaagtgatttttttattttagttttttaaagtattgggattatgggtatgaattagtatatttagtttttttttttttgttatagggattatttttattttttttttttaagagtgagatttttatttgtgttttatttagtggtaggaagaatagagtagagataaaggattggtttattattttttattttaaagattttggtttttagaaagggaagttaggaattttttaaaggaaagagtaaagaattgaggtttaggaagagtaaggagtataagggagtaaagttttaatgtaattaacgtaaattaattttttaaaattaggttatattttatttaattttatttaattttcggtaaattatttttcgttttagttaatttattttgtatattattagaaattttttgtgtttttgaaatgtagtaagggattgtgttgtttttatataggtggtaaattattattttaggaaagaggaaaaaagaaatagggtatgtggaatatgtgaaaaaaaagaaattagattgggatattttgggttatagaagttaagtagatgttttttattttattttttggttatgtatatattgtattagttattattttgttggaaatttaaagaaaaaaatgttttgaaatttattttattatataatataatgaagtgtgtttttttaaatttttatattgacgttttaatttttattgtgattatatttggagataagttttttaaaaaggtaattaagtttaaatgaggttataatggtggggttataatttaataagattgttgtttttataagaagaagagaggttaggtagggtggtgtttatttgtaattttagtatttggatattaaagtaagaggattatttgagtttaggagttagagattaatgattagtttgggtaatatagtgagattttgtttttataaaaaattaaaatattagttaggtatggtggtatgtatttgttattttagttatttgggagattgaggtggtaggattgtttgtgtttaggagtttaaggtcgttatagattatgattgtattattgtatttttgtttgggtgatagagtgagattttgtttttaaaagtacggaaaaagaagagaaagaggaagagaaagtaaaaatgtgtgtagagaaaaggttatttatgttatagtgagaaggtggttatttgtaagttaaggagagaagttttaggagaaagtaaatttgttaatattttgattttgggtttttagattttagagttgtgagaaaataaatgtttgtcgtttatgttatttatagtgttttttatgttttagtaaattaatatattttaatagtttaattgtttttaatttaagtgagaagattttattttataggtaaaaattaggtaatatttgagatatttaatatttattagagataatattaaaatggtttatttgtaaaatataggtattaattaattagaattaatggcgttataaataa

SEQ ID NO: 1337 - DNA, 17893 bp, Artificial Sequence
  chemically treated genomic DNA (Homo sapiens)
taattaaggttaaataaagttataagggaggggttttaatttaataggattgttgaagaagaggaagagagagagaaatttttttttttgaaagtatatatttaaggaaatattatttggggatatagggagaaggtgttgtttataagttaggaagagagtttttattaggaattaaataagttttttatgttgattttgaattttttaatttttagaattgtaatagataaatttttattgtttaagttatattagtttttggtattttgtgtaatggttttagacgttattaaatgatattgattatattttattattttaaaattttagttttatttttattttttgttattgaattttaggttttaggttaggaattaggtaagtttgtaatttgttaggtaagtaggtattttttttttttttgtttatttgaaggattatttattttgaaggttgtagattagtagtagaaaaaaattttttaaaaagttttttaaaaaaattttagaaggattaaaaagttttttggtaataaaattttattggtttggtatggtggtgtatatttattatttagtattttggaggttgaggtaggaggattattttaattagggaggttaaggttgtagcgagttgtgattatgttattatattttattttgggtgatatagggagattttgttttaaaagatataagagtttgtatagattaataaatggaggtattgattaatgagagaaaagtttttttttttgatttataattaaagaaatataaattaaagtattttaattatattttatttatttttttttttgagacggagttttgttttgtcgtttaggttggagtgtaatggcgtgatttcggttattgaaatttttattttttgggtttaaataatttttttgttttagttttttgagtagttaggattataggtgtgtgttattacgtttagttaatttttttttttttttttgagacggagtttcgttttgtagttaggttgtagtgcggtggggcgatttcggtttattgtaatttttaattttttggtttaagtgattattttattttagtttttcgattagttgggattataggtatgtattattattttcggttaatttttgtatttttagtagagacggggttttattatgttggttaggatggtttcgattttttgattttatgatttatttattttagttttttaaagtgttgagattataggtgtgagttattacgtttagtttaattttttgttgtttagattgtagtgtaatggcgtaattttagttttttgtaattttcgttttttaggtttaagagatttttttgttttagttttttgagtagttggaattataggtatttattattatgtttggttaattttttgtatttttagtagagatggagttttattatgttggttaggttggttttgaatttttgattttaggtgatttatttgtttcggtttttagagtgttggaattgtaggtatgaattatcgcgtttggttaatttttgtatttttaattgagacggagttttagtatgttggttaggttggtttcgaatttttgattttaggtgatttatttgtttcggttttttaaattgttgaaataataggcgtgagttatcgtgtttagttttaatattttttaaaataagaaataaaataaataaaattatagattgtatttaggtatttttatatattgttggttgtaatttttttggagggtaatttgataataattaaaatttaaatatttattttttttgatttaataatataaaagtatttttaatagttttatttgcgtatgattgtaaagatttatatttaagaatgggttaggagtggtggtttacgtttgtaattttagtattttaggaggttgaggtaggtagattgtttgagtttagtagtttaagattaatttgggtaatatggtgaaatttcgtttttataaaaaatataaaaattagttaggagtggtggtgtataggtgggaggatcgtttgagtttaggaggtagaggttgtagcgagttatgattatgttattgtacgttagatttggtaatagagtgagattttgttttagaaaaaaatatttttaaaagatataaggatgtttattgtattatttttagtaataagtgataagttaaatgtttaagaagagattgattaaataagttatatagtggattaaaaattattaacgtaagtatttttagtttttttttattatttgttagttatagataatttagttttgggttaatttttttttttttttttataagggaaatgtttaaaagtgtttagattttggtgatgtagtatgattgggaaagtagagggtatagaaagatgttaggttttgtggtttttaggtaagtttaggaatgtgataaagtatatcgaaaagaaaagcgggttgggagtagtggtttacgtttgtaattttagcgttttaggagtttgaggttggtggattgttggaggttaagagttaaagattagttaggttaatatggtgaaattttatttttaatgaaatttaaaaaaaaattagttgggcgtggtagcgtatatttgtaattttagttattcgggaagttgaggtatgagaatttttggagtcggggatgtggaggttgtagtgagttgagattatgttattgtattttagtttgggagatagagtaagattttgttttaaaaaagaaaaaaggaaaaggaaagataaatttataatgtattgttaggattatataaattttttatatgtattaggaatgtaagtagaggaattgagttattttgaaatatttgttggttggtgatttatattttattgatttagatattgttttgagtatggttttagaagtgttatatacgtataataaaattttttatagttattaaaaggagtgaggtaggaaagtatattgttaaaagtaaagaagttagatgagaattgtgtattgtatatttttatttgtttaaaacgtttgtatattatatttatatatgtatgttttttattatatagaagttttttggaaggtatttttgtatatttataaagatgtatatttaataattttatttttttttattttttatttattgttttgaggttaatattgaatagtttttatgaagatggtattgaatatttttttaataaaaaagttttcggattttaattattggagtttagaaaacgatattttaaagtaggaggttttggtatgttaagtattttgaattaaaggagattaggttttagtagtagttttagaaataaagtttatttatgatttttttttgtttttttgtttttagcggttttgtatttttgaagtaagttataggaattagaattttttttttttaaggagggttatggaaatttagaatttttaaagtaatttataaatttggaaattttattgtaatatttttttttatttttttttgtttttgagatagggttttgttttattatttaggttggagtgtagtagtatgattatagataattgtagttttttgggtttaagtaatttttttgttttagtttttttagtagttgagattataggtgtgtgttattatgtttagttaatttaaaaaaaattttttttttgtatagagggagttttgttatattgttttggttgagaatttatatttttaataagttttaaggagatgtttttgttgttggtttggggatggtcgtttgaggatttttgtatgaaggtatatataggatttgatttttagtgggggtattaggagttggagtttggggagtgggaagcgagagtatagagttgattgaggattacgaggtcgtcgtggaggatttaggttgaaggttttgaagaaatttttatagttttattgttaggttagttaggtggatattttagggttgaggaggtgagaaggtaagatagaaagtgaaatagtattttataggatagggatgggaaggttatttgtattatgggattttttggggaggggttcggttattgttttagatgaaggtttagtttttttatcgtaaatttgtttttattgttgggaaagagatttttatttttatttttttaattttaaaatggaaatgatagatgtttttgagtggtttgaatatttgaaatttgagggaaaacgttattagaaatatatataattagagttaaagataaatatatatattaaacgtatggtttaaaaatgataacgcgttttttttatttgtttttacgtagaatttaaaatagattttggtttttatttcggggttttttcgcgtttacgggttgcgttgcgtagttgggttagtaggtggcgaggttttcgtattttttttttcgggtttggtcgtatcgttatcgtttatttcgcgtttcgtttcgtttcgtttcgtcgtattcgcggatcgttatacggttaggttatcgcgcgttatcgtttcgggttttgttagaaagtgtcggggtttagattttttttaggtgattgggttgggaggagaagtcgtttagcgtaattgtcggagtcgaaataaatagagatttcgcggtcgggcgggattttattcggaagttttttagaatagtattatttttcgttgaaatttcgttcgttttttttaatttagagacgaaaagggaaagtattacggttagaaatcgttggtataattttatagatattttttcgggtcgagttagattttataagtttcgcgtttggttttcggggattgtaggggttgaggagaagggtaatacggggattttgaagcggggtcgcggcggcgttttagttcgggttagggagtttcggtagcggtattttttagaaagggcggagtcgacgacgttttttttttttttgatcggcgcgcgtagtttgttgtcgcggttagcgtttgtttttgttttttcgttttttttgcgcggggtgttgaaatagttcggggaagtagagtcgttttcggggagtttaattagtcgaacgtcgtcggcgttagtagttttgcgcggttatagtatgatcgttcgcggtttggtttttggtttttttttgttgttattgtgtttagcgtaggtgagcggtcgtcggttatcgggacgttttgtggggacgtggcggggtcgagagtcggggaaggcgacgggtttagcgacggtttaggttcgggttttggggaagttggtttggcgatggagagttcggaggttttttatttgttttgtttttgttttcggttacgtttttttttttgtggtttggaagagggtggtagtgggggtttgggtgatttgttttgagtttgttttatttgtggttatttaatttttttgtgtaggatgtggtattagaagaagggaggaaagtgggtagagtgggatagggatattatttgttttttaaaaaattttgttatatgcgtacgaattttaaaatttaggagttttaattattttattttttttttttattatttgaggatggaggtggaagtagaggtaaagagatataaatttttttaagtattcggtgaaattgttttgagtatttgatataagttagtttggttttttaaagagggtaggttattttttattaatttttttttatattttaggatattgagatttatagggcggtattgaatttttttttgttattattagttagcgataggatggggtttggaattcggtgttttgttgattttttttgggggtttttgtttggtttaatagttttgggaaagagtattttagtatttgtgtgtttgtagtttttttttttaaaattggagtggggtagtgttacgttgtgattcgttaaattaaattaggatgagagtgttttcggggaattgtgtttttgtgtatattaacgttttttatataggtgtggcgttaataggaagtggtgaattaggggagagggggtttcgtggattagaaaaaattttttttcgatttttatttagtttttagaaggggataggtgatgttgatttaataatggattaagagttaggagaagggtttcgcgggaggattttttgagtttagtagtttaagattagtcggggtaatatggtgaaatatcgttttaaaaatattttgtttttttttttattgttgaggttgaggttgttgtgagttgtgattacgtcggtgtattttagtttgggtaatagagtaagattttgtgttaaaataaaaaagagagagaaataaataatagtaattatgtgtcgtagagaaaatgtggttattttgtttttttagagttttttaaaatttatttttaaaatttatttattttagagataggtttttgttttgttgtttaggcgtgggggtagtgtcgttattatagtttattgtagtttggaatttttggttttaagtagtttttttattttggttttttaaagtattgggattattgtgagtattatttttggttttttttagagttttagattaggattttaaataggttttttttttttttggagatagagtttttgttgtttagtttggagtgtagtggcgtaatttcggtttattgtaatttttgttttttggatttaagtaattttggtgttttagttttttaggtagttaggattataggtgtttattattacgtttagttaatttttgtatttttcgtggagatggggttttatcgtgttggttaggttggtttcgaaattttgatttttagcgattcgttttttttttttggggattataggtgtgagttatttcgtttagttaggttttatattattaagtagttattttttaagtattttttaaattttaagtatttaaggttgatggttaatgagtgttttttttatgatatttgggataggttagaggtttgttgtaagttttttgtaaaaatgtttggaggtttttttaaggtttgtaaattttaattggaaataattttattattattttaaaaattttttatgtttgaaagtttttagtgtatttgaatagattggggtggagttatgaagttaaatagattgggagagagagtgtgtttgtttttagaattcgtatcgatgatagtagtttattagttttagtttgagcgttagtagagttttattatggaattatggattagttgttttgtgtaagatttgaaatatatgttggggggatttttgtttttttttaatgtttaatatgtatagatgatgtaataatattattagattgttttgtttttaaaattttgtagttatttaaaaattatatgtagttttgagatatagtttttatttttttcggttgtaattttggtaagttttattttgagggatttggaatatagagaagtttgggtagaaattaagtattaaaatggtttttttttagaagattgggaatggttaattttttgatttgtgagtgattaagaataattatttgaaattggaatgattgtgggaaatttttttttattttttttattttttgattgatgttgtgattagaaattttattaatataagtaattaaggggaaaatgagatttttttaaatttgagttagtgggtagagggaaaaggattcgttgaataggtttttgtatttttttagtgtttgttatattatttagaataaagaattattttggttatgaagatagtgtgtttttttttttttgggtaattttttatttttaaaagggatgtagtattttaagtatggtagattatttatagcggaagtttggattagttatttttgatttcgggtgtttttttttgttttttgatttttagttttgtgaagggtattagttttttagttaaattgaattgtttgttagtaaaattttgtttattttttagggttttattttatatgttatattatttacgatatttttgttttgtttttttaattagaatgttttttttttgaagttttgaatttttatttaaattgttgtaatagtatttgttgttttattaaaagattttggtgtgggttttgatttttttttgtttttaagagtgattttgggtaagttagttattttttggagttttagtttttttttttgtaaaattggattaattgtgttaattatgtttgtgaaagataaatattttttaattgaattatcgaattgtaggttttttaagagtaataattgttgttttttaatattatttataaatgtggttaggatatttgatttgggatttttttttttttttttttttttgaaatagggttttgtattgttttttaggttgaagtgtagtggtttgattgtggtttattgaagtgttgattttgggtttaagttatttttttattttagttttttacgtagttgggattgtaggtgtatgttattatgtttaattaatttttaaattttttgtagatataaggttttgttgtgttgtttaaggtggttttgaatttttgggttggagatttttttattttggttttttaaagtgttgggattataagtatgagttatcgtgttggttttggaattttttttttttttttttaagattaggttttattttggttgtttaggttggagcgtagtggtacgattttggtttattatagtttcgatttttcgggtttaggtgatttttttatattaagtttttcgagtagttgggattataggtgtgtattattatgttttgttaattttttgtatttttagtagagaaggggttttgttagtttgtttaggttggtttcgaatttttgagtttaagtgatattatttattttcgttttttaaagtgttgggattataggtgtgagttattatgtttggtttattgggattttttgattataagatatttgggttttgaaatggattttggggagagatttagaaattagtggtaattaaaattggatttgtagttggtttttaggtgatggtagtgattagttgcggttagttaggtttttttttatttggattgtgttttttatttttaaatttttggaatatttgttttggtagtaaaatttttaaaaaattaattttttttggtgtaggtgttttgttggaggatttgagagaagttttaaaattttattttattattgttttttgtttaggttataagaggagtttaaaataattttataaatatgaattggtttttttagatataataaaggataagattaaaagaattaatttatttaaaaaaattagtttaggttggttttaaggtagtgtgttattaattgattaaagttagttatagatcgaattttttgatttattttttttttttgtttattattgtatttgattagtttaaaataataagtaagtagtaaaaaaaagaaaaaaagttcgtttatatattgtaaagtgttgtgtaaatgtttataattattattattgttttttttatagttgatggggggaaggttggatatataaaaaaatggtaatatagtaagaagtgtttagataagaataaagataaaatgttatggagagtttatttttgagttgagttatggaggatgaattaatgtattaggtggataagaggaaaattagagaaaatagtcgggagagttgtttaattgttgttttaaattattgaattgtttatttgaaaagggtgaattttatggtatgtaaattatatgagtaaagtttttaaaaaaatttgtagggtgttatatattagattatataagattagagataaaagttatttaaattttgtatagtattttattgttattatattcgattttgttttatttttatagagtttttttaaggtaggtgtaatgttgttttttttattttatagatgtagatattaagggttaaatttgttttaaggttatatagttagtagatggtatattgggtgttttaattgttattttttgatttttgtgttttagttttttgaaatttaaggttagattattggtgtttagtaagtttaattgaatgggtgtttagtagatattttatttggttagtagagtagttttatttaaggtttggtttcgtttttagtgtggtttttttagtagttcgtaatagattaggaatgggtttagtttgttggtttgatttttgatttagttattatattgtgaatattttatagggaaaaaattgtagatagtgtatattggtatttatttttatagttttgttttagttttgtggtttttaaatgtttaagattaattagtaatatgattttgggtgagttatataaaaaattagaagttaaaggggttatttgtaaaacgaagagttggattagttgagtatatttagtatttaaaatatatgatttaaatatttatatgtaggtaggtttggtgtatatataaattattttttgttatgtagatacgtttatgttaggttggttataaaatatttttagagattttcgttaatagaagttagattagttcggtagtttttattttaaatgttttgttatatttgtttggtttgtttttttgattttaaagaagtagtaggtagtttaatttttggataggattttttatgttattttttttattttagtttgtgttgttttgattggttaggttagtttttgttttttggagaagtaatgaggtagggaagttaattagtaagttttttttttttatcgttttattggagtttgagttgggtatttttttatgttttgttattagttttatttatttaggataggggtataagtgttggtgttaagttttgtatttttagttttggtggatggttaagttttattttggggttgaggattgttagtgatattgagtaagggagttattgtttgataattgtttagagagatattttaaaagataggaatgggaggtattatttttataagtgaataagtttatattgaaggaatatttgtataggattattatggatgggatagtttatttttagtgtattttttaattttgaggatatattattgtataaattggattagagtttaaatggtatagaagttgggggtaggggaggtaggaggataagggggatgggtggagaatgtttaatttggtgtttaaaattatgttatttatgagttatgtgattttagagtatttttgagtttgagtttatttatttgtaaaattttgttgtgttattgtatagagtatttgagaaaatgaggtatgtagtcgatgtttggtatttttgttttatttatttattttattgttatgtttcgagaataatagatgtttagtaagtatttgaatatgttagttaatgttttaggattttttaaaggtagtggaatagaatttttattgagtttagagtttttttgataataatgtgtgtttatggagtttttgaatggggtttaatttagtagttgttatagttgttgagatatagtataaggggtattttttttttttttagatggagtttttttttgttatttaggttggagtgtagcggtgcgattttagtttattgtaattttcgtttttcgggtttacgttatttttttgttttagtttgtagttgggattataggtatttgttattatgttcggttaattttttgtatttttagtagagacggggttttattgtgttaggtaggatggtttcgattttttgatttcgtgatttgtttatttcggttttttaaagtgttgggattataggtatgagttattgtatttggtttagaaggggtttttttttaattttttttgaattgtttttatcgttgaaagaagtttttttatttagttatttttttagtaattaaattttagagtatgttgtgaaatatttatatgatttaatttttaaaaatagaaattttttagttgtgtaattattaaattttgggtagaagttaaaataattagtattttttatttttgaatttagataatttagttgtatttttttagtttattgtgagttttgataagttttgtatttatgaatattagatgtaatataatagggaattttaaaggaaggattatatatttaggttttgttttttaggattttatcgttttataagggagttgagataaaagtgagaaaatattttggtaattttttttaatattataattttgtaatttttataaattttgtttgattttagggtatgattaaggtagaggtaggtaggttttattttatgtgggagagaaggaaggaagggtaggtagttagagtgataggtttggaatattgtagaaaggagagtgggtagagttagagtgaggtgtttgaagtttgtcgtataggtagtgggaagggtgggttggaggtttttgagtattagaaaattttgagtattgtttcggaagaggtaagcggtaggtatttgtattagagatattgtcgggttcgagtgagggtaggaggttgtacgagggagtttttttgggagtgagcgataggttcgttatgggaggtgggttcgaaaggtgtttgagatttttatttgaaattttgttgaagaggaattggtaatagaggaggaaatataaatagaggaaagattggtttcgttttaagtattgaggttgttgggtagttagtggaaagtgttgttggagagaagttggagattattgaagttgagagaggggtttgtggatataattagagtagtgtttttagggaggtgtaggtgaagggattgagagagagatgaggttaaaaatatagaagagaaagagatggaggtgtggaggtttttgaggtggagtagttgtagaggtaggtttgggggttaggaggttggttttttatttttagttgttggtgagaagggagtgaaggttgagtagtttttattgtgtagttgttgagtgtataggtgttcgtgtttttgtatacggtggggtttggggagggtgtgatgttatagggaggatttttatgatgtagttgatttttttttattgagagtttgtttttggagttatttgttttgttttgaattttggttttgttattgtgattttggataagttgtttagttttagtgttttcgtttttgtatttgtaaaaggggtataataacgttttttttattaaattgttgtaggattaattgggttaatatattgagaggtgatagcgtgttggtagtttttagagtttttgtttgttttcggtattttttttgtttgggtttttattttggtggtatttgaggagttttttagttttttattgtattgtgggagtttttttttgggttggttaaggtcggagtttatttttttagtttgtagggaggtgtggagggagagatacgagtaggaatcggggttgtgtgcggtatttgcgggttagttggagtttcgggtgggcgtgggtttggtgggttttatattcggagtagttagttagttttgttggtttcgggtaatgggggatttagtattcgggttagtggttgtagagggtgtattgggtttttttagtagtgtcggtttatcggcgttgcgttcgatttttcgttgggttttggttgtttttttacggggtagggttcgggatttgtagttcgttatgttagagttttttatttttttcgtggttttttgtgtagtttgagttttttcgacgagcgttattttttgttttacggcgtttagttttatcgattatttaagggttgaggaatgtaggcgtacggcgtaggattggtaggtagttttatttgtagtttcggtgcgggatttattaggtgaagttagttgggtttttgagtttggtggggacgtggagagtttttatatttagtttagggattgtaaatatattaattagtattttgtgtttagtttaaggtttgtgagtgtattaattaatattttgtatttagttgttttggtgaggacgtggagaatttttatgtttagtttaaggattgtaaatatattaattagtattttgtgtttagtttaaggtttgtgagtgtattaatcgatattttagttgttttggtgaggacgtggagaatttttatgtttagtttaaggattgtaaatatattaatcggtattttgtatttagtttaaggtttgtaaatatattaattagtattttgtgtttagtttaaggtttgtgagtgtattagtcgatattttgtatttagttgttttggtggggttttggagaatttgtgtgtggaaattttgtatttaattaatttgatggggacgtggagaatttttgtatttagtttagggattataaacgtattaattagtattttgataaaataggttattcggttttattaattagtaggatgtgggtggggttagataaaagaataaaagtaggttgtttaagttagtattagtaattcgttcgggtttttttttatgttgtggaagcgttgttttttcgttttttgtaataaattttgttattgtttattttttgggtttatattgtttttatgagttgtaatatttatcgcgaagatttgtagttttatttttgagtttagcgagattacgagtttattgggaggaacgaataattttagacgcgttgttttaagagttgtaatatttatcgcgaaggtttgtagttttatttttgagttagcgagattacgaatttattagaaggaagaaatttcgaaaatatttgaatattagaagggatagattttagacgcgttattttaagagttgtaacgtttatcgttagggttcgcggttttatttttgaagttagtgagattaagaatttattaatttcggatataatgtgaagagtatttaaaatagtgtttaagtttaggatatcgttagtgttttgtaagtttttgggttttgttggtttaggttgtttttttcggtaggatgattttttttttgagattagtttttattttgttgtttaggttggagtgtagaggtgttattttagtttattgtagttttaattttttgggtttaagttgatttttttagtttagttttcggagtagttgggattatgggtatgtgttattaggttcggttaatttttggttgttgttgtttttgtttgttttgtttttttgtttgttttttgagatagtttagtttttgttgtttaggttggagtgtaatggtataattttggtttattataattttcgtttttcgggtttaagtaatttttttgttttagttttttaagtagttgggattataggtatgtattttttatatttggttaattttgtatttttagtagagatagggtttttttatgtcggttaggttggtttcgaatttttgattttaggtgatttatttgttttagttttttaaagtgttgggattataggtgtgagttatcgtgttcggtttgttgttgttgttgtttttaagagatagggttttattgtgttgtttaggttggttttaaatttttgggtttaagcgatttatttgttttggttttttaaagtgttgggattataggcgtgagttattatttttagttaggatgattttttttttttttttttttttttttttggttttttttgttgtgtttttagaagatgattttttgagaagtaaatttgaatgttgatttaagtttaaattttttgggtttaggtgttaattttttaagtttttggaatttttttgtcgaggttttaagtaggtagaagatattaataataattttttatatttgattgcgtggtgttttgtagtttattgagtatttattatatatgtatagataggtttttatttgatttttataggaatttgtgaggtaggtagagtttatgagttttattttttaggtaggaaaatttttacgtggttacgtaatttgttttaggtgtgattttaggtgtaatttagtttaataagtatattgagttttaggagtttttgggattagaatttaggattcgattttatttcgtgtcgtttttttatttattttttttttattaagtgggtggaaatagtatttgttttgaaataagtaacgaatgatttttgtgaaaaggaatttaaatagtagtgggttatttttatttatatttatagtattaagtgttgagtaaggggattttagattttagatattcgttttgtttgttaggttagagttgtagtgtgttgattgtatatttgttttttgttatttttgtttttgtgggtaattagttagagtgtttttgaggtagagataggttaatttttggagagttttgcgaggtttagggaagagttttttgtatttaaaattttatgtgaattttattttttttttttgtttttgtagttagtttttgtttttttaaattttagttagatggataatgatttttatttattaggatttttttttattagttggaaatttagagttgtaatacgttttttttttttttagaattatcgggtttatgggaataataattgggattttttttatataaaaatagtggtggaattttggtatagggtttatatgtggttttgttgaaggtttgttgttatttttttatttgtataattttttttttttgtggtttaaatatgatttttaaagagttaagaggagttaagttttaatttttattttagaatatttgaaaaatgaatttagagaaaagtgatattgatgttttggatttttttatatatataaattttaattttttgttgatttttttttatgtttttgggttttagggattgttgtgggatttgtattttgatattgaaggattaatatagattgatttagttttttgtttgtgtgtaggttatgtgttattgttattggagagaattttatgttgtgatttttgtttagatttgttttttttttatggtttttttattagggtttttgggagttatggttgttttttgatattttttgtttttttgtagaatagacgattgtaggttcggggttttggtaagttgggttttttgtggttttttgagtttattgtgaggtagaggattaggtgcgttttgggtagtagtttttagagtaaggtattgatttgatgatttatattgatttttttttttcgttgaattttttgataattttgtgatttttatatgggaaatgtgagtggtttttgagaaatttttatataagaggttttaaaatttttttttgagattgtttcggtgtttttttttaaagttagtatattttttgttttttattttagttttaaggataggaagtttattttcgttttttatattggggtgttgatgtttgtggttttgttgttttgttttttatgttatttatgatgtattgatattaattaatttaaatatatatggaaatatttttttattatttagagtttatatagtttttggtgtagatgtgtaaaaatagtgttttagtaattgttaagttattattttgtttttttttttattgtgattgagtattttttatatggaattatagtttttttttattaataaataagtaggaaatagaaattatgtaaataagtaatttttattatttattttattgatttgataaataggtatttggtttgttttaattaatattttttaaaatgttaagtgtttgttgttgttatttaattttgtaggtagtattggaagtttttgtgattgtatttgagtgggtattttttgttgaaatttattattgagattttggtaatattgaagtttgtgttgattttttgtagg

SEQ ID NO: 1338 - DNA, 17893 bp, Artificial Sequence
  chemically treated genomic DNA (Homo sapiens)
tttatagaaagttaatataaattttagtgttattagggttttaatggtaaattttaataagaagtgtttatttaagtataattatagaaatttttaatgttatttgtaaaattaagtaatagtaataggtatttaatattttgaaaaatattaattaaagtagattaaatgtttatttgttaagttagtgaagtaggtaatggaaattgtttatttatataatttttattttttgtttatttgttgataagaggaagttatagttttatgtaagaaatatttaattatagtagagagaaaagtaagatagtgatttagtaattattaaagtattatttttgtatatttgtattaggaattatataagttttaagtaatgaaagaatatttttatatgtatttaggttaattaatattaatatattatgagtaatatgaagaataaaataataaaattataaatattaatattttaatgtaaagagcgagaatgaattttttgtttttgaggttgaagtagaaagtaaagaatgtgttaattttaaggaaaaatatcgaggtaattttaaaagaaaattttaaaattttttatgtaaagattttttaaaaattatttatattttttatgtgagagttataaggttgttagaaaatttagcggaggggaggggttagtgtgaattattaggttagtgttttgttttgaaggttgttgtttaaaacgtatttgattttttgttttataatggatttagaaagttatagagggtttagtttgttagggtttcgggtttgtaatcgtttgttttatagggaaatagaagatattaagaagtagttatggtttttaagaattttgatgggaaagttataaaaaaaaaataaatttgaatagaagttataatatgaaattttttttagtgatagtggtatatgatttgtatataggtaagaagttaagttagtttgtgttggttttttagtattaaaatataaattttataatagtttttgaagtttaaaaatatgagaaaaagttagtaggagattgggatttgtatgtgtggggaaatttaaggtattaatattatttttttttgaatttattttttagatgttttaaaataaaaattaggatttaattttttttgattttttgaaagttatgtttaggttataaaggagggaaattatataaataaggaagtgataataagtttttaataaagttatatatgaattttgtgttaagattttattattatttttatataaagagaattttaattgttatttttataaattcggtgattttaaggaaaaaagaaacgtattgtaattttgggtttttaattaatggaaaaaagttttaatgagtaaaagttattatttatttaattaaagtttgaaaaggtaaaagttgattatagaggtagaggaaaaaaatgaagtttatatgaaattttaaatataaagaatttttttttagatttcgtagaattttttagggattggtttgtttttgttttaggggtattttggttggttatttataggagtaggagtgataagagatagatgtgtagttaatatattgtagttttggtttgataaataggacgggtgtttggagtttaaaatttttttatttagtatttggtattatagatgtgaataaagatggtttattgttgtttaggtttttttttataaagattattcgttatttattttaaagtaagtgttatttttatttatttggtggaagaggggtgggtgagaaggcggtacggagtgggatcgagttttgggttttgattttaagagtttttgaggtttagtgtgtttgttgagttggattgtatttgggattatatttggagtaggttacgtaattacgtaggagtttttttatttgggaaatgaagtttataagttttgtttattttataggtttttgtgaagattaaataagggtttatttgtatatatatagtaagtatttagtaaattatagagtattacgtaattaaatataaggaattattattaatgttttttatttgtttgagatttcggtaaagaggttttaaagatttaaaaaattaatatttgagtttaggaaatttgggtttgaattaatatttaggtttgttttttaaaaggttattttttagagatatagtagagaagattaaaaaaaaaaaaaaaaaaaaaaaaaaagttattttggttggaagtggtggtttacgtttataattttagtattttgggaagttaaggtaggtgggtcgtttgagtttaggagtttgagattagtttgggtaatatagtgaaattttgttttttaaaaataataataataataggtcgggtacggtggtttatatttgtaattttagtattttgggaggttgaggtaggtgaattatttgaggttaggagttcgagattagtttgatcgatatggagaaattttgtttttattgaaaatataaaattagttaggtgtggggggtgtatgtttgtaattttagttatttaggaggttgaggtaagagaattgtttgaattcgagaggcggaggttgtggtgagttaagattgtgttattatattttagtttgggtaataagagttaaattgttttaaaaaataaataaaaaaataaaataaataaaaataataatagttaaaaattagtcgagtttagtggtatatgtttatagttttagttatttcggaggttgagttgggaagattagtttgaatttaggaggttgaggttgtagtgagttgagatagtatttttgtattttagtttggataataaagtgaaaattggttttaaaaaaaaagttattttgtcgaaagaagtaatttaagttagtaggatttaaagatttataaagtattggcggtgttttaggtttaggtattattttaaatgttttttatattgtgttcggaattggtgggtttttggttttattgattttaagaatgaagtcgcggattttggcggtgagcgttatagtttttaaggtggcgcgtttggaatttgttttttttgatgtttagatgttttcggagttttttttttttggtgggttcgtgatttcgttggtttaggagtgaagttgtagattttcgcggtgagtgttatagtttttaaggtagcgcgtttggagttgttcgttttttttagtgggttcgtggtttcgttgggtttaggagtgaagttgtagattttcgcggtgagtgttatagtttataaaagtagtgtggatttaaagagtgagtagtagtaagatttattgtaaagagcgaaagaataacgtttttatagtatggaagaggattcgggcgggttgttaatgttggtttgggtagtttgtttttatttttttatttggttttatttatattttgttgattggtagagtcgagtggtttgttttgttagggtgttgattggtgcgtttataatttttgagttagatataaaggttttttacgtttttattagattagttagatatagagtttttatatataggttttttaaggttttattagagtagttagatatagagtgtcgattggtgtatttataaattttgagttaaatatagggtgttgattggtgtgtttataaattttgagttagatatagagtgtcgattggtgtatttataatttttgagttagatataaaggttttttacgtttttattagagtagttagagtgtcgattggtgtatttataaattttgagttaaatatagggtgttgattggtgtatttataatttttgagttagatataaaggttttttacgtttttattagagtagttagatatagagtgttgattggtgtatttataaattttgagttaaatatagggtgttgattggtgtatttataatttttgagttagatataaagattttttacgtttttattagatttagaagtttagttggttttatttagtggatttcgtatcggggttgtaggtggagttgtttgttagttttgcgtcgtgcgtttgtattttttagtttttgggtggtcgatgggattgggcgtcgtggagtagggggtggcgttcgtcggggaggtttaggttgtataggaggttacggagggggtgggaggttttggtatggcgggttgtaggtttcgagttttgtttcgtgggaaggtagttaaggtttagcgagaaatcgagcgtagcgtcggtgggtcggtattgttggggggatttagtatattttttgtagttattggttcgggtgttaagttttttattgttcggggttagtagggttggttggttgtttcgagtgtggggtttattaagtttacgtttattcggaattttagttggttcgtaagtgtcgtatatagtttcggtttttgttcgtgtttttttttttatatttttttgtaagttgagggagtgggtttcggttttggttagtttagaaaggggtttttatagtgtagtgggggattgaagggttttttaaatgttattaaagtgggagtttaggtaggggaggtgtcgagagtaagtaagggttttgaggattgttagtacgttgttattttttaatatgttaatttaattaattttataatagtttgatgagggaggcgttattatattttttttatagatgtagaaacgaaggtattgaggttaaataatttgtttaaggttatagtggtaaagttaggatttaaaatagagtaggtgattttagaaatagatttttaataaaagagaattagttgtattatgaaagttttttttgtagtattatattttttttaaattttatcgtgtgtaagagtacgagtatttgtgtatttaatagttgtataatgggagttgtttagtttttattttttttttattaatagttgaaagtggagagttagttttttggtttttaggtttgtttttgtagttgttttattttaggggtttttatatttttattttttttttttttgtgtttttaattttattttttttttagtttttttatttgtatttttttagaaatattgttttaattatatttataaattttttttttagttttagtgatttttagtttttttttagtagtattttttattagttgtttaatagttttagtgtttaagacgaaattaattttttttttatttgtatttttttttttattgttaatttttttttaatagagttttaaatgaaaattttaggtatttttcgaatttattttttatagcgaatttatcgtttatttttagggaggttttttcgtgtagttttttgtttttattcggattcggtagtgtttttggtgtagatgtttgtcgtttgtttttttcggaataatgtttaaagttttttggtgtttagaaatttttaatttattttttttattgtttgtgcgataagttttagatattttattttggttttgtttatttttttttttatagtattttaaatttattattttaattgtttattttttttttttttttttttatatgaagtaggatttgtttgtttttgttttggttatgttttaggattaagtaaaatttatgagaattgtaaagttgtgatgttgggagaagttgttagagtatttttttatttttgttttaatttttttgtaagacggtaaaattttagagggtagagtttaggtgtgtaattttttttttgaaattttttattgtattatatttggtgtttatggatgtagaatttgttaaaatttataatgagttgagggagtataattggattatttaagtttagaaatgagaagtgttgattgttttggtttttatttagaatttagtagttatatagttaaagagtttttatttttaaaggttagattatatggatattttataatatgttttagagtttaattattaagaaaatgattggatagggaagttttttttaacgataggaatagtttaggaaaggttaaaaaaaagttttttttaggttaggtgtagtggtttatgtttgtaattttagtattttgggaggtcgaggtgggtagattacgaggttaggagatcgagattattttgtttaatatagtgaaatttcgtttttattaaaaatataaaaaattagtcgggtatggtggtaggtgtttgtagttttagttataggttgagataggagaatggcgtgaattcgggaggcggaggttgtagtaagttgagatcgtatcgttgtattttagtttgggtaatagagagagattttatttaaaaaaaaaaaaaatgttttttgtgttatattttagtaattatagtaattgttaaattggattttatttaggagttttataagtatatattattattagaaaagttttgaatttagtgagaattttattttattgtttttaggaaattttaaagtattaattaatatatttaaatatttattgaatatttattgttttcgaggtatggtagtaaaataaataaatgaaataaaaatattaaatatcgattgtatgttttatttttttagatattttatgtagtagtatagtagaattttataggtaagtgaatttaggtttaaagatattttgaggttatatggtttataaataatatgattttgaatattaagttaagtattttttatttattttttttgtttttttgttttttttatttttagtttttgtattatttaaattttagtttagtttgtgtagtgatgtatttttagaattggagaatgtattggagatgaattgttttatttatgatgattttatataagtgtttttttaatataaatttgtttatttgtagaaataatgttttttatttttattttttaaagtatttttttaggtagttgttaagtaatgatttttttatttagtattattgatagtttttaattttagggtaggatttggttatttattagagttgggagtgtagggtttggtattaatatttgtgtttttgttttggatgggtaaagttaatggtaaaatatggagagatatttagtttaagttttagtgaggcgatggaggagaggggtttgttggttaatttttttattttattgtttttttagagagtagaggttggtttggttagttaggataatataggttggagtggagggagtggtatgaagaattttgtttagagattaagttgtttgttgtttttttggagttagggaggtagattaaataaatatggtagggtatttagggtggaggttgtcgggttggtttgatttttattgacggaaatttttggaagtgttttatagttaatttggtatgaacgtatttatataataaaggataatttgtgtgtgtattaggtttgtttgtatgtgggtgtttaagttatatattttgagtgttaggtgtgtttagttagtttaatttttcgttttatagataatttttttagtttttggttttttatgtgatttatttaaggttatattattagttagttttagatatttaggagttataaaattaaaataaaattatgaaagtgggtgttagtatatattgtttgtagttttttttttatggaatgtttatagtgtggtgattgaattaggggttaggttagtaggttaaatttatttttgatttattacggattattggaagagttatattggggacggaattaggttttgaatgagattgttttattaattaagtggaatatttgttgaatatttatttaattaagtttgttaaatattaataatttagttttgaattttaaaaaattagggtatagaagttagaagatggtagttgaagtatttaatgtgttatttattagttatgtgattttgggataaatttgatttttgatgtttgtatttataaaataggaaaaatagtattatatttattttaaaggggttttgtgaggataaaataagatcggatgtgatagtaatggagtattatgtaaaatttgggtagtttttgtttttagttttatgtaatttagtatatagtattttgtaaatttttttaagagttttatttatgtaatttatatattataaaatttattttttttaagtgaatagtttaatagtttagggtaataattaggtaattttttcgattattttttttagttttttttttgtttatttgatatattaatttattttttatagtttagtttaaaaatggattttttataatattttatttttatttttatttgagtattttttattgtattattatttttttatgtatttagttttttttttattaattatgaagaagatagtgatagtaattatgaatatttatatagtattttatagtgtatagacggatttttttttttttttttattatttatttattgttttggattagttaagtgtagtagtgagtaggaggaaagagtagattaaggagttcgatttgtaattgattttgattaattgataatatattattttaggattagtttagattgatttttttaaatgggttaatttttttgattttattttttgttgtgtttagggaagttaatttatgtttatgaaattattttgagttttttttgtgatttaagtaagggatagtaataagataaaattttaaagttttttttaaattttttaatagaatatttgtattagagagagttggttttttaaaagttttgttgttaaagtaaatgttttaaaaatttgaaagtgagaggtatagtttagatgaagaaaaatttggttggtcgtagttgattattgttattatttagaaattaattgtaaatttaattttgattgttattagtttttaagtttttttttaaaatttattttaaggtttaaatattttatgattaaagaattttagtgggttaggtatggtggtttatatttgtaattttagtattttgggaggcggaggtggatggtattatttgagtttaggagttcgagattagtttgggtaagttggtaaaattttttttttattaaaaatataaaaaattagtagggtatgatggtgtatatttatagttttagttattcgggaggtttgatgtgggagaattatttgagttcgggaggtcgaggttgtagtgagttaagatcgtgttattgcgttttagtttgggtaattaaagtaagatttggttttgaaaaaaaaaaaaaaagattttagggttagtacggtggtttatgtttgtaattttagtattttgggaggttaaggtgggaggatttttagtttaggaatttaagattattttgggtaatatagtaagattttgtgtttataaaaaatttaaaaattagttgggtatggtggtatgtatttgtagttttagttacgtgggaggttgaggtggaaggatagtttgagtttagggttaatattttagtgagttataattaaattattatattttagtttgggggatagtgtaagattttgttttaaaaaaaaaaaaaaaaaaaagagttttaagttaagtgttttggttatatttgtagatgatattggagagtaatagttattgtttttaaggagtttgtaattcggtagtttaattaggaaatatttgttttttataagtatagttggtatagttaatttaattttatagaggaggaaattgaggttttagaggataattggtttatttaagattatttttgggaatagagaagagttaagatttatattaaggttttttaatgaggtagtaaatgttgttgtagtagtttaaataaagatttagaattttagagggaaggtattttagttaggggaataggataagaatgtcgtagataatgtagtatgtgaaatggggttttggaagatgggtaggattttgttagtaagtagtttaatttgattggagagttgatgttttttatagagttggaggttaaagggtagaaaggggtattcgagattagagatgattgatttaggttttcgttgtaggtaatttgttatgtttagaatattgtattttttttaggagtggagggttatttaggaaagagagagtatattgtttttatgattagagtgattttttgttttgggtaatataataaatattggaggaatataaaggtttatttagcgagtttttttttttttgtttattggtttaaatttaaaaaaattttattttttttttgattatttatgttagtaaaatttttgattatagtattagttaaggagtgggaaagatggggaaagattttttatagttattttaattttagatggttgtttttaattatttataggttaaaagattaattatttttagttttttgaggaaaagttattttaatgtttaatttttatttaggtttttttatgttttaagttttttaagataaagtttattaaaattatagtcgggaaaaataaaggttatgttttaaaattgtatatagtttttagatgattatagggttttaaaaataaggtagtttagtaatgttattatattatttgtatatattgaatattaagaaaaagtaaaaatttttttaatatgtattttagattttatataggataattagtttataattttatgatagaattttattagcgtttagattgaagttaatgagttgttattatcggtacgaattttaaaagtagatatatttttttttttaatttgtttggttttatggttttattttaatttgtttaggtgtattgaaagtttttagatatgaggaatttttaaaataataataggattatttttagttaaggtttatagattttgaaaaggtttttaggtatttttgtaagagatttataataaatttttgatttattttaaatgttataaaagaagtatttattggttattagttttgggtatttgagatttaaaaaatatttaagagatggttatttaataatgtgaagtttggttgggcgaggtggtttatatttgtaatttttaaaagaggagggcggatcgttagaggttaggatttcgagattagtttgattaatacggtgaaattttatttttacggaaaatataaaaattagttgggcgtggtggtgggtatttgtaattttagttatttgggaggttgaggtattagaattgtttgaatttaggaggtagaggttgtagtgagtcgagattgcgttattatattttagattgggtaatagagattttgtttttaaaaaaaagggaagtttatttaaggttttgatttaaaattttaggaggggttaggagtggtgtttataataattttagtgttttgggaggttaaggtggaaggattgtttgaggttaggagttttaggttgtagtgagttatgatggcgatattgtttttacgtttgggtaatagagtaagaatttgtttttaaaataaataaattttaaaaataaattttaaaaaattttagggaaatagaatagttatattttttttacggtatataattgttattatttattttttttttttttttgttttgatatagggttttgttttgttgtttaggttggagtatatcggcgtgattatagtttatagtagttttaattttaataatgaaaagaaaaataaaatgtttttaagacggtgttttattatgttgtttcggttggttttgaattgttgagtttaagagattttttcgcggagttttttttttggtttttagtttattattggattaatattatttatttttttttgagaattaaatagaagtcgaaggagagttttttttagtttacggaatttttttttttttgatttattattttttattgacgttatatttatgtgaggggcgttaatgtgtataaggatataatttttcggaggtatttttattttgatttggtttaacgagttatagcgtgatattgttttattttagttttaaaagaggaaattatagatatataaatattgaggtgtttttttttaaagttattaaattaagtaaaagtttttagaaggagttagtaggatatcgagttttaggttttattttgtcgttggttaatagtgataaggggaaatttaatatcgttttgtgagttttagtgttttgaggtgtaaaaaggagttgatgaaaagtaatttgttttttttagaagattaagttgatttatgttaagtatttaaggtagttttatcgggtgtttgaggaagtttgtgtttttttatttttgtttttatttttatttttaggtgatgagaagaggaaataaagtggttagagtttttaaattttggagttcgtgcgtatgtagtagaattttttaaaaagtaagtagtgtttttattttattttatttatttttttttttttttttggtgttatattttatatagagaaattaggtgattatagatggaataagtttagaataggttatttaagtttttattgttatttttttttagattataggaaagagagcgtggtcggagatagaaataggataagtgaggaattttcgagttttttatcgttagattaatttttttaggattcgggtttgagtcgtcgttgggttcgtcgtttttttcggttttcggtttcgttacgtttttatagggcgtttcggtggtcggcgatcgtttatttgcgttggatatagtagtagtaggaggaggttaagggttaggtcgcgagcggttatgttgtggtcgcgtaaggttgttgacgtcggcggcgttcggttggttgggtttttcggaggcggttttattttttcgggttgttttagtatttcgcgtaggaggagcggaggagtaggagtaggcgttgatcgcggtagtaggttgcgcgcgtcggttaggaaggaagaaggcgtcgtcggtttcgttttttttgggaggtgtcgttgtcgggattttttggttcgggttggggcgtcgtcgcgatttcgttttaaggttttcgtgttgtttttttttttagtttttgtaattttcgggggttaggcgcgggatttatggagtttggttcggttcgggagagtatttgtggagttgtgttaacggtttttggtcgtgatgtttttttttttcgtttttgggttggagggggcgggcgaggttttagcgaagggtagtgttgttttgggggattttcgggtaaggtttcgttcggtcgcggagtttttgtttatttcggtttcgataattacgttgagcgatttttttttttaatttagttatttgaaaggaatttggatttcggtattttttagtagagttcggggcggtgacgcgcggtggtttgatcgtgtgacgattcgcgagtgcggcggggcggggcggggcggagcgcggggtgggcggtggcggtgcggttaggttcgggaaaaaaagtgcgggagtttcgttatttgttggtttagttgcgtagcgtagttcgtgggcgcgaggaaatttcgaggtggggattagggtttgttttaagttttacgtgaaggtagataaagaagacgcgttgttatttttgagttatgcgtttgatatatgtatttatttttaattttagttgtatgtgtttttggtaacgtttttttttaaattttaagtatttagattatttaaaagtatttgttatttttattttgaagttaagaaaatggaggtgaagattttttttttaatagtgaaagtaaatttacgatgaaaagattaaatttttatttggagtaatgatcgaatttttttttaaggagttttatgatgtagatgatttttttatttttattttataaagtgttgttttattttttgttttgtttttttatttttttagttttgagatgtttatttggttggtttggtagtgaaattatggggatttttttaggatttttagtttaggttttttacgacgatttcgtggtttttagttagttttgtgttttcgttttttattttttaggttttagtttttggtgtttttattgaggattaagttttgtgtatgtttttatgtagggatttttaaacggttatttttagattagtagtaggagtatttttttggaatttgttagaaatgtaaatttttagttagggtaatgtagtaagattttttttatataaaaaaaaaattttttttaagttagttgggtatagtggtatatatttgtagttttagttattaaggaggttgaggtaggaggattgtttgagtttaggaggttatagttgtttatgattatgttgttgtattttagtttgggtgatagagtaagattttgttttaaagatagagagaggtagaagaaaatgttatagtaagatttttaagtttataaattattttgaaggttttaagtttttataattttttttggggaagaagaattttggtttttgtgatttattttaggggtgtaagatcgttggagataggagggtaggagaaagttatgggtagattttgtttttgaggttgttattgagatttaattttttttagtttaaagtatttagtatgttaaagttttttattttggggtatcgttttttgagttttagtagttgagattcggagatttttttgttgaaagaatatttaatattatttttataaggattatttagtgttgattttagagtaataagtagaaaatggggggaaatgaaattattagatgtgtatttttataaatgtgtagaaatattttttagaaaatttttatgtagtggaaagtatatatatgtgaatataatatataaacgttttaaataagtggggatgtatagtatatagtttttatttggtttttttgtttttagtagtatgtttttttattttattttttttaatagttgtaaaggattttattatgcgtatgtaatatttttgaagttatatttagagtagtgtttaaattaatgaaatataaattattagttaataagtattttaaaataatttaatttttttatttgtatttttggtatatatgaagggtttgtgtggttttggtaatatattataaatttattttttttttttttttttttttttttgagatagagttttgttttgttttttaggttggagtgtagtgatatgattttagtttattgtaatttttatattttcggttttaaagatttttatgttttagtttttcgagtagttgggattataggtgtgcgttattacgtttagttaatttttttttggattttattagagatggggttttattatgttggtttggttggtttttaatttttggtttttagtaatttattagttttagatttttgaagcgttgggattataggcgtgagttattgtttttagttcgttttttttttcggtatgttttgttatatttttgagtttgtttggagattataaagtttggtatttttttgtgttttttgtttttttaattatgttgtattattaaagtttaaatatttttgaatattttttttgtagagggagaggagaaagttgatttaagattaaattatttgtagttggtagatggtaggggaaggttagaaatatttacgttaataatttttgatttattatgtaatttatttaattagtttttttttgggtatttagtttgttatttgttattggaaatgatgtaatgaatatttttgtattttttaaaaatgtttttttttgggatagagttttattttgttgttaagtttggcgtgtagtggtatgattatggttcgttgtagtttttattttttgggtttaagcgatttttttatttgtgtattattatttttggttaatttttgtattttttgtagagacggggttttattatgttgtttagattggttttgaattgttgggtttaagtaatttgtttgttttagttttttaaagtgttgggattataggcgtgagttattatttttggtttatttttggatgtaaatttttgtaattatgcgtaaatagaattgttggaaatatttttatattgttggattaaaggaaatgggtatttaagttttgattgttgttaaattgttttttaaagaaattgtagttagtaatgtatggaagtatttaaatgtaatttgtgattttatttattttgttttttattttaaaaaatattggggttgggtacggtggtttacgtttattattttagtagtttgggaagtcggggtaggtggattatttgaggttaggagttcgagattagtttggttaatatgttgaaatttcgttttaattaaaaatataaaaattggttaggcgcggtggtttatgtttgtaattttagtattttgggagtcgaggtaagtggattatttgaggttaggagtttaagattagtttggttaatatggtgaaattttatttttattaaaaatataaaaaattagttaggtatggtggtggatgtttgtaattttagttatttaggaggttgaggtaggagaattttttgaatttgggaggcggaggttgtagggagttgagattgcgttattgtattgtagtttgggtaataagaaattaggttgggcgtgatggtttatatttgtaattttagtattttgggaggttgaggtgggtggattatgaggttaggagatcgagattattttagttaatatagtgaaatttcgtttttattaaaaatataaaaattagtcgggggtggtggtgtatgtttgtaattttagttagtcgggaggttgaggtgagataattatttgaattagggagttggaggttgtagtgagtcgaggtcgttttatcgtattgtagtttggttatagagcgagatttcgttttaaaaaaaaaaaaaaaaattagttgggcgtggtggtatatatttgtaattttagttatttaagaggttgaggtaggagaattgtttgaatttaggaggtggaggttttagtggtcgagattacgttattgtattttagtttgggcgatagagtaagatttcgttttaaaaaaaaaaataaataaaatataattaggatgttttgatttgtatttttttaattataagttagaggaagaggttttttttttattaattagtatttttatttattaatttgtgtaaatttttgtgttttttgagatagagtttttttgtgttatttagaataaagtgtagtggtatgattatagttcgttgtagttttgatttttttggttaaagtgatttttttgttttagtttttaaagtgttggataataggtatgtattattatgttaagttaataaaattttattgttaaaaggttttttgatttttttaaaatttttttaaaaagttttttaaaaaatttttttttgttgttgatttgtaatttttaaagtaggtagttttttaaataggtagagaaaaaaagaatgtttatttatttaataaattgtaagtttgtttagtttttaatttgaagtttaaagtttaataatagaaaatgaagatagaattagggttttggggtaatagaatgtaattaatgttatttagtgacgtttgaggttattgtataaaatattaaagattggtgtgatttaaataataggaatttatttgttatagttttagaggttagagagtttaagattagtatggggagtttatttggtttttggtgagggttttttttttggtttgtagatagtattttttttttgtgtttttagatggtgtttttttaagtgtgtgtttttagggagaaagattttttttttttttttttttttttaataattttattgaattaaggttttttttttatgattttatttaattttaatta

SEQ ID NO: 1339 - DNA, 6104 bp, Artificial Sequence
  chemically treated genomic DNA (Homo sapiens)
atatagttatgttttttttttgttttttttttaggtatttttgtttttgggtatgtgttattttcgagttttgtttatatttttatgggatttttagttattttgtgttgtttttaattttttagttttttgtttattatttttttatattgtgattgtattttttagttttgtagtgggtagttatttttgacgttatttttgttattttttttatttttgttttatttaaatgtggtagtttttttttttttaaaatattgtggagatagtattttttttacgttagttaaaattggaaatggaaagttgggagttaggagttagtgttagttataatttggaaatgatatattgttgattttttgaatttatatttttttatttttattttttattgttatttagttatggtatttatatgttttggtttatttttattattttattttgttttttttttttttttaatatgggttttttagattatttgttttattttatattgttttagttatatttcggattttattattaataggtttggatttttttatattgtatttgtttgtttagtttcggggtaacgttattttattaggatagtttatattttttatattttttatagaattgtttattttggagattattagttgttttatttttttagttaattttataagttattttgggttttttggttagattagattttatttttttttgtatatttatttttattattgtttttgtttttttgagttattgaatttgaaagaaagattttattttttttatttggtttattataaattcgttttattgtgattgtatttgttttattttttagtatttgagtttttgaaatttttagtttttttgatgttttttatttttagtagattaattatatgagaagataaaggttgttagttgggaatttttttattttatttaatagttttgtttagagtagtagtttttaatagggttatatattataattatttagggagttttaaaaatattaatttttgtatgttattgtttagatattttgatttatgttatttggaatatggtttgggtattagaatttttagttttttaggtgattgtgatggttatttgaggttgaaaattattgtttttgaagttttgttttattaggttttttttattaggagagaagatatacgggttttttttaaggttgttttttttttggtttttgtagaattttgtattttttttaggattttttttgttttttagtatattatttttgttgcgtttgtagtttttgtttgttttttatttataaatgtatatttttttttttttttttttttttttttttttttttgagacggagttttattttgttttttaggttggagtgtagtggtgtgatgttggtttattgtaatttgtgtttttcgggtttaagcgatttttgtgttttagttttttcgagtagttgggataataggtgtttgttattatgtttggttaataaatgtatggattttgatttaaaatttattttagttgatgttattatttgttaatattttttttttaaatattttgtttattggtttgttgtgatttgttttttgtattttttagaaatattaatatttatggtttttttgaatttttatattttattttgagggtatttgatgaggttattttgttttttgaaatttttttttttttgtttttttaatataaaagtttattgagtttttaaattgttattattgttgttttttttaagttttttaaatttttgttttggttttttgttttgtttttttttgtgattattttagttatttttttggtttaattagtatatttaagtagagttttttttttttgatttttttttttaattttagttttatttttttagttgtttagtggatatatttaatgtatgattttattgtagagtttagtgtatttaattataagttgtttatttggcggggaattttgtatattaggtagtatttttgtggtaagtggttggtataatttttatgtttttagtttattattgtagtttggaagttttttgagagtagtattaaatattttgtattataggtttaaatagtgttttgtattaaggtatatatttgttatttttatttgaggtggattgttttttttttttttttttttttttttttttttttttttttttttttttttttttttttttttgagatatagttttattttgttgtttaggttggagtgtattggtgtgattttagtttattggaatttttattttttaggtttaagtgatttttttgttttagttttttgagtagttgggattataggtatgtgttaatatatttggttaatttttgtatttttagtagagatagggtttcgttatgttggttaggttggttttaaatttttgattttaggtgatttatttatttcggttttttaaagtgttgggattataggcgtgagttatcgtgtttagtttgaatttttttttaaggttttaaaattgtatattttttttattttttttgttataatttttttattgattttaagtcgttttgttttattggttttgtttatattatgagttttttggaagttgttaaatttttttttagtatgatttgtgaggaagtaatttaaaattgttatttattttaatatattgatagaaattatgatgagttttatgaagtagtttgtttttaggagaaatattggttatggtttgttttagttttttttggttattttattgtagattttttttgttttaggttatgttgttttttataatggtattaaggtataattatagaggagtaatgattagtattaatgtgattgttttgaatattatagttattagtgaaaaattattagttgagtaattatattatttatagtatattgaatattttagtggtattttttaaatttgaatgtgtatatgaaatattggggtattgttaaaatatagattttgatttttttaggattgtggtggggttgaaaatgtgaaaatgtgtatttttaataaggttttaggtggtgatgatgttgatttaggaatcgtaagtaatgaatatttgtaatcgaaataatatgatgtaaaaatgtataaagttaaatatttttatatttgaggtgaatgagtaatatattttttttgtatttttttttattgtttatatatttatatatatttagggggggttattagtttatttttattaatagaattaaattgtatttatgatgttattaatttttttatttaaaatgtggaaatttttataaataagtagatgtagaataattttttttaatttatttgtagattgagaattttataagtaatagttgtattttagagtaatttttttcgttttgtttattttattatttgtaattattgatttaataatttatttagaaatattttatagtatttttttatttgttgtaaagatttttaatggaaattttatgtttgattatttaagtgaattaattattataagttataatagagaaattaatttaaaataagatatgaattataataaaatagataatattaaattttgttaaggatataaagaataaaaatttatatattgttgatagggtataaattagtattattttgggaaattaggtagtagtatttattaaagttgacgtataatatgtttgtgatttagtagtgttatgtgtttgttagaagatttgtattaggacgtttttagtagcgttatttatattagttttaagttggaaattgtttatttatttagtaatagtagaattagtatgttagggtatattatatgtgaaatattagtaatgagaatgaatagattatagatatatatagtatagatgtattttataaatgtgatatttaaaggataggagaagttattatatagtgtataattttattgtatagtataaaaaaaggtaatataagtttgtgtttttataagttaggatattgtttatttttggtgtgtggtagagaagtgagagggttgagaggttgggggtaggtaaggattagaaagataggaagagtgtgagtgggtagataatgttttgttttataatttgggtgttgttatggggtggagggtttttagagttgtatataaagtttgtagatttttttttgtatgtattatatttgaagaaaaaagtatataaataatggtttattttggtttgtggttgttttgaagaatatttatttgtattaatggggtttattatttggaaggtgagttttaagtattattatttttatttaagtttaattttggtgtagtggagttttggaattggatttatgggatgtagttttatatgggggaaatatgataatttttttgagagttgatgtaaattgggaattataatgagaattaataatttgtttatagatttgttgtagaataattattatttttatagaatttagaattgataacgtgtaatattagaatgaaatgaaattttagtagtttaaatggtaaagaattaaaaattgttttttgaagtgatagtatggaatagaattatatattttataggaaagttatttttggagttaatgaaagagtttaagatattaaaattgtattttaatattagtttataaaattggtattagaaagtaaatgttataaaataggtattttagtaagaaggtggtgttattattgatgtattgtggggaatgtagttttagacgtcgggggacgtttttttatttttaggaattgtcgaggaaaagtgattttttcggttgtgatttgtttggtggcgtgggatgattatcgtaagagaatatttgatttttttcgggatcggttcgggcggggcggggttgggaggcgggcgtatatcgatggcgttattttttggcgtcgtcggttggtttttttggtaattggagtaattagagtatcgtagttagggagatgttggcgagacgatagcgagattttttttaggttttgcggcgtcgtaattaggagttgaagtaataggtatggttaggttgtgtagagggttttggggcgggcgataggcggacgtagttgcgcgtattgcgtttttttatcgtgattttatttaattttgggagtttgtttttaatttatttatttttttaggttgtaacgtttttttattttataatattttagtatttaatttcgatttaaattttttttgattttaatttaatttttagttaaaggcgaaattttttaaaattcgtgattattaattaagcgttttttttttcgatttttatttttatttaacgttttaattttttattttaataatttattaatttattttattttttaatttaaatttagtggtgtaattatttttaatttaattttgagtttagttttttttttttattttttaagtttatttttttttagttttttttaagtggagattattattgttttcgtgaatttaagcgaaataggtgttaagaaatagttttaatatgtaagaatattaagatttgataaatgagtaaaggaggtgaacgagagaggaaatataagtaatttataaatatacgaggaatgttaattttaaagatatttaagtaattgtaaagtatataaggtattataaaaatgttaaaaattataatattttgttttgaggaaggtgtgatgaagtaggtatatttattgttttcgtgtataaggtgtttgtatagtattttaggaaagtagtttgataaggtgtaatatatgtgtatgtatttaggtttaaaaattatatttttagggatttgttatgtgtaataattagaaagtaggatagagattgatgtataaaagtatttattatattgttatttatataatatatatagaatagtatagaagggaataggttaatatggtatttttgtgtgataggatgttgatgattattatgattttttttatttttttttatatttataaaaatttttaggttaggtgtggtggtttatgttagtagtattagtt

SEQ ID NO: 1340 - DNA, 6104 bp, Artificial Sequence
  chemically treated genomic DNA (Homo sapiens)
agttggtattattagtatgagttattatatttggtttaaaaatttttataaatatgaaaaagaataaagaaaattataataattattagtattttgttatatagaaatattatattagtttgtttttttttatgttgttttgtgtatattatataagtaataatgtgatgaatatttttatatattaatttttgttttattttttaattattatatatagtagatttttggaaatgtaatttttgagtttaggtgtatatatatatgttatattttgttaagttgtttttttgaaatgttgtataagtattttatatacgggagtagtgaatgtgtttgttttattatattttttttaagatagagtgttgtgatttttaatatttttgtgatattttatgtgttttgtaattatttgagtatttttgaagttaatatttttcgtatgtttatgagttatttgtattttttttttcgtttattttttttgtttatttattagattttaatgtttttgtatattaagattattttttgatatttatttcgtttgagtttacggaggtaataataatttttatttgaggaaggttgaaaggaaatgggtttggaaagtggaggagaggagttaggtttagagttgggttggaaatggttatattattaagtttagattgggagataaggtgggttagtgagttgttagggtaggaggttgagacgttaggtgggagtgagggtcggaggagggggcgtttagttgatggttacgaattttgggaggtttcgtttttggttgggggttgagttgggattaggaggggtttgaatcggggttgggtgttggaatgttatggggtaagggggcgttataatttgggaaggtaagtaggttgggggtaagtttttaggattaggtggggttacggtgggaaggcgtagtgcgcgtagttgcgttcgtttgtcgttcgttttagggttttttgtatagtttgattatatttgttgttttagtttttgattgcggcgtcgtagggtttggagaggatttcgttgtcgtttcgttagtatttttttggttgcggtgttttgattgttttagttgttagggaaattaatcggcggcgttagaaggtgacgttatcgatgtgcgttcgttttttagtttcgtttcgttcgggtcggtttcgggaagggttaaatgtttttttgcggtggttattttacgttattaggtaggttatagtcgggggagttattttttttcggtaatttttaaggataggggaacgtttttcggcgtttgaaattatattttttataatatattaataataatattatttttttgttgggatatttgttttatggtatttgttttttgatattaattttgtaagttaatgttaagatataattttagtattttaaatttttttattaattttaaggatagtttttttatggaatatatggttttgttttatattgttattttaaaaggtagtttttaattttttgttatttaggttattgaagttttattttattttaatattgtacgttgttaattttgaattttgtaaggatggtaattgttttatagtaaatttatgagtaaattattagtttttattatgatttttagtttatattaatttttaggaaggttgttatgttttttttatatgggattgtattttatgaatttaattttaaaattttattatattaaaattgaatttgaataagaatgatgatgtttggggtttattttttaaatgatggattttattaatataaatgaatgttttttagaatagttataggttaggatgaattattatttatgtatttttttttttaagtataatatatatagagaaaagtttatagattttgtgtgtagttttgaaaattttttattttataatagtatttagattatgaaatagaatattatttgtttatttatattttttttgtttttttagtttttgtttatttttaattttttaatttttttatttttttattatatattaaaggtgaataatattttaatttataagagtataaatttgtgttgtttttttttgtattatataatgaaattatgtattgtgtggtggttttttttgttttttaaatattatatttgtgagatgtatttatattgtgtgtgtttgtagtttgtttatttttattgttgatattttatatatgatatattttaatatattgattttattgttgttgggtaagtgggtagtttttagtttagggttagtataaatagcgttgttaagaacgttttggtgtaagttttttggtaaatatataatattgttgagttataggtatgttatacgttagttttagtagatattattatttggttttttaaaatggtattaatttatattttattagtagtgtatgagtttttgttttttatgtttttggtaagatttggtattgtttgttttgttgtaatttatgttttattttgaattaatttttttattatggtttatgataattagtttatttaaatagttaaatataggatttttattaaaaatttttataataaatgagaaaatgttataaaatatttttaagtggattattaaattaataattataggtgatgagatgagtaaaacgaaaaaaattgttttaaaatatagttattatttatgaaatttttagtttataaataaattagaaaaaattattttgtatttatttatttatagggatttttatattttaaatggaaaagttaatagtattatggatatagtttaattttgttggtaaaaataaattaataattttttttaaatatgtgtgaatatatgaataataaggaaaggtgtaaaaaaagtgtattatttatttattttaggtgtgaagatgtttgattttatatatttttgtattatattgtttcggttataagtatttattatttgcgatttttagattagtattattattatttgggattttgttagaaatgtatatttttatatttttagttttattatagttttaggagaattagaatttgtattttaataatattttagtgttttatgtgtatatttaagtttgagaagtattattgaggtatttagtgtgttataaatgatatgattatttagttaatgattttttattaataattgtaatatttaggatagttatattaatattagttattgtttttttgtagttatattttgatgttattataaaaaataatataatttaaaataagagagatttgtagtgaggtagttaaaagaaattaaagtaaattatggttaatgttttttttgagagtaagttattttataaaatttattatgatttttattagtgtgttaaaatgagtaataattttgaattgtttttttataggttatattgaaaaagaatttaatagtttttaagagatttataatgtagatagaattagtggaataagacgatttggaattaataaaaagattatagtaaagagaatagagaaagtgtgtagttttagggttttaaaagaaaatttaggttgggtacggtggtttacgtttgtaattttaatattttggggagtcgaggtgggtggattatttgaggttaggagtttgagattagtttggttaatatggcgaaattttgtttttattaaaaatataaaaattagttaagtgtgttggtatatgtttgtaattttagttatttaggaggttgaggtaggagaattatttgaatttgggaggtgaaggttttagtgagttgagattatattagtgtattttagtttgggtaatagagtgagattgtgttttaaaaaaaaaaaaaaaaaaaaaaaaaagaaagaaagaagggagggaaagaaaagaaaagaaaataatttattttaaataaaaatgataaatatatattttggtgtaaggtattgtttaggtttgtggtataagatgtttaatattgtttttaaagagtttttaagttatagtaatagattagaaatatgaaaattgtattaattatttattatagaagtgttatttggtgtatagaatttttcgttaaatgaatagtttatgattaaatatattgagttttatagtaaggttatgtattgaatatgtttattagatagttgaaagggtgaagttggaattgaaggaaaggattagagggagggggttttgtttggatgtgttagttaagttaagagaatggttagggtaattataggagaggatagggtagagaattaaggtaaaagtttgaggaatttgagaaaggtagtaatagtagtagtttggaaatttaataaatttttgtattagagaagtaagggaaggagaattttaagggataaagtggttttattaaatatttttaaggtaaaatgtgaggatttagaagagttatagatattaatgtttttggaaggtgtagagggtagattatagtagattaatgggtaaaatatttggaaagaaaatattggtaaatgataatattaattaaaataaattttaagttaaaatttatgtatttgttagttaggtatggtggtaggtatttgttattttagttattcggggaggttgaggtataagaatcgtttgaattcgggaggtataggttgtagtgagttaatattatattattgtattttagtttgggggatagagtgagatttcgttttaaaaaaaaaaaaaaaaaaaaaaagaaaagaaaaaatatgtatttgtaaatagaaagtaggtagagattgtagacgtaatagagatgatgtattggagaataagaaaggttttgagggagatgtagaattttgtagaggttaaagaggagatagttttggaaagggttcgtgtgtttttttttttggtaaaggaaatttaatgagatagagttttaaaaatagtagtttttaattttaggtgattattataattatttgaagaattaaaaattttaatatttaggttatattttaaatgatatgaattaaaatgtttggatagtggtatgtaagaattagtatttttaaagttttttagatgattataatgtgtagttttgttgaaaattattgttttagataaaattattgagtaggatgaaggaatttttagttaatagtttttatttttttatatggttgatttattaggaatgaaaggtattaagaaaattgggagttttaggaatttaggtgttaagaaatgagatagatgtagttataatagaacgaatttgtagtgagttaagtgagaaaggtgaagttttttttttaagtttagtggtttaaaagagtaaaagtagtggtgaaggtaaatgtataagaagggatggagtttaatttgattagggagtttaggatgatttatgaggttaattggaagggtgagataattaatagtttttagagtgggtagttttataggagatgtagaggatgtaagttgttttaatgaggtggcgttatttcgagattaaatagataagtataatataaaaaagtttaagtttgttgatgataaggttcggagtatggttgaagtaatgtggaatagaataggtggtttgggaagtttatattgggggagaaaaggaggtagggtagggtagtaaaagtgggttaagatatgtagatgttatgattaaatggtagtgaaaaatggaggtgggggaatatagatttaaggagttaatagtgtgttatttttaagttatgattggtattgatttttggtttttaattttttatttttagttttggttaacgtaggaaaagtattatttttatagtattttgggggggaaaaaattattatatttaagtagagtaaaggtagaaaaagtgatagaggtaacgttaaaggtaattgtttattatagaattggggagtatagttatagtgtaaaaaggtagtaagtagaaaattagaaaattaggagtagtatagagtggttaaaaattttataaggatatggataggattcggaagtaatatatgtttagaggtagggatatttagaggagagataggagaggggtatgattgtgt

SEQ ID NO: 1341 - DNA, 9817 bp, Artificial Sequence
  chemically treated genomic DNA (Homo sapiens)
  unsure 2636, 7012: n is a or g or c or t
attttagtttgggcgatagagcgagattttgttttaaaaaagaaaaaaaagaaaaaaaaaatagaaagaaaggaagaaagaaagaaaataatttagattttaattttgaataatttgtttaattattttgaagaattaaaaggtttataaaagaatttagaatttggttcggtatagtggttttatatttgtaatttttagtatttttgggaagttgaggcgggtggattgtttgagtttaggagtttgagattagtttgggtaatatgtatttatttagagatgtagtattatttttgttgtttaggttggaatgtagtggtgtaattttagtttattgtaatttttgttttttagatttaagtgatttttttgttttagttttcgagtagttggaattataggtatatgttattatgtttggttgatttttatatttttagtagagatagggttttattttgttggttaggttggtttcgaatttttgattttaggtgatttattcgttttgattttttaaagtgttgagattataggtatgagttattgtatttagttttttttttttttttagaaaaaattatatttttatagtttttttttataggtaaagtttgatttattgatattggttatttgaagtgttgtgttgtgagaaagtttaatattaagtttgagattttggggagcgggagttaggggtaagacgattaagtagagatgtttgttatagatgatgagagttgttgtggtggtatttatatttattttttttgttagttatttttattttgtttttttaaaagaatatatgaagggaatagtaataataattattaaaaatagtaatagtaatagtggtaaagttttttttattatattatatagtaaaaatataatgttatggttttgtaatataatattatatttttttttgaatgtttaaagggtatttgaaagtataaggtatgtagaaaaagatttggttatttattaaattttaagattttatttgtttagagttttattgtgatagagtttttaaaaatgtttcgaaatatgtagtttatgtaataaaatgagaattttattgaaaggtatttatattttaaattaagattaagagaaaatttataaatagtattgtgtgttttttgtataaaggagattattgaattgtttgtgtatttgtatatttatatttttaattaaattaattattattttttttttgttagttaatgttttttaaaagttagatgaataaaatgattgtattgattatttgattgtgttgattaagttaaaattttttattaattatattttattggttttaaaatgtgggtttaaaaagtattttaatattttaatatttatttgttattgatggtatgttattgttttattgaaagtattttttttttggtggtttataaaataaaattgtgttttatatttttgggcgttaaagatttaaagaaatgtagtaggtaagttatagaaagaaggaaaattttgatataaaattaatttatagaatatgaattgatttattgacgtgttttattatagttttatttttatggaattatttttttattaatgttatatatattttagttttttcgtgtagtattaatgtttattaagttttttttgagtgataatttatggtaatttatttgtattaaggtttgatagtattttagaaattttaatttttgtagtagaaattttttagaagattagtaattagtgtgttttaattttagtagtaagtatattgttatatttttatttaagtagttattgaattatggaatttaaaggttgagttaggttataagtttgttttattgtttagaatataaaatttagatttatagaaatttaatgagtagattttattttttagtttatattatagagtaagattgttgtttaagagagtatgagattaggttattaatataattttttttggtttataggttaggttgttatgaaattatagaaagaaatatatagaaataaagaaaaaattttttttagtaaagatgaagttttatttagtttgaattttagataggaaagtaggtagttgattatttattgaagagtagaaaaatatatgattttaaaattggaatgaggaaattttttaataagtattttttaagaaatttaaattattttgtatattttaaattttttataagattatattattggagaattttatgttgtgtttggttattggattatgtttaatttttttattttttatattggaaagaattttagtaaatggtatttttaaagaattatataattttgttgttgagtatttttttttttttttttttttttttttaaaatagagttttgttttgttgtttaggttggagtgtagtcgtgcgatttcggtttattgtaatttttgttttttgggtttaagtagtttttttgttttagttttttgagtagttgggattatagatgcgtattattatatttggttaatttttgtatttttagtagagacgggttttattatgttggttagtttggtttcgaatttttgattttatgatttattatgtttaggtttttaaaagtgttgggattantagcgtgagttatcgtttttagttattgttgagtattttagaatttttttttgtattataaagttgttatagaaaagagtttttgagattaatgattttttaaagattggtatttgatattaataatttaagaatgcggttttataaattttttttagggagaatattttataaaaattgagttaataaaatgataaaatataatggttataatagtttagaattttggtagatatgtttttattagtatttttgggaaatagagaaagtatagtatttgagtttaaattatatttttaagtttaaaatatttgttgatataataatagtttttatataaaaatatatttttagtagagaattaaattattttatttgtaatttttatagtaggttaaagatagttaatttgatgattaaaattatggggaaaatttttttttaagaatagaatgtgatttaaggtaatagagtagatagaggatgtatagaaatttgaatgaatattagttatttttttttgaaagagttgaaatttttaaattgtgttttggtaaaaattattgtgttttggttaaaaaaaaaagtatgtgtgtgtatatgtgtgtgtgtgtataaatgaatttgttgttattttattttgtttaattattagagatttttatatgtatgtttatatttgttgttatatattaatagtataattattatataattatgatattttaatttttaattataatgtttttttaattatataaaaatatgtttagtgatatatattttggaaagtttttttggaaaaatatttagagattgtgtttattattgatttatataaatgagtttatattgaattttaaatatgtttatttagtttaataattagaaaaagaaaacgttttttaatagtataaagtttagatgagtttatttgttttggaattttattttgattttaattagaagaaagattgttattagaattgtgttttaatgaaatttttataaattttttgggtagtgttcgtatttttagtagagagattttttatttttaataattttatttggaagaagttttatttatgtgtattagtttatcgtttataaaatttgtgtgatgtgggtggggggggggtgatgggtacgacggtgacgtgaggaattaaggagagaattagaggatgacggtttacgaatagtgtggttaggatagggtcggagacgtggggggtcgagggtgggggagggggggcggcgagggagcgggaggtggtagcgaaggtttgttcgtatggtgtataggggcgggaggagaggggttacgagggagagtgcgaagaatagggggtcgggcgggtcgggaggaaggcgacgaaatgataatgtttagtattgtagtattaattatcgagaaaattgtattgacgtttttcgattattagggaaatatttagtttatggtttttttttaaaaaaattaaaaagtagttaagcgttgggaataaatttgatttaatgtatttttttagtgggttaaagaaaggagggtcgattgattgttttgattttttaaaggttttttttttgtttatttataaagtgaggaaaataaattttcggtattggcgtgagagttatttgagcgttataaaagaaagtaaaagaaaatattagtgttattattgtggcgaattttatgttttttagcgagttttttgatttttggtttgggttggcgttcgagttttttagtcgggtatgatttcggttataagatggtattgatttgtaaataaagaaaagtatagtggtatcgatttttttaagtttcgggaaattgttttgtttttttcggagtcgaggattgtggggattagggtttttttttttttgcgcgggaggtttgtgtcgaataatgtgtggtttttgttggattgtttttttttttaaaatttttaggtaatgttttttcgaggtgtgtatttttgtgaggtgtttgtggggttgggggagttttaggcgttattcgcgggacgtcgttacgtgattcgggatgaggtggagttcggttttaaggaggcgtttttttttagttttattaatttttaggatttgagtaggagaaatattagcggattttttttattttgtttttttttatttttatttttttttttttaataagtaggagcgaaaaagataaattttaaagagggtaagttgcgagtttatgtttttttagagatttttgcgaaattttttattgataaggtgaaggatgagaggggaagaaaaacgatgcgagtgttcgaaattggttttgggggattaaggtggggtttttagtgtaggtaggtcgtaggttgttttaaattatcggatcgttcgcgggtttttgtcgaagggtatggggacgacgcgggtgaaaggagagggtattttacgcggagttcgggtttttttattatttgttttcggggaatttttggatggggatttaagtttttttttatttcggttttttttaaaaggtcgaggtattgggaaggcgttcgagttcgtttattttatattcgtttattttttttacgtgttttgagttggttggaggcgttggttttggtcgtatcggagttttcgcggagtaattggttgggatgagtcggagaagggtgggtttggcgcgtcgtttagcgtcgtacgggtttcgcggtaggtgtcgggttgggagttggcggaggtggagtagttttcgggcggattttagcgcgtaagtttatttttatttgcgggtttcgcgtttttcggttgtaatcgagtcgcgttcgtagtatcgggcgtttcgagtgtggcgttgcgtttcgatagatattcgaagtttttaattatcggagttttaattagggaattttttagtttttttttttagaaaagtaatgatggaacgtggttgggttaggagattgggaatggataggaggtggaggtgttttgatagggtgtgttattggtttttaggtagattggagagataagaatgttttaaggtttgatgttgggttaaagagagagaattgatttcggtttgggatttgtttggttttggttgtttatatttttttttttttgttagttttttattattggtagaaaggttttttgatgagagagatagagagagtgagcgtgtttgtatgtgtgtgttatagggtatcgttagtattgtcgttttcgtgcgtttttttgtgttatttttttaggaaggtatttatttcggttgttttgtcgggataaataggttttgttcgtttttttttgtttttcgttattgtgtgtggtgagtttttatgttattgagttttagtatcgtagagtatagattaggattgttttttcgttagtgttattggtagattaataaaaatgtagaattgggtttatataattgggaataattattaaatgtgtatttagtaaaataggtttgaaaatattttaaaaaaataaattttttattttttttatagttaaattaatttttatttagtaagaaaaatgtttttttattgggtatgtttattaaatataattttaaaggtattaggttagagttttagtacgtttatttgaatttatttgtaagaaagttatgtttgtagtttgtattttgtaataatttaatgtttgtgtgaatttttatatgtatttatttttgttaaaattagttagtggatagaatatttttgtttttttttttttatggtatatattttggtttttgtttttattatttttcgtttaaattattgtattagttttttaatgaatttttttattttttttttttttttgagtgtgttgaaaatagtagcgagaatagtaattttaaattaaaagttataaaattttatatttttgttaaagattttttagaggttttttagtttttttaggattataggtatagattataaaaaaaaaaggttttatagtttgtatttttttttttagtttttttaattaattttttaagagttttttttttatttattttattttttattgttatttagtatattagttatatatgggttttagggatttttgttttttttatatgggatgtaattttgagatatttgtatagtttttttatttattattttttttaggttttaatttatatgttttttttttagatagttagaggttattttttatagttaagtaataaattgtagtttttttaaattttagtttttttttttttttttttttttgagacggagttttgttttgttatttaggttggagtgcggtggtttgaatttggtttattgtaatttttgttttttaggtttaagaatttntttgttatagtttttcgagtagttgggattataggtgtgttttatttcgtttggttgatttttgtatttttagtagagacgaagttttattatgttggttaggttgattttaaatttttgattttaggtgattcgtttcggtttttcgaaatgttgggattataggtgtgagttatttcgttcggttttagttttttttttttgttttgttttattttataatatgtattattatttagtatattatattttttattaattttttttttgtttttttttgtttataagattagaaatatagtgagaaggttatattatttttagtaaaattatgtttaatataaaataaatgtttaattaatatttgttgaatgaataaatttttttttagaaataatatttttatataaagtgtaatatttttttttatatatatgatttaggagtacggttgttgtgattagtatatattttgtttgtttaaggattatgatggaattgagttattgatgttaggattaatttatttaagaatttattattttaattatgtattagttatattagttaatatagttttattttaagtttaatatttgtaaggtattatgaagtatgtataatgtttattttaaagatgttatattaaaaatgagaggagttaattaaggattttagggattaaatggtgttttgaaagatgggtagagtttggattggtggtgggagagagagaatatttagtaagaggaatggcggaggtggagacgtagagttatatttggtagattgtgaatagatttatttgtttagagtagtgtatttatattgggattattagagtaaagtgtggataagaggtataatgtagaggttttaatgtgttaggttggggaatgtatttagtattttgttttttatgtgttttaaattagggtttttatttatttgttggtatttggtgataaggataaaaagtttttttttattttgttagttttattttaaataatgaagggaaatttataattaattgataagttatgttaaatatttttgtagtaatttaaataggaaatatgatgttaaatttttttgaatttttaaaataagagatttttaaataatttgaagttattattgtttttttgagattgtttttaaattttgataatcgttgattattttttttgtttttggaatttttgagagataaagtgtggttattatataagtattagggagttattataggttgatgtatagaggaagagagagttacgtttttaataatatttatatttgaaattattttattattattttttaatagttttattttgattttattgtagtaatttttattttattttttttaagtttttaaggttaaattatggttttataataaaaaaaaaaaaatttatgttttagaaagtataaaaattaaaggaaaggtttattagaggtattaagtaaaaggtaaatgtattttttgtttattaagttttttattttttttttaatggaagtaattttgtatgattttttttattggttttatttaagaaagaaaagaatgaaatttagttttttaatataagtatgatggtttgttaattaatataagaaatttcgttttatatatttatttagtaatttagggaatattagatttatttttgaaaaggagtttttaaaataattttaaattttttaaaattttataagtttgtgatttgtgttgttaataagagaaaaatgtattataaagtgttgtgaaaaattaaaattataattaaaatttagatttttgtattgggtatatatatagtttggtgggtagggaagatatttatataaataatattttagaaatttttgaaagtttttaatatattaataaaataatagatttttaaagttagaattttttatataatatagaaattttttgaaatggttttttatatggtggttataaaatttgtatatggaatatttgttagatttgtaggtaaataattttattttattaaatttttgttttttataatgatgtgattaaaaaaataatgtgtattttttggttttatttttaatttgtatatataattagatgtaatattttaagtttaacgttgtgttttatatgttatttattaaaatataagaagatatttgtattatttttattaagtatttttcggattaaatattgtttagttttttaatagttatttatggtaaagttttttgatgttttattgtagtgattattttttgttgaatatgtttgtgttgaataatatttgttttaaaaagtagtgtagtgtatgtatggtggagttattgttataatttgattttgatattaatttttttatttttatagtatatggtagaattaggtaatttatttttttttgttttgtttgtttattttttttatgttttaatttgtgtattaagtggtttttatatatttatatttttataatgtttaggaatgtgttgttattattgtttatgtaagatttggggtataatatttatattttttattaatttatagattattatgttttattaagatttgttttgtaagtaagtttaattaaaaattttattttttttttatttagtatgtttttattatttttgttattttagaaagatgtttataagattatattttgtttatttattttagtgtttttattttaaagagttttgtgagttagaagttattttgattgtttttaataaaattagtaatgtaattggttattttttttttataga

SEQ ID NO: 1342 - DNA, 9817 bp, Artificial Sequence
  chemically treated genomic DNA (Homo sapiens)
  unsure 2806, 7182: n is a or g or c or t
tttgtaaagagaaaatgattaattgtattattaattttattgagggtagttaaaatgatttttgatttatagaattttttaaagtgaaaatattgaaataaataaataaaatgtaattttgtaaatatttttttaaaatagtagaaatggtgaaaatatattgaataaagaaaaaataaaatttttaattggatttgtttatagaataagttttagtaaaatataatggtttataagttagtaaggaatataaatattatgttttaagttttatataaatagtaataatagtatatttttaaatattataagaatatgaatgtataaaaattatttaatgtatagattaaaatataagaaaaataaataaataaagtaaaagaaaataaattatttaattttgttatatgttatagaaatggaagaattagtgttaaggttaagttatagtaatagttttattatatatatattgtattgttttttagggtagatgttatttagtataaatatatttaataaaagatgattattatagtgaaatattaaaaaattttgttatgaatgattattgagagattagataatgtttaattcggaaaatatttagtaggaatggtatagatgtttttttgtattttaatgggtagtatgtagaatatagcgttgagtttagaatgttatatttaattatatgtataagttaaaagtaggattaagaggtgtatattatttttttaattatattattgtgaggaataaaagtttagtaaaatggaattatttgtttgtaaatttagtaagtgttttatatataaattttataattattatatgaaaaattattttagagagtttttatattgtgtgggagattttaattttaagagtttgttattttattaatatgttagaagtttttaaggatttttaaggtattatttatgtaaatattttttttatttattagattatatgtgtgtttaatgtaaggatttagattttaattgtaattttgattttttatagtattttgtgatatattttttttttattaataatataaattatagatttgtagagttttaaaaagtttgaaattattttaaaaatttttttttaaaaataagtttgatattttttagattattaagtaaatatgtgagacggagttttttatgttaattaataggttattatgtttgtattaagaaattgaattttattttttttttttttaaataagattaataaagaaaattatgtagagttatttttattgaaagaaagataaaaaatttaatgaataagaaatgtatttgttttttatttaatgtttttaataaattttttttttaatttttgtgttttttagaatatgagtttttttttttttattatgaaattatgatttggttttaaaaatttaagaagaataaagtaagagttgttataatgaagttagaatgaaattattaaagaatggtaatggaatgattttaggtatgagtgttattagaaacgtggttttttttttttttatgtattaatttgtaatgattttttaatatttatgtgataattatattttgttttttaagaattttaaaggtagagagaatgattagcgattgttagagtttgaaaataattttaaaagagtagtaataattttaaattatttggaaattttttattttaagaatttaagaaaatttagtattatattttttatttaagttgttatagagatatttaatatgatttattaattaattataagtttttttttattatttgaagtaaaattagtagagtagggaaaagttttttatttttgttattaagtattaataggtgaatgaggattttggtttgagatatatgagagatagaatattaagtatattttttagtttgatatattaagatttttgtattatattttttgtttatattttattttaataattttaatgtgaatatattgttttaggtaggtgagtttgtttatagtttattaaatatagttttgcgtttttattttcgttattttttttgttgggtgtttttttttttttattattaatttaaattttatttattttttaaagtattatttagtttttagaatttttagttggttttttttatttttaatataatatttttgaggtaggtattgtgtatattttatagtattttgtaagtattagatttagaataaaattgtgttgattgatataattgatgtatggttggaatagtaggtttttgggtaaattaattttaatattaatagtttaattttattatagtttttgaataggtaaaatgtatgttaattataatagtcgtatttttaggttatgtatataggggaaaatgttatattttatataaaaatattatttttgaaagaaaatttatttatttaataaatattaattaaatatttattttgtgttaggtatggttttattggagataatgtgatttttttattgtgtttttagttttgtgggtagagaaagataagaaaaaaattagtaaaagatatagtatgttagatgataatatatattatgaagtaaaataaagtaagaaagagggattggggtcgggcgaggtggtttatatttgtaattttagtatttcgggaggtcgaggcggattatttgaagttaagagtttgagattagtttggttaatatggtgaaatttcgtttttattagaaatataaaaattagttaggcggagtggagtatatttgtagttttagttattcgggaggttgtggtagangaatttttgaatttgggaggtagaggttgtagtgagttaagtttaggttatcgtattttagtttgggtgatagagtaagatttcgttttaaaaaaaaaaaaagaaagagaaattgggatttgggggagttgtaatttattatttgattgtaaaagatggtttttgattgtttgagaagaaggtatgtaagttaagatttgagaggagtggtgagtagggaagttatgtaagtattttaggattgtattttatatggaaagaataaaaatttttaaggtttatgtgtaattggtgtgttaagtagtaataagaagtaggataaataagggagggatttttaggaaattaattaggaaggttaaagaggggggtatagattgtagagttttttttttttatggtttgtgtttataattttgagagagttggggagtttttggagagtttttggtaaaggtgtgaagttttatgatttttgatttaaaattattattttcgttgttgtttttaatatatttaaggaaagagaagaaatggggagatttattagaaagttagtgtaataatttaggcgagaaataatagggatagagattaagatgtatattatggagaaaaagaaatagaaatattttatttattgattgattttggtaaaaatgaatatatataagaatttatatagatattaaattattgtaaagtataggttataaatatagtttttttatagatgagtttaggtaaacgtattgaagttttagtttgatatttttgaaattgtatttaataggtatgtttaatgaggaagtattttttttattaggtagaagttaatttagttatagagaaaatgaaaagtttatttttttaaggtgtttttaagtttattttattaagtgtatatttgatagttatttttagttgtgtaaatttaattttgtatttttgttggtttattaatagtattagcggagaaataattttaatttgtgttttacgatattaggatttaatggtataaaaatttattatatataataacgggaaataggggaaaacggataaaatttgtttgtttcgataaggtaatcgaaatggatatttttttaaaagggtgatatagggaaacgtacgaaaacgataatattagcgatattttataatatatatatataaatacgtttattttttttgttttttttattaaaaaatttttttattagtgataagagattggtaaaagagaaaagatataaataattaaaattaagtagattttaaatcgaagttaattttttttttttggtttaatattagattttaaaatatttttatttttttagtttatttgggaattaatggtatattttattaagatatttttattttttgtttatttttaattttttaatttagttacgttttattattatttttttaaaagaaagagttaaagagttttttgattagaatttcgatgattaaaagtttcgggtgtttatcggggcgtagcgttatattcgaagcgttcggtattgcgggcgcggttcgattgtagtcgagaagcgcggaattcgtaagtgggggtgggtttgcgcgttggggttcgttcgagggttattttattttcgttagtttttagttcgatatttgtcgcgggattcgtgcgacgttgggcgacgcgttaagtttattttttttcggtttattttagttagttatttcgcgaaaatttcggtgcggttagagttagcgtttttagttagtttaagatacgtaaggaaaatgagcgggtgtgggataggcgaattcgggcgtttttttagtgtttcggttttttaaagagaatcggggtaaaggaaaatttggatttttatttagaaatttttcgggagtaggtggtgggaaagttcgaatttcgcgtagggtattttttttttttattcgcgtcgtttttatatttttcggtaggagttcgcgaacggttcggtgatttggagtaatttgcgatttgtttgtattggagattttattttggttttttagagttagtttcggatattcgtatcgttttttttttttttttattttttattttgttaatgagagatttcgtagaagtttttggaaaggtataaattcgtaatttattttttttggaatttgtttttttcgtttttgtttattaaagaaggaagggtgggaatggaagggagtagagtggggaagattcgttggtattttttttgtttagattttaaagattgatgaagttaggaagagacgtttttttaaagtcgaattttattttatttcggattacgtgacggcgtttcgcgagtagcgtttgaagtttttttaattttataaatattttataaaggtgtatatttcggggaagtattgtttaggaattttggaaagaaaagtaatttaatagaagttatatattattcgatatagatttttcgcgtaggggaaaggaagttttaatttttatagttttcgatttcggggaaggtagggtagtttttcgaggtttgaaaaagtcggtgttattgtgtttttttttgtttgtaggttagtgttattttgtggtcgaagttatattcggttggagagttcgagcgttagtttaaattaggaattaaagggttcgttgggaaatatgaaattcgttataataatggtattaatatttttttttgtttttttttgtgacgtttaaataatttttacgttagtgtcgagaatttgttttttttattttataagtgaataaagagaagatttttaaaaagttaaagtagttaatcggtttttttttttttggtttattgagaaaatgtattaagttagatttgtttttagcgtttagttgttttttagtttttttaggggagaattatgagttgaatatttttttggtggtcgaaaagcgttaatgtaattttttcggtgattagtattatagtattgaatattattatttcgtcgtttttttttcgattcgttcgattttttgtttttcgtattttttttcgtggttttttttttttcgtttttgtatattatgcggataaattttcgttgttatttttcgttttttcgtcgtttttttttttttattttcggttttttacgttttcggttttgttttggttatattgttcgtgggtcgttattttttgattttttttttagttttttacgttatcgtcgtatttattattttttttttatttatattatataaattttgtagacgatgaattgatgtatatgagtagaattttttttaaataaaattgttaaaaataagaagtttttttattaaagatacgagtattgtttagagaatttataaagattttattagaatataattttaatggtagttttttttttaattaaaattaaaataaaattttaagataagtggatttatttgaattttatattgttaaaaaacgttttttttttttgattgttaggttgaataaatatatttaaggtttagtataagtttatttatatagattagtgatgaatataatttttggatgtttttttaagaaagttttttaaaatatgtgttattagatatatttttatatagttggaaaggtattgtaattaagaattaaaatgttatgattatgtaatgattgtattattagtgtataataatagatataagtatatatataaaaatttttaatggttaagtagagtaaaatgataatagatttatttatatatatatatatatatatatatatatatttttttttttaattaaggtataataatttttattaaggtataatttaggaattttaatttttttagggaagaataattaatatttatttaggtttttatgtattttttgtttattttattgttttaagttatattttgtttttagaaggaagttttttttatggttttgattattaaattggttatttttagtttgttataagaattataaatgaagtaatttaattttttattaagaatatatttttatgtagaaattattattatgttagtaaatattttggatttgagaatataatttggatttaggtattatgttttttttattttttaagaatattaataaaggtatgtttgttagagttttgaattattatggttattgtattttattattttattaatttaatttttatgaagtgttttttttaaggaaaatttgtgaaatcgtatttttgagttattaatgttagatattaatttttgaaagattattggttttaaggatttttttttatgataattttatgatataaagagaagttttgaaatatttaatagtggttgggggcggtggtttacgttgntaattttagtatttttggaggtttaggtatggtggattatgaggttaggagttcgagattaggttggttaatatagtgaaattcgtttttattaaaaatataaaaattagttaggtgtggtggtgcgtatttgtaattttagttatttaggaggttgaggtaggagaattgtttgaatttaagaggtagaggttgtagtgagtcgagatcgtacgattgtattttagtttgggtaatagagtaagattttgttttggaaaaaaaaaaaaaaaaaaaaagaaatgtttaatagtaaaattatataattttttaggaatattatttattaggattttttttaatgtgaaaaatagagaaattagatatggtttaatggttaaatataatataaaattttttaataatgtaattttatagaagatttaaaatatgtaaagtagtttgaattttttagaaaatatttattaaagagtttttttattttaattttaagattatatatttttttattttttagtgaataattagttgtttatttttttatttgggatttaaattagataaaattttatttttgttagggagaattttttttttatttttgtgtatttttttttgtagttttataatagtttgatttataaattaaggggaattatgttaatgatttaattttatgtttttttgaataatagttttgttttgtgatataaattgagggataggatttatttattaaatttttgtaaatttaagttttgtattttaaataatggaataaatttatggtttggtttagtttttaaattttatgatttagtaattgtttaaataaaagtgtgatagtatgtttgttattggaattgaaatatattaattattagttttttgaggaatttttgttataagagttaaagtttttgaaatgttattaggttttgatataggtaaattattatgaattgttatttagaagaaatttaataggtattaatattatacgagaaaattgaaatgtatatgatattgataagggggtaattttatgggggtagaattatgatgaagtacgttagtgaattagtttatattttatgaattgattttgtgttaggattttttttttttttgtgatttatttgttgtatttttttggatttttgacgtttaagaatgtaaagtataattttattttatggattattaagaaaaaaatgtttttagtaaagtaatggtatattattaatagtaaatgaatattaaaatattaaaatgttttttaagtttatattttaaagttaatgaaatatagttggtaaagagttttgatttaattagtataattaaatagttagtataattattttatttatttgatttttggagagtattaattagtagaaaaaaagtgatgattaatttagttaaaaatgtgagtatataagtgtatagataatttaatgattttttttgtgtagaaaatatataatattatttgtggatttttttttgattttgatttgaaatgtgaatgttttttagtaaagtttttattttgttatatgggttgtatatttcggggtatttttaaaaattttgttataataaggttttagataagtaggattttaaaatttagtaaatagttaaatttttttttgtatgttttatatttttagatattttttagatatttaaaaaaaagtgtaatgttatattataaaattataatattatgtttttattatatgatataatgaaaggagttttgttattgttattattattgtttttaataattattattattattttttttatatatttttttgaagagataaaataaaaatagttggtaaaaagaataagtatgaatgttattataatagtttttattatttgtgataaatatttttatttggtcgttttgtttttgattttcgttttttaaaattttaagtttggtattagatttttttatagtataatattttagatggttaatgttaatagattagattttgtttatgaagaaaagttatgaaggtataattttttttaaagaaaggagaaagattgggtgtagtggtttatgtttgtaattttagtattttgggaggttaaggcgggtggattatttgaggttaggagttcgagattagtttggttaataaggtgaaattttgtttttattaaaaatataaaaattagttaggtatggtggtatgtgtttgtaattttagttattcgggagttgaagtaggagaattatttgaatttgggaggtagaggttgtagtgagttgagattgtattattgtattttagtttgggtaataggagtgatattgtatttttaaataaatatatgttgtttaggttgattttaaatttttgggtttaagtaatttattcgttttagttttttaagagtgttggagattataggtgtgaagttattgtgtcgggttaagttttggatttttttataagttttttaattttttaaaatgattaaataaattgtttaaaattaaaatttaagttattttttttttttttttttttttttttgttttttttttttttttttttttttttgagatagagtttcgttttgtcgtttaggttggagt

SEQ ID NO: 1343 - DNA, 6191 bp, Artificial Sequence
  chemically treated genomic DNA (Homo sapiens)
tgttattaaagttgaagtgtaggggtatgattacggtttattgattatgttagttttaattttttgggtttaagtaaattttttattttagttttgttttaagtaatggagattataggtgtgggttattatttttagtaaattttttttttttgagacggagtttcgttttgttatttaggttggagtgtagtggcgcgatttcggttttttgtaagttttatttttcgggtttatattatttttttgttttagttttttgagtagttgggattataggagttcgttattacgttcggttaattgttttttgtttgtttgtttgtttattgggtttttttttgtatttttagtagagatagggttttattatgttaattaggatggtttcgattttttgatttcgtgatttattttttttagttttttaaagtgttgggattataggtatgagttattatattcggttatgtttagttaatttttaaattttttgtagagatgagattttattatgttgtttaggttggttttaaatttttgtgagttttttagttaatagaagaaatagttaagtatggtggtataggtttgtatttttagttattcgagaggttgagaagggaggtttttttgagtttaagagtttaaggttatatgttaggtatggtggtttatatttgtaattttagtattttgggaggttgaggtgggtggattatttgagattaggagttcgagattagtttggttaatatagtgaaatttcgtttttattaaaaaaaatataaaaattggttgggtatagtggtttatatttgtaattttagtattttgggagattgaggcgggcggattataaggttaggagtttgagattagtttggttaatatggtgaaattttatttttattaaaaatataaaaattagttaggtgtggttggtaggtgtttgtaattttagttatttaggaggttgaggaagaagaattatttgaatttttgtttggttttttttttttttttggtttgttttttttattttgttatttgttttttttataagtattgttttaaatgttatttgtataagtatatttatttaggttagtttttaaggagtgtaaatttaaaaaaaatttagatgtgatggtgtaaaagtattagtaatttagaataaggatcggtaatttagtgtttaatagatagatttttaattggaataattgggattttttaaaagtgtagtgaatatgttagattggtatgtataattatattttggtgtatttttttgatgtgtagaaataagaatgttaataaagtaattttatattttttagttagtgttttggattagatttaaaataaggtaattatatgtaagatttgggaagtgtaaataaggtagaagtattattattttattatttttgatgttaaatattattttggtttttttatatagggtttttaatattggtagtgatagtacggttttagagaggatagtttttatgatagattttaatttagttgttagttttatgatagaatagttgggagtatttttggtgatttggtttgaggtaaattttttaaaattatttttgaaaatttaatttaaagtttgtttttttaattgttttaatgattttgtaagtcgtttaatatttattgtgtgtaaatatttttgtgtataaattcgttagagtgaattttgttttttttaattagattttgaatatataaaatttgttattaaaagtagggtgttattataataaatttaaaatatgtagtattggtttagtaagaggatagggaggtacgaatatcgatattatagattagaaaggtgatgattattttatgttttagtaaaatatttgataaaaacggttatattaatgttttgaaaggtagattttatatttattgaatttatagttttatagtaaaagattataattaaggatattggtttgtgttagtgttttttattgtttttaataaggttttatttgagatatataaatttaggttatagttaattagtttgtaattagtgatgaaaagaaatttagtggataggtatggtggtttatgtttataattttagtattttgcgaggtcgaggtgggtagattatttgagtttagaagttcgagattagtttgggtaatatggtgaaatttcgtttttattaaaaatataaaaattagttaggtatggtggtgtacgtttgtaattttagttatttgggaagttgaggtaggagaattatttgaatttaggaggcggagattgtagtgagtcgagatggtattattgtattttagtttgggcgatagtgtatgatttcgttttaaaaaaaaaaaaaaaaaaaaaaaaaaataggataggcgtggtggtttatgtttgtaattttagtattttgggagtttgaggtagatggattacgaggttaggaaattaagattattttggttaatatcgtgaaattttgtttttattaaaaatataaaaaataaattagttgggtgtggtggcgggtgtttgtagttttagttatttggtaggagaatggtgtgaatttaggaggtagagtttgtagtgagttgagattatattattgtattttagtttgggtaatatagcgagatttcgttttaaaaaaataaaaaataaaaaataaataaaaaaaaaaatatagttttttgtgttaagaatttagaattaaaattgtttggtaatttgaaattatgggataaaaatatttaattgtttttgatttttaaattgaggtagtggtaagagttaattagagagttagttttgtagaaagtaattttgatattaatattagtagaagttgggtaaggggtatataggaatattttatgttatttttgtgatttttttgtaaattagattattttaaaattaaaaagtatattaaaataggttaggtgtagtggtttatgtttataattttagtattttgggaggtcgaggcgggtagattatttgaggttaggagttttagattagtttggataatatggtgaaattttgtttttattaaaaatataaaaattagttaggtgtggttggtatacgtttgtagtttaagttatttaggaggttgaggaagaagaattatttgaatttaagaggtagaggtttcggtgagttaaggtcgcgttattgtattttagtttgggtgatagagtaagacgttattttaaagtaaataaatatatatatatatatatatatataaaaagtagtcgggtgtggtggtgtatgtttgtagttttagttatttaggaggttgaggtaggagaattgtttaaatatggaggatagaggttgtagtgagttgagattatgttattgtattttagtttgggtaatagagtaagattttgttttaaaaaaaaaaaaaaaaggagtttgaggttgtagtaaattaagatggtattattgtattttatattttattttagtttgggtgatagagcgagattttgtttttaaaaaaaaaaataaaaaacgaaaaattaaaaaaaaaaagggtgggggtggaatagaataaataattttgagaagggatatgatttggtgataattttaagtgaattagtggttgaattaggattagattttagtgttttattttttggggacgttttgggtttgaatttttaatgtatgttttttttgtagtgtttttttttgtggtttttaaagggaaattgaagtttttgaggatatgaagattcgtattaggttaacgaggggttttggaattttagattaaagagaataagaaagatttgattttgtgtgtgtgtacgtgtgtgtgtacgtgtgtgtgtgtgtgtgtggtagaggggggtgtggttatggggtattgatatgaatacgtaaggggtaggaagtatttgaaattagagttaatttgggaggtatagaatacggggtgtttggaaggggaatagatgtgttgtggggtatagggtaggttgggaggggaataaaggtttattttatgggtaattagattttttcgttagggttggttatttttgtttttggaaaatgttttataacgttttatgttgtgtgtgtgtgtgaatcggtcgatgtgaatcgaatgttgatgtaagaggtagggtattcggttgcggatgggtaatagggcgtgggttggtatatttatttgtattagtgtttagagagggggtgtaggttgaggagttgtttagagtatcgtttatatttttagagtatttgaagtcggtattttaatgataggtgagtagtggtttttagggatagagtttgattggggggtggagtggaggagattattaggttggtggagatttgaggaagtaagaaagtttttggttttttgtggaagtttttggtttttcgtgggagttttagtttagaatatagttttggatattagatttaattttattgggtggagttttttatatttttaagcggtttattttttttttgtttgaagttcgtggattaaagtttttggagttttttgggttgtcggagaaggtgaggggtttagttaaggggtagatatgtggttttagtttgttttttttagagtttagggtttttttgtattttttgtggtaggagatttgtttttgggtatttgtttttatatgagaggatagtaattttgaagttgttatgttttatatatttggaatgtttgtttgagaggtggaggtgatggatttaagatgggggttagggattttagtttttttattttttcgggaggaggagggaaaggattaggcggttttaattttgggttattagaaagaggtaggatatttattatgttttatgggtttttataggtgataagggtttttaaaggttaagcgggtttagttatggttttatttttagttcgattagttcgattagtttagggttatagtaagtattttttagagagatttatttgagtgagaagatttttattttagatataaaatcggtgggatgttggaaattttttgggggtttgtaagattgataggattttgaaggattttatgggttggagaatggggtttttttatgattatgggtggtaagttttttttaggtttgagtagtagtggtggatagtggtaattgtttttttttgttttcgtttttagtgtttagttggggtgttttagtatttgtttaaaagcgattaaatgatttttttaatgaattttagtttttttatgaaggaaaagaggtttagggggaattgggattggagttttgaggatatgttatagtatttaggaaagggtatagggagaagtgaaggaggttgtaggttggtatttagtatttaggatgttgttatttgtatttttagtattttttttttttttggagatggagtttcgttttgtagtttaggttggagtgtagtggcgcgattttagtttattgtaattttcgttttttaagtttaagcgatttttttgtttcggtttttcgagtagttgggattataggtatgtattattatgttaggttaatttttgtatttttattagagatagggttttattatgttggttaggttggttttaaattttttagtttaagtgatttatttatttcggttttttaaagtgttgggattatagatacgagttaacgtttttagtttttaatatttttagtagatttttaagttaatatgttatgttttggaatagggtggggggattatagttttagcggattatagagaggaggtttcgtggtttgaaaaggagttggtaagggaggagttgggttagggaagtttggtttttttatttttttagatagttttttgtgaggtttttgaggatttgataagttagggtttgaggggtaggtagtttaggtgtaagtcggttgttgagtttaatagatttagaaaaagattttttgtgatttattagagtatgttgttttttttatttatgttttttttattttttgggtggtagatttaggaatgggttatggagggtagggttgggttgatgagtttgttggggtttttttaggggatggttaaggttagttgttattatttttatatttaggatttttttattttattttttttattttttaatagg

SEQ ID NO: 1344 - DNA, 6191 bp, Artificial Sequence
  chemically treated genomic DNA (Homo sapiens)
tttgttggggggtgggaggagtagagtgagggggttttgggtatagggatggtggtagttggttttggttattttttagaggagttttaataggtttattagtttagttttgttttttatggtttatttttgggtttgttatttaagggatggggagggtatgggtggaggaagtagtatgttttgatgagttatagaggatttttttttggatttgttaagtttagtagtcggtttgtatttgaattgtttgttttttaagttttgatttgttaggtttttagagattttatagggggttgtttaagggggtgagggggttaagtttttttagtttagttttttttttgttagtttttttttagattacggggttttttttttgtggttcgttgaggttatggtttttttattttgttttagagtatggtatattgatttagaaatttgttgaagatattggaggttgggagcgttggttcgtgtttgtaattttagtattttggaaggtcgaggtgggtggattatttgagttaaggagtttgagattagtttggttaatatggtgaaattttgtttttagtaaaaatataaaaattagtttggtatggtggtgtatgtttgtaattttagttattcgggaggtcggggtaggagaatcgtttaaatttgggaagcggaggttgtagtgagttgagatcgcgttattgtattttagtttgggttatagagcgagattttatttttaaaaaaagagaagatattggaaatgtaggtgatagtattttagatgttagatgttagtttgtagttttttttatttttttttatgtttttttttaaatgttataatatgtttttaaggttttaattttaattttttttgggtttttttttttttataggaaagttgagatttattgagaaagttatttaatcgtttttagataaatattgaagtattttagttaagtattggggacggaagtaggaaggggtagttgttattgtttattattgttgtttagatttggaagggatttgttatttatgattataaggagattttattttttagtttatgggattttttaggattttgttaattttgtaagtttttaggaagtttttagtattttatcggttttgtgtttgggatggggatttttttatttaggtaggtttttttgggaggtgtttgttgtggttttgggttggtcgggttggtcgggttggagatggaattatagttggattcgtttagtttttggggatttttgttatttgtgggggtttatgaagtatggtgagtgttttgtttttttttggtggtttagagttaaagtcgtttgattttttttttttttttttcggaaaagtggagaaattaaggtttttggtttttattttgggtttattatttttattttttaaataaatattttagatgtgtgggatatggtagttttagaattattgtttttttatgtgaggatagatgtttagaggtagattttttgttatagagaatgtagagagattttaggttttaagaagggtaagttgaggttatatgtttgttttttggttggattttttatttttttcggtagtttagaaagttttaggggttttgatttacggattttagataaaggaaaggtagatcgtttaggggtgtgaaggattttatttagtgagattgagtttggtgtttagaattgtgttttagattaggatttttacgggggattagaggtttttataggggattaagggtttttttgtttttttaagtttttattagtttagtgattttttttattttattttttaattaggttttgtttttaggggttattatttatttgttattgaaatgtcgattttaggtattttgggagtgtgagcggtgttttgggtagttttttagtttgtattttttttttgggtattggtgtaagtaagtgtgttagtttacgttttgttatttattcgtagtcgagtgttttgttttttatattaatattcggtttatatcggtcgatttatatatatatataatatggggcgttgtgaaatattttttaaaggtagaagtggttagttttggcggaagggtttggttatttatggagtggatttttgttttttttttagtttgttttgtgttttataatatatttgttttttttttaggtatttcgtgttttgtgttttttaagttagttttgattttagatgttttttgttttttgcgtatttatgttaatattttatgattatatttttttttgttatatatatatatatatacgtatatatatacgtatatatatatagagttaggttttttttattttttttgatttggagttttaagatttttcgttggtttaatgcgagtttttatgtttttaaaggttttagtttttttttgagggttatagaggaaggtattgtagaagggatatgtattgaagatttagatttaggacgtttttagaagatggggtattgggatttggttttggtttaattattgatttatttgagattgttattagattatgtttttttttagagttgtttattttattttatttttattttttttttttttggtttttcgttttttgtttttttttttagagataaggtttcgttttgttatttaggttagagtgaggtgtgaagtgtagtggtgttattttagtttattgtagttttaaattttttttttttttttttttgagatagagttttattttgttgtttagattggagtgtagtggtataattttagtttattgtaatttttgttttttatgtttaagtaatttttttgttttagttttttgagtagttgggattataggtatgtattattatattcggttattttttgtatgtatgtatgtatgtatgtatttatttattttgagatggcgttttgttttgttatttaggttgaagtgtaatggcgcgattttggtttatcgaaatttttgttttttgggtttaagtaattttttttttttagttttttgagtagtttggattataagcgtgtgttaattatatttggttaatttttgtatttttagtagagatagggttttattatgttgtttaggttggtttggaatttttgattttaagtgatttgttcgtttcgattttttaaagtgttgggattataggtatgagttattgtatttggtttgttttaatatattttttaattttgaaataatttaatttgtagaaaagttataaagataatatggaatgtttttgtatattttttatttagtttttgttaatattaatattaaagttattttttataaaattgattttttagttaatttttattattgttttagtttgagaattaaaagtaattggatatttttattttatggttttaaattattagataattttgattttaggtttttggtatagagagttatgtttttttttttgtttgttttttgttttttgtttttttgagacggagtttcgttgtgttgtttaggttggagtgtagtggtgtgattttagtttattgtaagttttgttttttgggtttatattatttttttgttaagtagttgggattataggtattcgttattatatttagttaatttattttttgtatttttagtagagatagggttttacggtgttagttagaatggttttgattttttgatttcgtgatttatttgttttaggtttttaaagtgttgggattataggtatgagttattacgtttgttttgtttttttttttttttttttttttttttgagacggagttatgtattgtcgtttaggttagagtgtaatggtgttatttcgatttattgtaattttcgttttttgggtttaagtgatttttttgttttagttttttaagtagttgggattataggcgtgtattattatgtttggttaatttttgtgtttttagtagagacggggttttattatgttgtttaggttggtttcgaatttttgagtttaggtgatttgtttatttcggtttcgtaaggtgttgggattataggtatgagttattatgtttgtttattagatttttttttattattgattgtaagttgattagttatggtttaaatttatatgttttaaataggattttgttgaaagtaataagaagtattaatatagattagtatttttaattgtaattttttattgtagagttataggtttagtgagtatgagatttgttttttaagatattaatatgatcgtttttattaaatattttattaaggtataaaatggttattatttttttaatttgtaatatcggtattcgtatttttttatttttttattaagttagtgttatatgttttaggtttgttatggtagtattttatttttaataataaattttgtatatttaaggtttagttgaagggaataaaatttattttagcgagtttatgtataaaggtatttgtatataataagtattaaacggtttatagaattattaggatagttgaaaagataggttttaagttaagtttttaggaatgattttgagaggtttgttttaaattagattattaaagatgtttttagttattttattatgaagttaatagttgaattggaatttattatgaaagttgttttttttagaatcgtgttgttattgttaatattggaaattttgtatagaaaaattaaggtgatatttagtattagaaatagtggaatggtaatgtttttgttttatttatattttttagattttgtatgtaattgttttattttaaatttgatttagaatattaattaagaaatgtagggttattttattagtatttttgtttttgtatattagggaggtatattagaatgtggttgtgtatgttagtttagtatgtttattatatttttgggaagttttagttgttttaattagaagtttgtttgttaaatattaggttatcgatttttgttttgggttattaatatttttatattattatatttagattttttttaagtttgtattttttagaagttgatttagatgaatatatttgtgtaaatgatatttaaagtagtgtttatagaggagataaataatagagtgggagaagtaggttagagaagaagaggaagttaagtaagagtttaagtaattttttttttttagttttttgagtagttgggattataggtatttgttaattatatttggttaatttttgtatttttagtagagatgggattttattatgttggttaggttggttttaaatttttgattttgtgattcgttcgttttagttttttaaagtgttgggattataggtgtgagttattgtgtttagttaatttttgtattttttttagtagagacggggttttattatgttggttaggttggtttcgaatttttggttttaagtgatttatttattttaattttttaaagtgttgggattataggtgtgagttattatgtttggtatatagttttaaatttttgagtttaagagagtttttttttttagtttttcgggtagttgggaatatagatttatgttattatgtttgattgttttttttattaattgaggggtttataggagtttgagattagtttgggtaatatagtgagattttatttttataaaaaatttaaaaattagttgggtatgatcgggtgtggtggtttatgtttgtaattttagtattttgggaggttgaggagggtggattacgaggttaggagatcgagattattttggttaatatggtgaaattttgtttttattaaaaatataaaaaaaaatttaataaataaataaataaataaaaaataattagtcgggcgtggtggcgggtttttgtagttttagttatttaggaggttgaggtaggagaatggtgtgaattcgggaggtggagtttgtagagagtcgagatcgcgttattgtattttagtttgggtgatagagcgagatttcgttttaaaaaaaaaaaatttgttgggagtgatggtttatatttgtagtttttattatttggggtagggttgaggtgggaggtttgtttgagtttaggaggttggggttggtatgattagtgagtcgtgattatgtttttgtattttagttttggtgata

SEQ ID NO: 1345 - DNA, 5718 bp, Artificial Sequence
  chemically treated genomic DNA (Homo sapiens)
aaaaaaaaaagttaggtgtggtggtttatatttgtaaatttaatatttcgggaggttaaggtgggtagattatttgagtttaggagtttgagattagtttgggtaatatggtaaaattttgtttttataaaaaatgtaaaaattagttagttatggtgtgtgtttgtagttttagcgatttaggagttgaggtgggaggattattcgagtttaggaaattaaggttgtagtgagtcgttgatcgttattgtattttagtttgggtagtagagcgagattttgttttaataataataatgataaaaattttttatttattttgtaattattaagaggatggttagaagtttttgttttttatttgttttttttatgttttttattattgttgattgagtatatttgtttggatgttgaaaattgttaggtagttgaattttttggtatagtttttatttgtagtttgtatcgggttttaggtaattttatattgtagggtagggtttagtatatatggtggtttttttttgtgattatagttataattatttgtttatatattgtttttcgttgtttttttattataatagtagagttggttagataggatgatttgtaaatttaaaataatatttttcggttttttaggaaaatggtttttggtttttgatttggaaaaaggaatttatgtgagggagttagaattcgaataaaaaaaaaggaggtggggtgttaaatttatttaaattgtttttgtttgtgttcgtttagttgtttattggtttattgagtatgggataaaagtatttttggttggtttatattgtgaatttgggaagaagatagttttgtgaatattggtaatttatagtgtttaaaatttaggtaatgggattgtaaatgatagtattttttgttttaatttataaatgtagtttaaaattgtttattagttaataaagtattgatgggagttgtgatatttttatttggttttatggtagtatttaatatttaggattttatttaagttttaaggtgaaatttttgagtattgaaaatgtaaatatattttaagtaatataatatatttttagtagttatataaattttttagggttattagtagaggattgttgtgaaatattagtttttagattttgtatttgttttataggcgatatgaaaggtgaggtttatttatttggtatcgttgggatggttaataaaggggattgtttgtagaaaggggagagcgttaagttttaattgtgtgttttgggttaaaatgtataaattatggtttataatattatatttttgcgtagggttatagtggaatgtgtgaaagattaggtaagtgttagtatttttgtatttgaatttgatttttttatgagttggtaattaaaatttttaaatatttttagttaaggggaaattattaatatttattcgtttttttatttttattttatttttttttagttatttgaggtagtttaataaaaatagaaaattatataaaaagtgattatattagtaatgagaaagtaagattggtattagtaattaatattatgtaatggggaaaataagttaggggtgagatttttagaatagaaggattatatggttttgtatatttttgtttagagttttttttgtatattatataaatatagaaattacgtttaaaagtatttaaaaaataagtttagggtaaataaatttagttttatttttgagattttagggaaatttgagtttttagaatgttttttattagtatagagaataataatattttgtatggttgttattataatttagtttaattttagaggggatttaaataatatatatgttgaagtaatagttttttgatgagtttgtttaatttaaaaagtttagtttataatatacgaaggaataaggtaagttttatttgtttggtttaagtttgtgatatagtgaatggtatttttagagatatattttttttttgataggttttgttataggtagttggattggagtattaatattaatattatgttttatatatttttttagataggggtaggtattgtgttttatttagagtgaggtgtggtatgtttttttttttttatttattttttttttttagtttggttttattaattatgaagtaggagatagtaagaagttttttttttatgtgaaagaagtttaggatggtattgagttataggtaggagatgaggtggagtttttagtgatttttaattagcgtattggtaagtgtagcgtttgtaatgtttggcgagtttggtgagttttgttgttgtggtttgattagtaattattttggagtgttttaattttatagtttttgttttgttatattatttttttgtgttttgttttttgttatttattattttttgatattttttatttttagttgaatataaaaagattgtttagtatatgttttttaaaatttttgttaaatttttttttttttattaagttatttttaggttatatgttatttaaaattttaatagtttagttatgttgatttataatgtcgttttgtttttttagagatagttttatagtttgattcggttatttaggcgttattacgatttattgtagatttaattttttgggtttaagtaatttttttacgttagtttttttagtagttgggattataagtatgcgttattatatgtagttaattttattttttgtagagatatggttttattgttttgtttaggttgatttcgaatttttgggtttaagtgttttttttgttttgtttttttaaagcgttgggattataggtgttagttattatatttgttattttgtttttttatgtatttgtggaattggttatttttgattgtatttaagtttagggtttgtaaatgattttttttatttttattaagttgggattttgagttggggataataatatataaataaatttgtttgttttgtttttttagttaggtatatgaggtaagagttttattataaaaagtgagttatttgggtagttaggtggaaaatatatttttttgtaagtgtttgttgtttgtttattaagtgtggtttttttttattttttgatttaattatagtgagggttttaaggttgttgtagtttttcgatttgatcggttggttaatcgtttgaagaatattattttggatgatgttagtgtttttcgtttaatggtttttcgttagttaaggggattagataatttaatggtatgagggtatataaggtttgggggaggttaattgatagattaatataaaatatgtggttttatttaaataataggttaggaaatttaatgaagtagggagatttttatattgtttataattagttaggattttttatatattggtttagttttttaatttaatggttgtttatagtaagaagtatatttttttttttgatgttttgaagatagtttaggtaatgaatgggttaggagtgtttattgtggatttttttttttaggaaagaattagtattgtataagatgattaaaaataatgtttttgtagttttatttcggaatagtgaatgtattatgattgttgtgcgtttaaattattaattgtagggtttttttttttttttttttataggggtttggtgtagaaagaaagattcgttaagttggtgttattgattaattatatttataaagtatattattaatttattatgattaagttggggggaatttggtgaagggttttgaatatttttttttttatttttttcgaaatttggaatatttattttattgagttattatattagttttaatatttttttcgtgttatgtttaaaaaaataaataaatttaagaaaattattttaaataatgtatagttgtagtttggaaaaatttaaggtggcgttttatagtattaattttaggagttttatttggtgtatttaacgtaattggtaattgtagaatttattttgtttgtgtaagtgaaaaatatagattgttattttgttggttttatgaaattttgtattttttattatatattttatttttattaattatttttggtaagatgttttgttttagtatttagttgtattttttttttttttttttttgtttattatgttttaattttgaggattatatgagggtagaatatattattttttaaaaattataaaaatttgtataggtaaattattttttaaagttgatggttaaattttaaaatgttattttttatattatttataattttgttataatttatttaaagaagtttggttatattttagtgaaaatttttttttagagtaggttttttttcgtgggttggggggtaattttattataattagtaagtatggtgtagaattttatgtaaatgaggagtgttagtagtgtgataatttaaatatatttaaataaaaataaaaaaaatgaatgtataaatttgttgttgtttagattattgtagtttttaggattcggttttttttattgatttaaaaataaaataaaaaaaaataaaaaagttgtgtttgaaatgaattttgtttttttttataagtagtcgtttggttattgtgttttgtaaaatatagatatttgatttttggtgtagtttttgtttaattttatattacgggaatggatgggtttgattttttggttttttttttgaattggttatatatagggtttttggttagtggattgaaggttttgtttaagatgataagggttagtttaggggatgtgggggagggcggttttatttttttttttgtcgtttgaggttttgatttttgggtaaagaggtcgtttatttttgtaaatacgaaatatttttgttttttttagttttttgttaatggcgaaagaatggaagcgaataaagttttattgatttttgagatattagtatttagcgtttttattattgaaacgtttcgtgtgggaggggcgggtttgggtgcggtttgtcgtatgattcgtggttcggaggtttacgtggtcggggcggggatttaggcgtttggggcgtcgattgattacgtagcgggcggggtcggaagtgtcgttttttggtgggggttgtttatggcggtttcggggtttttaatatttttttcggttgtggttttaaatttgtttaaagtagaggtagtggagtttgaggtaagtttattttatgtatagtgttcggttttgggttgtggaatgtttaggcgttttattgatgttagaaatggagtagaatttattagttggagataaaggttttgggcgggggtttttttatttggtgtttacgtggggagatttttggagatagaagggagaatgggaaggagttgcggtttggaggttttttgttagagttgagaagttttcggggagtaataggaagggggatttttattgtttaggttgagggcggggtttaaggattgttgaaaaatagttaaggatgggggttgttagaaaattattttagaagtgtgaggtcgatattaattcggtgtttttgcgttttttagttattttaagaattaaatggaaggttatattagggtttttatttttattgattatagaaagttttaaagtattgtagatgtggttcgttaattaattttgattattggtttttaatagg

SEQ ID NO: 1346 - DNA, 5718 bp, Artificial Sequence
  chemically treated genomic DNA (Homo sapiens)
tttgttggaaattagtaattagggttaattggcgagttatatttatagtattttaaagttttttataattaatggaaatgaaaattttagtgtgattttttatttggtttttaaagtgattagagaacgtaaaaatatcggattaatatcggttttatatttttggagtagttttttagtaatttttatttttagttattttttaatagtttttgggtttcgtttttagtttaagtaatggaaatttttttttttattatttttcgaaggttttttagttttagtaggaagtttttaggtcgtaatttttttttatttttttttttgtttttaaagatttttttacgtaggtattaaatggaaggattttcgtttaaggtttttgtttttagttgatagattttgttttatttttggtattagtgaaacgtttgaatattttatagtttaaagtcgaatattatgtatgagataaatttattttaagttttattgtttttgttttggatagatttaggattatagtcgggaaaaatgttggagatttcggaatcgttatgaatagtttttattaaggagcggtattttcggtttcgttcgttacgtaattagtcggcgttttaggcgtttgagttttcgtttcggttacgtgggttttcgaattacgagttatgcggtaggtcgtatttagattcgttttttttatacgggacgttttaataatgaaagcgttaggtgttagtgttttaaaaattagtaaaattttattcgtttttattttttcgttattaatagaaaattggagaaagtaaaaatgtttcgtgtttataaagataaacggtttttttatttagagattaaaattttaaacgataagggggaagataaaatcgtttttttttatattttttgagttgatttttgttattttagataaagtttttagtttattggttagggattttgtatatggttaatttaagaagagggttaagaaattagatttatttattttcgtgatataaagttgaatagaagttatattaagggttaagtgtttgtattttataggatatagtaattaggcggttatttataaaaaaaaataagatttattttaggtataatttttttatttttttttgttttgtttttaaattagtaaaagaaatcgggttttagaagttgtagtgatttaagtagtagtaagtttgtgtatttattttttttgtttttgtttaaatatgtttaaattattatattgttggtattttttatttgtatgaaattttgtattatatttattaattgtagtaaagttattttttaatttacgaaaaaaaatttattttggaagaaaatttttattgaaatataattaaatttttttaagtggattgtgataagattataaatgatatgaaaaataatattttaaaatttggttattaattttaagaaatggtttgtttatataaatttttgtaatttttaaaagataatatattttatttttatatggtttttagaattaaagtataatgaataggaagaaaaaggaaaagaatgtaattgagtgttaaggtagaatattttgttagaagtaattaatgaaggtagagtatataatgaaaagtgtagaattttatagggttaataagataatagtttatattttttatttatataggtaaagtggattttgtaattattagttgcgttaaatgtattaaataaagtttttaaaattgatattataaggcgttattttaagtttttttaggttgtaattgtgtattatttaaaatggtttttttaaatttatttatttttttaaatataatacgaggaaggtgttaaaattggtgtaatagtttaatagaataagtattttagatttcgggagggatgaagagggagatatttagaattttttattagattttttttaatttgattatagtggattaatggtgtgttttgtggatgtggttagttaatgatattagtttgacggatttttttttttgtattaaatttttgtgggggggagaaaaaaaaaattttgtagttaatgatttgagcgtataataattatagtatatttattatttcgaaatgaaattataaaagtattatttttaattattttatgtagtattaatttttttttagaggagaaaatttatagtaagtatttttgatttatttattatttaaattgtttttaaagtattaagaaaagaaatgtgttttttattgtaagtaattattaggttagggggttgaattaatgtgtagaaagttttaattagttataagtaatatggaagtttttttgttttattaagttttttgatttattgtttaaataggattatatattttatgttggtttattagttggttttttttaagttttgtatgtttttatattattgagttatttggtttttttggttgacgaagaattattaggcgaggagtattggtattatttagagtgatattttttaagcgattgattaatcgattaggtcgaggagttgtaatagttttggggtttttattgtaattaagttaaaagatgagaagaaattatatttggtgggtagatagtaagtatttgtaaaggagtgtgttttttatttaattgtttaaatgatttattttttatgatgggatttttgttttatatatttagttagaaagataggatagataagtttgtttatgtattattatttttaatttaaggttttaatttaataggaatggaaggaattatttgtagattttagatttgaatgtaattaagagtgattagttttatagatgtataaaaaaataaggtagtagatgtggtagttaatatttgtaattttagcgttttgagaggatagggtaggaggaatatttgagtttagaagttcgagattagtttgggtaaaatagtgggattatgtttttataaaaaataaaattggttgtatgtggtggcgtatgtttgtagttttagttattggggaagttgacgtgggagaattgtttaggtttagggggttgagtttgtagtgagtcgtgatagcgtttgggtaatcgaattagattgtgagattgtttttggggaagtaaagcggtattatgaattagtatggttaaattattagaattttaagtagtatataatttagaaatgatttaatggaagaagaagaatttggtaaaaattttaaaaaatatgtattaaataatttttttgtatttaattagaagtaggaagtattaagaaataataagtggtagaagataaggtatagaaaagtgatgtgataaaatagagattataaagttgagatattttagggtagttattaattaaattataataataaaatttattagattcgttaaatattataggcgttgtatttgttagtgcgttgattaagaattattgagaattttattttattttttgtttgtagtttaatgttattttgaattttttttatatggaaaaagagttttttgttattttttattttatagttaatgaagttaaattgaaaaaaaaaagtaggtaaaaaagagagggtatgttatattttattttgaatgaagtataatgtttgtttttatttaaaaggatgtataaaatatggtattaatgttgatattttagtttagttgtttgtggtaaaatttgttagggaagaaatgtatttttgaaagtgttatttattatattataaatttgaattaaataaataaaatttgttttgttttttcgtatattatgaattaagttttttgaattaagtaaatttattaggaagttgttattttaatatatatattgtttggattttttttagaattaagttgggttatagtagtagttatataaaatgttattattttttgtattgatgaaaaatattttgaggatttagatttttttgagattttaggagtaagattaagtttgtttgttttaagtttattttttaagtatttttgaacgtggtttttgtgtttgtgtgatatgtaaaagaagttttaagtaaaagtgtataaaattatatagtttttttattttggaaattttatttttaatttattttttttattgtataatattagttattaatattaattttatttttttattgttaatatagttattttttgtgtagttttttgtttttattaagttattttaaatgattgaaaaaaggtgaagtagaaataaaaaaacgaatgaatgttgatgatttttttttggttgaaaatatttgaaggttttggttattaatttatagaaggattaaatttagatatagagatgttggtatttatttgattttttatatattttattgtggttttgcgtaggggtgtgatgttgtaagttatagtttgtgtattttggtttaggatatataattggaatttgacgtttttttttttttgtaggtaattttttttgttggttattttaacgatgttaaatggatagattttattttttatatcgtttgtaaaataggtataaagtttaaaagttagtattttataatagttttttgttgatgattttaggaagtttatataattgttaaaaatgtgttatgttatttaaaatatatttatatttttagtatttagaagttttattttaaagtttaaatgaaattttaaatgttaaatattattatggaattaaatgagaatgttatagtttttattagtattttattagttgatgaataattttaaattgtatttataaattaaaataaaaaatattgttatttataattttattgtttaaattttaagtattatgggttgttaatatttataggattattttttttttaagtttataatatgagttaattaaaaatatttttgttttatatttaatgagttagtaaataattaggcgggtataggtaaaaataatttagataaatttgatattttattttttttttttttgttcgaattttggtttttttatataggtttttttttttagattagagattaaaaattatttttttaaagggtcggagagtattattttaggtttgtaagttattttgtttaattaattttgttgttgtagtgagaaagtaacgaaaaataatatgtaaataaatggttgtggttgtgattataagaaaaggttattatatatgttgagttttgttttatagtatgaagttgtttggagttcggtgtaggttatagataaaaattatgttaaagaatttagttgtttaataatttttagtatttaggtaaatgtatttagttaataatagtggaaaatatgagaaaaataggtgggaagtagaagtttttaattatttttttgatgattatagggtaagtgaagaatttttgttattgttattgttgagatagggtttcgttttgttatttaggttggagtgtagtggcgattaacggtttattgtagttttgattttttgggttcgggtgatttttttattttagtttttgagtcgttgggattataggtatatattatgattggttaatttttgtattttttgtagagatagggttttgttatgttgtttaggttggttttaaatttttgggtttaagtgatttgtttattttggtttttcgaagtgttgggtttataggtgtgagttattatatttgattttttttttt

SEQ ID NO: 1347 - DNA, 6735 bp, Artificial Sequence
  chemically treated genomic DNA (Homo sapiens)
gtaggatttgcggtaggagtataaatagaggtttttaaattttgtgtttaaatatttaaaatgggttgggtgtggtggtttatgttttgtaattttagtattttgggaggtagaggttggaggattatttgagtttaggagtttaagattagtttgaataatatagtgagattttttttttataaaaaataaaaaagtagttaggtatggtggtgtgtatttgtagttttaattgtttgggagattaaagtgggagatagtttgagtttaggagtttaaggttgtagtgagttatgattgtattattgtattttagtttgggtaatagagcgagattttgttttaaaaaaaaaagattaaaatgtataatttagggtcggcgtagtggtttatgtttataattttagcgttttgggaggttgaggcgggtggattatttgaggttaggagtttaagattagtttggttaatatgaaattttgtttttattaaaaatataaaaattaggttaggcgtagtggtttacgtttgtaattttagtattttgggaggtcgaggcgggcggattacgaggttaggagatcgagattattttggttaatttagtgaaattttatttttattaaaaatataaaaaaaaaattagttaggtatggtggcgggtgtttgtagttttagtcggagtttgaggtaggagaatggtatgaatttgggaggcggagtttgtcgttagttaagatcgcgttattgttttttagtttgggggatagagtaagattttgtgaaaaaaaaaaaaaaaaaaaaaattagttaggtatggtggtgtatgtttgttatttgataggttgagttaggagaattatttgaatttaggagatagaggttgtagtaagtcgagattatattattgtattttagttagggcgatagagttattttaaaaaaaaaaaaaaaaaagtataatttaggttaataaattgttatataaaatatattttgtttttttattttgataaatatattgataaatatatattttataatggtttggaaggttaggtttagatttgtattttatttggaatttttagggttttgtattagaatgtgatggtgtagggggatgtagttttggttattggtttttagttgggtttattttgttttttatttttgatattattttggattgtaaggggttttgtgtggaattatgtggattttttattaggttattttaagtttgtttatagttttttgtaagtagttattttttgtttattttttgattttagaatgtgtgaattagttatgtggtttagtcgtgggagggtaaatttagggaagaggtttacgtgggttttaggagtgggtttgggttttttggatagggaatgtttagttatttggagtgtggttttgagaggattaaggtatgggtagaggatagttggattttttatttatgtggtgggatatagttagaggaggttagagtggagttttttaaagtatagggtttagggtaggggttatttttgtttgggtttaaggataataatttatttattattttttttttgagatagggtttttttttgtttttaaagttagagtgtagtggtattattatggtttattgtatttttattttttttaggtttttgatttttttattttagtttttgtatttttagtagagatagggttttgttatgttgtttaggttggtgtcgaatttttgggtttaagcgatttatttattttggttttttaaagtgttaggattataggtatgagtttttgtatttagttaaagggtaataatttgatgtttttttgttttattagtttgtaagttttttgaagttagggttggtattagtgtaagttattgaggggtcgttaatgttttatttaggatgtggtgtagaataggtgtttaatatgtattttttaaaagaatgtaggaggtatattaagaagaggttgaggatttggatttattattgaagatttagatattatgagttagaagtaggaatgagaattagttttttagggttttaaaaatgagagtgtaggatagaggagaggaggtagtattttggaatgttgattgttttatttttttttttttttttttattttttattttatttttgtaggttttttgtttgtttgtttttttttttttatggtttaatattattttatttatattttgttatttttttgttttttggttattgttttttttttgtggtttatgtgtttatttttttgtattggtgtttaggttttggtttttaattttatgttttgttttttttttttattatttttattgttttagtttttgttgttttttattttttttttggtttttttttggaagattttttttttttatttatttcgtttatgtgtttatatttttttgttttttttaatttaaatttttatggagattttgatttgttttgttttttattttatatttatatttattgtttttttagttttttttttttgttttattatttttggagttatattggttttattttttttatttttagatgtttttgagtttattagttttagtatttattttttagtttttagtggatatgggagatgggttttgttttttgggtttttattgattgttatagatttttttttttgtgtttttggtttttttttttggtttagattgggtttaatttttatttttttagtttttttttttggtttagtggtgtttggtttgagttttaagtagtttaattcgtttgagtttgtttagtttgatttttttagttcgttagtagtttagtttttttattttttttttgagttttttagtaaataagaggattagtgtagatttgatagttgttggttgggggtaagtgtttggttaggttagagtaggtatgaaaaaggggttgtatttaatattttttattttttttttaattagggaaattgtagagttttttttttgggtgtttattttggagagttatattttatgggtatgtgtgtggggttttgtttttttatgatttttatttttattttgtggttggtttttaggttttaggtttttttatttttttgagaaaatagtagtagatttaggtagttatatagagaagtttgaatggtgacgatggtttttgttttttaaaatagaaatttaggtgtgggaagagagtgatgttatttgatttaggttttttaatatgtgtatggaaagtatggtaggagagattatatatatatgtatagatagatatatatatatgtttttttagggaagttgggtagattgtaggtattttgtgtagtttttaaatttttttttttttttttttttttttttttgagatggagtttttttttgttgtttaagttggagtgtaggggtacgatttcggtttattgtaattttcgttttttaggtttaagtgatttttttgttttagtaggagtagttggtattataggtgtttgttattatgtttagttaatttttgtatttttagtagagatggggttttattatgttggttaggttggttttgaatttttgattttaagtgattcgtttattttggttttttaaaatgttgggattataggcgtgtttggtttttaaatttttaagtatgttagatttgttggaagggttttaaaatatagatttttgggttttattttcggagtttttgatttagtagatttaaggtgagattaggtaatatgtatttttagtaagtttttaggtgatatggatgttgttgttttggggattatattttagaaattatttttttagataatttgtatttgttagtttttttttaatatataaggttgggattaggttaagttttataagtgatgatttttggggtttgatggatatttaggtttttgtgttgagaaagaggaattattaattttatgggagtatttgggtggttttagaaggtaggaagtggtttttaattttatagattttatttaaatagtttcggataggtttaaatatttttttggataatttttagtatttttgtttttatttttatttagggatgatagttttaagaggtgttaggggattaggttgaaaatgtaggttattttttagttatttgggaattagaatgagtgagagaggagagaggggtagagatatatatagggaaaaggtgagagaaagtagagggtatatgaggttagttataaaagtgttttcgacggattggtggtgattagattttaatgttttttgaggtttagaaggaaggaatagagttttttgttttttttttttttatttttttttttaagttggattagtaagaatgggagagataaaatatggtggttaagttttggagattttttgtgggaaaagttgtttttttttttgatgcgacggttatgaggggtataagattagttagtatgaagatggggtagaggtagaaatgtgaggatttttgaaaataggaaatagatttaaaaggttcggtgagagtgggcgtgggagagtttatagtttttaaagatagatgaggggttgtagggttttggaaggtgggggtgttgggagtttgtttggttttttttttttaattttaggttatgtatggttagggttgagggttgtgtttatatagaggggtggtggtttagatttatgtttttgttcgaattgggaaattgagtatttgggagtcggattattagtgaggagttttgttggggaagatgttttttttttttttttgagaataagtatatttgtatttttttttttttttattttttttaattttaggttaataagatatgtaaatgatttttttattttattggttggaggttttaggattatagatgattttagagagttggttttttaagaatgttttttgggttttgtgtttatagttttttggagttgagtagaggtattaggttttgttttatggagtttttagttttttgggaagttgtgtttgtttggttttggtattgattatattttttcggttatttttgaagtgagtatatttagggtttatttgggtgttaggtcgtttatttagaattttttttttaatatttgttttttgttgtttgtttttaagaattttaatattttggtattttattttatttttattttgattggtttgtgttttttattgttattacgttagaaagataaataattttttttattattttttttgtatatttagttttttttggatattttttttagtgttttattattttttttttgttaagatttagtttttttaatttgtgtttgtttttattttttttgtttttttaagggtgataggttttatagagagggtagtaattttgttttggaataggaagagagaggtttgggtttttttttttgtttttttgggtagagtttgggggtttgatatgtggttggaaagaaggttatttaggtttggggtatttagaaggagtcgaagtttaagttttggggatgaatattttatgtcgcgtattttttgggggtggggtgggagttattggaattgggagttggattagagtttggattttaaggttgggaagggtatttgaggttatttagttagaagttttttaggtgaatatgtgttttatgattgataatagataggagagttttttggtgatataagtttaggatattttttgttgaatttgaatagacggtttattaaaggattgtttaggttaatatgtttttgtgttatgtgtatttgtaagaggtagggataggaggtaatattttttaaagttatttgagtatagatttttttataggtattgtttagaattagtgttttagagaatattttttggtatatgttataaagtttaattgtttttattgaatagaagggaaaacgggttagaagggtgaaggtgatttgttaagtttatataacgtaataagttttgaatagaaggaaaattaattttggtttgttttttttggagagattggttttgaggaaagatggtggttagttgattttgatttttttagaattaattttaggattttttttttttttatataaagttttttgtttttataaaagggatttattgattgattaatttatagaataaatgtatattgagggttttttataggtaaggtatttttttgagtgttttgagagatagagagttataagaatatattatttttggtttttaaaatttatagtatatatgtttttttattgttttaaaatatatatttattttgttatagttaattaagtaatttaaaaaaatggtttggaaatggaatgatgttttttgagatgatagatttttcggtatgttttagtattagggttgggagtattgttatattgtttttgttttttatagattttgaggtattagtggggcgagaggttgtgttgtttttttttttttttaggaatttagttgtttgttttttgttaggagtttttgttttttgaaaggttattttttagtttggtggggattttgtagtgaatagagttgtattatttttttggtttttttaaatttttgttttagggtatttgggttttgagggaagagggatttggtgaagaggggatggtaggtggtttttatgtgttttagatttttttttttttttgtagg

SEQ ID NO: 1348 - DNA, 6735 bp, Artificial Sequence
  chemically treated genomic DNA (Homo sapiens)
tttgtaaagaggaggagaggtttggagtatatggaggttatttgttattttttttttattaagtttttttttttttaaagtttaagtgttttggagtaagagtttgggaaagttagagggatggtgtagttttgtttattgtagagtttttattaggttgaagagtaattttttagagggtaggggtttttgataggggataagtagttgaatttttgaaggaggaagaggatagtatagtttttcgttttattgatgttttaggatttatgaaaagtaagagtagtatggtagtgtttttaattttagtgttgagatatgtcgagaggtttgttattttaagaggtattattttatttttaagttatttttttaaattgtttaattaattgtgataaagtgagtgtatattttaggatagtgggaaggtatgtatgttgtgaattttaagagttaaggataatgtgtttttatagttttttgttttttaaagtatttagggaagtgttttgtttatagaagatttttagtgtatatttgttttatggattaattaattaatgaattttttttgtaggggtaagaggttttatatggaaaaaagaaaggttttagaattagttttagaaagattagaattaattggttattatttttttttaaggttagtttttttaaggggaatagattaagattgattttttttttatttagaatttgttacgttgtgtgaatttggtagattatttttatttttttgattcgtttttttttttgtttaatgagggtagttagattttgtaatatatattaaagagtgttttttagaatattgattttgaataatatttatgaagaggtttgtgtttagataattttgagaaatgttgttttttatttttattttttatagatgtatatagtataagagtatattaatttgagtaattttttagtaaatcgtttgtttaagtttaataaaaagtgttttaaatttatgttattaaggaatttttttgtttgttattaattatggggtatatgtttatttgaggaatttttggttgggtgattttagatattttttttagttttgaagtttaagttttagtttagtttttaattttagtaatttttattttatttttagaaggtgcgcggtatggagtgtttatttttagggtttagatttcggttttttttagatgttttaagtttaggtagttttttttttaattatatgttagatttttaggttttatttagagaggtaaagaggaagatttaggtttttttttttttgttttagggtagggttgttgttttttttatggaatttgttatttttgagaggatagaggggatggaaatagatatagattaaaggaattgggttttggtagaaaggagatggtgagatattgagagaggtatttagaaagaattggatgtatagaaggagtagtggggaaggttgtttatttttttgacgtgatagtagtgagggatataggttagttagggtgggagtggagtagggtattaaggtgttaggatttttgaaaatagataatagagagtaggtgttaaagagggggttttaggtgagcggtttgatatttaggtaggttttggatatatttattttagaaatggtcgagaggatgtggttagtgttagagttagataggtatagttttttaggagattgaaggttttatggagtagggtttggtgtttttgtttagttttagggggttgtgggtatagagtttaaagggtatttttaaagggttagttttttgaggttatttgtggttttgaggtttttaattaataaggtaaggagattatttgtatattttattggtttggggttgggggaaatggagagagaggagagtataagtgtgtttatttttaaagaaggaaagggagtattttttttaataaagttttttattgatgattcgatttttaagtgtttagttttttagttcggatagaaatatgggtttgaattattatttttttatgtgaatataatttttagttttagttatgtatagtttgggattggaaaaagaggattagataaatttttagtatttttattttttaaggttttgtagttttttatttgtttttggagattataagtttttttacgtttatttttatcgggttttttggatttgttttttatttttaagaatttttatatttttatttttgttttatttttatgttgattggttttatgttttttatagtcgtcgtattagaaaggaaagtaattttttttataggggatttttaggatttgattattatattttgttttttttatttttgttaatttagtttgggagaaagagtaggaaaaaagagaatagggaattttgttttttttttttgggttttaagggatattgaaatttaattattattagttcgtcggagatatttttgtaattggttttatatgttttttgtttttttttattttttttttgtgtgtgtttttgtttttttttttttttttatttattttagtttttagatggttgaggggtgatttatatttttagtttaattttttaatattttttagagttattatttttgagtaggagtgggaatagggatattaggaattatttaaggagatgtttaaatttgttcgaagttgtttaaatagggtttatggagttaaaggttattttttattttttgaggttatttaaatatttttatggggttaatagttttttttttttaatatagaggtttgggtgtttattagattttaaaggttattatttataaaatttaatttggttttagttttatatgttggggaaaagttggtagatatagattatttaagaaggtggtttttgaagtgtggtttttagagtagtagtatttatattatttgggaatttgttagaaatatatgttatttgattttattttaaatttattgagttagaaatttcgggggtggggtttagaaatttgtgttttaaggtttttttagtaagtttgatatgtttgaaagtttaaaggttaggtacgtttgtaattttagtattttgggaggttaaggtgggcggattatttgaggttaggagtttaagattagtttggttaatatggtgaaattttatttttattaaaaatataaaaattagttgggtatagtggtaggtatttgtaatgttagttatttttattgaggtaggagaattatttgaatttgggaggcggaggttgtagtgagtcgagatcgtgtttttgtattttagtttgggtaatagagagagattttattttaaaaaaaaaagaagagaaaagaaagaaagtttgagaattgtatagaatgtttgtagtttatttagtttttttggggaggtatgtatatatgtttgtttgtgtatgtgtatgtggttttttttattatgttttttatatatatattggaaaatttagattagatgatattattttttttttatatttgggtttttgttttaaggagtagaaattatcgttattatttaagtttttttgtgtgattgtttggatttattgttgtttttttaaaagaataaaaaagtttaaggtttaggaattaattataaaatgggaatgaggattatggagaggtaggattttatatatatgtttatggaatgtagttttttaaagtggatatttaggaaagagattttataatttttttggttgaagaaggaatgggaagtgttgagtgtagttttttttttatgtttgttttggtttggttagatatttgtttttaattagtagttgttaggtttgtattgatttttttgtttattggagggtttaaaggagaggtgggagggttaagttgttaacgggttaagggagttagattaaataagtttaggcgagttgagttgtttggggtttagattaggtattattaaattagggaaaggagttgggggagtgagggttgggtttagtttgggttagaggaaaggattaagggtatagagaggagagtttgtggtagttagtggggatttagaaagtagagtttattttttatatttattggagattgagaaatgaatattgagattaatgggtttaaggatatttagggatgaaaaagatgaagttagtgtgattttaggaataatagaatagaggaaggagattaaggaggtagtaggtgtagatgtgagatagaggataggataagttagggtttttatggggatttggattaaaggagatagaaagatgtaggtatatggacgagatggataaagaaaggaagttttttaggagaggattaagaagggagtaggggataataaggattagaatagtaagagtggtagaaggaagggataggatataagattggggattaagatttagatattaatataaagaaatagatatataggttatagaggaagagtagtggttaaaggatagaaaggtagtaagatatggatggagtgatattggattatggggaaagaggggtaggtaggtaaagggtttgtaggagtggggtagaaaatgaagaggaaggagagaaaatgagatagttagtattttaggatgttatttttttttttttgttttgtatttttatttttggaattttgaaagattggtttttatttttatttttggtttatggtatttagatttttagtaatagatttaaatttttaatttttttttggtgtattttttatatttttttgaaaaatgtatattaaatatttattttgtattatattttgagtaaggtattagcgattttttagtaatttatattaatattagttttgattttaagaaatttatagattgatgaaatagagaaatattaaattattgttttttggttgggtgtagaggtttatgtttgtaattttagtattttggaaggttaagatgggtggatcgtttgagtttagaagttcgatattagtttgggtaatatggtaaaattttgtttttattaaaaatataaaaattgaggtgggaggattaggagtttggggaggatgagggtgtagtgggttatgatggtgttattgtattttagttttggagatagaaagaaattttgttttaaaaaaaaaataataaataaattattgtttttaggtttaggtaggagtggtttttgttttgggttttgtgttttagaaggttttattttggttttttttggttatgttttattatatgggtgaggagtttaattattttttgtttatattttaatttttttaggattatattttagatagttaagtattttttgtttaaaaggtttaagtttatttttagggtttacgtgaattttttttttgggtttgtttttttacggttgggttatatgattggtttatatattttgaggttaaagggtagataaggggtagttgtttgtaggagattgtggatagatttgggatggtttgatgggaggtttatatggttttatataaggttttttgtagtttaagatggtgttaggggtaggaggtaaagtgggtttagttgagggttagtggttaaaattatatttttttatattattatattttggtgtagaattttgaggattttaaataaaatataaatttgaatttggttttttaggttattgtgaagtatgtatttgttaatatatttgttaaggtagaagaatagaatatattttgtgtaatagtttgttagtttgaattatatttttttttttttttttttgagatagttttgtcgttttggttggagtgtagtggtgtgatttcggtttattgtaatttttgttttttgggtttaagtgatttttttggtttagtttattaagtagtagatatgtattattatgtttggttaatttttttttttttttttttttttatagagttttgttttgttttttaggttggagggtagtggcgcgattttggttgacggtaagtttcgttttttaggtttatgttatttttttgttttagatttcggttggaattataggtattcgttattatgtttggttaattttttttttgtatttttagtagagatggggttttattgggttagttaagatggtttcgattttttgatttcgtgattcgttcgtttcggttttttaaagtgttgggattataggcgtgagttattgcgtttggtttaatttttgtatttttagtagagatagggttttatgttggttaggttggttttgaatttttgattttaaatgatttattcgttttagttttttaaagcgttggggttataggtatgagttattgcgtcgattttgagttatatattttaattttttttttttgagatagggtttcgttttgttatttaggttggagtgtagtggtgtaattatagtttattgtagttttgaatttttgggtttaagttattttttattttagttttttaagtagttgggattataggtgtatattattatgtttggttatttttttattttttgtagagaagaagttttattatgttgtttaggttggttttaaatttttgggtttaagtgattttttagtttttgttttttaaagtgttgggattataaggtatgagttattatatttagtttattttaaatatttaaatataaggtttgagggtttttatttgtatttttgtcgtaggttttat

SEQ ID NO: 1349 - DNA, 2635 bp, Artificial Sequence
  chemically treated genomic DNA (Homo sapiens)
taaaattattagtttttttatttgtttttagtaggtgtttaaagagggatagagtaaaattttgtaaagtatgatattagagggtgttttagaagtaagggttttttgtagttttaggtattgttgtttttaaattgtatggttttttttggtaaatgatttataattttcgaattttaggttaatgttttaaaaacgggtatagaatgtttttttaataaatggtattaagaaaattggatatttatatgaaaaagagtaaatgtggatttatattatatatgaaaattaatttaaaatggattaaaggtttaagagtttaaattataaaatttttaggagaaaatatagaggaaaatttttttaatattgtatttggttatgattttattgcgatatcgaaagtatacgcgataaaataaaaataaaataaaataaaataagattagaaaagtaaagaagggtagtattttttttcgttttgatagttgtcggattttattttaatcgtgtttttgtttttaggagttgttcgcgcgtcgtttttgttttattattaaggttttaattgtgaataaataaggaattggattcgaatgattttttagtttttgagatttttttgtttaagtatcgtagatttcgtgcgtttttaatttaataggaagcgttatattttagtgagtttcggtttttatagttcgaaattgtaaggagtttttttgttcggtttttttttattttttttttttgttttttagttcgtttattttttttttcgtttttttttttttttttttttggttttttgaagtgatgagttagcgtaattataaattatatattttttttgtagaaaaattcgtgtttcgaatgaggcgagatttagagaggatttaggcgcggggcggatttttttaatttttttttcgcgttttcgaaagagcggcgtattagtagtcgaattgtcggcgtttaggttttttggttcggtcgggatgcggtcggtattcgtttttcgtcgggaataatttttttattttttttgtagggagttggtgttagtcgatagtcgcgttagggtcgtttcgggtattagggtcggatcgggtgacgtcgcgaatttgcgtttggtcgttaagtcggtttttaggttgaagaaggattcgtttcggttttgattcgggtttcgtttttttagtcggggtatcgagtttcggttttagttgttcgtttttattcgtcggtattcgttcggttcgttcgttttcgtatttagtttacgcgttatagttatgtgttttcgagtcgcgcgggcgttcgcgacgttatttttcgttttgggcgcggtgttgtggtttgcggttggcgtttgggagtttacgattttgtatattaacgacgtgtatagtcggttggagtagattagcgaggattttagtaagtgcgttaacgttagtcgttgtatgggtggcgtggttcggttttttattaaggtttagtagattcgtcgcgtcgaatttaacgtgttgttgttggacgtcggcgattagtattagggtattatttggtttatcgtgtataagggcgtcgaggtggcgtattttatgaacgttttgcgttacgatgttatggtaagattcgagttcgcgttcgggatagtagtttcggattgagagaggagtcgggttggaaaagtagcggatggtagagtgtggtaagtttaggtttagggcgcggagagatgtggggataaagtgagatttcggttagtgtgttagttggatgtatagaagttttttggacgattcgttttaaacggacgttattgcgtttttattatgagatgggagtatttagaggagtaggatttagttttgtttgcgaggggtttaaggtggggtgcgtagaagtattgatagttatttagagttagggattgaatcggattttttacgtagtttttatttattgttagattttttaaagaatgttttattttaatttagatttttcgaaaaatgttttattttaattttattgaaagggaaatcgcgtcgaagaagttgaataaattaataggtattattttcgtaaaaagggagacgtgataagaatggatattagatttttttgatttcggagtttgagagtaattaagtttatagttttggggtagattttttgtttaattattttttatgtgattttgagtaagttatttatttttttttgttttagttttattttgtataaaaataaggattataattgtatatagtgtatatagtgtggtttttatattattattagatatatagtgtggtgtttatatatgttgttattattagatattataatatagggttaagaaaaggaaagaaagaaagaaagagaaagaaagaaagaaattttagagagagttaaaatgtggaaagatttgggttttaaaggattttaataaagtaggtttggcggtagagatttaggaagagtttaatttaagagataatgggtttttaaaatatgtgtaaaagtttagtttaaagttttaaatgttaggttaaaggtaatgttttttttattgtattaaattttagaaagggagtagaggtggttgtatagtaataaataa

SEQ ID NO: 1350 - DNA, 2635 bp, Artificial Sequence
  chemically treated genomic DNA (Homo sapiens)
ttatttattattgtgtaattatttttgttttttttttagaatttagtgtaatagaaaaggtattatttttaatttaatatttgggattttgaattaaatttttgtatatgttttaagagtttattattttttaagttggattttttttaaatttttgtcgttaaatttattttattgaaattttttgaaatttaagtttttttatattttggttttttttgaagttttttttttttttttttttttttttttttttttttttttttaattttatattatagtgtttggtaataataatatatatagatattatattatgtgtttggtaataatatagagattatattatgtgtattatgtataattataatttttatttttatataggatagaattgaggtaagaaagagtaaataatttgtttaaggttatatagaaggtaattgaatagagaatttattttaaagttgtgagtttaattatttttaagtttcggggttaaagagatttggtgtttatttttattacgtttttttttttgcggggatggtgtttgttaatttatttagttttttcgacgcggttttttttttaataagattgagataaagtatttttcgaaagatttagattgagataaagtattttttgaaagatttagtagtaaatgagagttgcgtgagggattcgatttagtttttagttttggataattgttagtgtttttacgtattttattttaagtttttcgtaggtaggattgggttttgtttttttaaatatttttattttatagtgggggcgtaataacgttcgtttaagacgaatcgtttaagggatttttatgtatttagttggtatattggtcggagttttattttatttttatattttttcgcgttttggatttaggtttgttatattttgttattcgttgtttttttagttcggttttttttttagttcgggattattatttcgggcgcgggttcgggttttattatggtatcgtagcgtagggcgtttatgaagtgcgttatttcggcgtttttgtatacggtgaattagatagtgttttggtattggtcgtcggcgtttagtagtagtacgttgggttcggcgcggcggatttgttgaattttggtgaagagtcgagttacgttatttatgtagcggttggcgttgacgtatttgttggagttttcgttggtttgttttagtcggttgtgtacgtcgttggtgtgtaaaatcgtaagtttttaggcgttagtcgtaggttatagtatcgcgtttagggcgaggagtagcgtcgcgggcgttcgcgcggttcggggatatatagttgtggcgcgtgaattgggtgcgaaagcgggcgagtcgggcgagtgtcggcgagtaggggcgagtagttagggtcggggttcggtgtttcggttggaggggcggggttcgggttaaggtcggggcgggtttttttttagtttggaggtcggtttggcggttaggcgtaagttcgcgacgttattcgattcgattttggtattcggagcggttttggcgcggttgtcggttggtattagttttttgtaggaagagtggagaggttgttttcggcggggagcgggtatcggtcgtatttcggtcggattagggagtttgggcgtcggtagttcggttgttggtgcgtcgttttttcgggggcgcgaggaaggaattggaggggttcgtttcgcgtttgggttttttttgagtttcgttttattcgaggtacgggtttttttataaaaggaatgtatggtttgtggttgcgttagtttattattttaaagaattaaagaaggaaaagagagggggcgggaagaaagatgagcgagttgaggggtagagaggaggagtaaagagaggtcgggtagaggagttttttgtagtttcgggttgtgagagtcgaagtttattgagatgtgacgttttttgttgggttgagaacgtacgaagtttacgatgtttagataaaaaaattttagaaattaagaaattattcgaatttagttttttgtttatttataattaaaattttagtgataaaatagaggcgacgcgcggatagtttttggaagtagaaatacgattggggtaaaattcggtagttattaggacgggaagggatgttgtttttttttgtttttttggttttattttattttattttatttttattttgtcgcgtgtgttttcggtgtcgtagtgaagttatagttaaatataatgttaggaagatttttttttatgtttttttttaagagttttataatttaaatttttagatttttaatttattttgagttaatttttatatgtggtatgagtttatatttatttttttttatgtggatatttagtttttttagtattatttgttgaaaagatattttgtgttcgtttttaagatattgatttgaggttcggagattgtaaattatttgttaagaaaggttatgtagtttgggagtagtagtgtttggggttatagaagatttttgtttttgggatattttttaatgttatgttttgtaaggttttgttttgtttttttttgagtatttgttagaagtaggtaaaagaattggtagttttg

SEQ ID NO: 1351 - DNA, 5443 bp, Artificial Sequence
  chemically treated genomic DNA (Homo sapiens)
ggtcggtggattcgtaaatatttgtttttgttcgcggtgtcgggaggtcgcgttcgtttttgtcgtttttattatagtttacggtgtttagggtattgtggatgttagagggtagatgtgtttttgatattttttttcggaggaaagggtttttaaggtttgggagaaggtttagcgagtttatgaaaacgatttataaatttcggtttttaattaaaatttatttcgttattgggtttttaaatattattttcgttaggcgtcgtggtttacgtttgtaattttagtattttgggaggtcgaggtaggcggattatttgaggtcgggagttcgagattagtttgattaatatggagaaatatcgtttttattaaaaatataaaattagtcgggtttggtggcgtatgtttgtaattatagttattcgggaggttgaggtaggagaatcgtttgaattcgggagacggaggttgcggtgagtcgatattttgttattgtattttagttttggtaataagagttaaatttcgttttaaaaaagaaaaaaaaattattttgtttcgcggatcgtttaaattttgagatttaggttttaaattgtattttaagttttaaataagtatagttttgtcgttggattgttgcgggtttcgtacgtaaagaatttcgcgttaggttttcgtaatgagatcgcgtttcgtttcggatttttagatttcgttttcgtaatttcgggtttggggtgggggtttcggtttttttaggttttattatcgagttttgttaagtttaattattatatttttttgttttttttttttgttagttgtattatgtttcgtttttgcgttttgtagttttgtttcgaattttttttttataggttttgtcgcggggggtttttataagttttttttttgggcgtttataggttttgttttaaagtttttttgggttaaggttcgtttttatttattgttaagtttttattttaaggttttatttttttatttattaggtttcgtttatagatttttataggttttttttttttaggcgaacgtttttaggggtttttggttatttttgttatttaaaaggcgtttttttcgtagataagagcgttaaagttacggggaagcgttaggattggtttgaattatgaggagtttttggcgtttttgtcgttgtttttttttaaatagtcgtcgttggggagatgggagaggtgggtgttcgggataggaattagatgggaagatagaagtgaggtggggtttggggtaagggttcgtatcggcgcgagagttcgtgaatttttttttttattggggtttatacgtttaggtttttagttttttagtagttttttttttattttatcgttggatttagatttaagagttttgatattttgtttttttattttttaggatttaggagttttgttttttagaagttttgttttttagaaatttattataagggtttgtttgtttttttagaatttttaatttttatttttttttttttttttttttttattttttttttttttttttgagatagagtttggttttatcgtttaggttggagtgtagtattacgattttcgtttattgtagttttcgtttttcggatttaaacgatttttttgttttagtttttcgagtagttgggattataggcgtttgttattatatttggttaattttttgtgtgttagtagagacggggtttcgtcgtgttggttaggtttgttttgaatttttgattttaagtgattcgtttattttagtattttaaagtgttgtgattatagtcgtgagttgttttgttcggttttaaatttttatttttttattttttagtgggaaaatttaaggatgagagatagttaatacgggttgggagttttagagtaagatttggtggagaggtttttggggaggtatagaaggcggaagagttggagtggtgagatttttgggtataatatttgttgttttagtttttgtagttttatagtagcgagtttatgttttaggatgttgagagagatataggtttatggtgatagtgtatagggaatttcggttgtttaagagagttttttttttttttattttgtttttattttagtttgggttttgggtatttgtgaggttataggaggtgtagaatttgagtttgttttattagttatagggtttttttttttggtattggtttatagaagtcgggatttagagattttaggttttttttgttttaggatttaggagtttggggtttttaatttttttttttttagatttagaagtttgtattttagttttatttttttaggatataggagtttaggtttttagtttttttttgtaaggtcgatggtgttgaatttgtaaatatggttatgaagttagagtcgagtgtacggggtttttagttttttttatttttatttttatttatttgtttttttatttatttttttattaatgtgttattattttgagatattttgtagaagtaagaatgaggagttaggattagaattaatattttaatggattttgtttattagtatttaatttttagttttatttatttatttatttatttatttatttatgtatttagagatagttgagtttcgttttgtcgtttaggttgtagtgtagtggcgttatttcggttattgtaatttttattttttgggtttaagcgatttttttgttttagtttttcgagtagttgggattataggcgttcgttattttgtttaatttttttgtattttagtagatatcggtttttattatgttggttaggttggtgtcggatttttgattttaggtgatttgttcgttttggttttttaaagtgttaggattataggtatgagttatagtgttcggtttgatttttatttttaaatttgttttcggatttaggtagttcgaattttagtatttatttttgtcgggatttagtagtttgtttttagttttttacgggggttcgtaagttcgttttttttttttttaaatatttaattttttagtatttaggtattagaatttaggattgtgtattttaaatatttagtttttagcggtttagaattttattgtttatttgtttgggattcgggagatttgttttttttattaggtgtttggagaggttgtttatattgatgtttcggtattttgtttttttggttaatttttaaatatatttgattttttttttggaagttggggatttaatttcgggatatttgcgaaatagggaggagaagaaagacggtttagagggagggaggattttttttgggatttgaattggtttatttttttttgattttttattttttatttttaataaagtaacgaattcggttattgatgtagttaggtaattttgtttcgggggttttgaatacgaatgtcgtgtgggggttttttaaagagattagagatcggttcggcgcggtggtttacgtttgtaattttagtattttgggaggtcgaggcgggcggattacgagggttaggagatttagattattttggttaatatggtgaattttcgtttttattaaaaaaaaatatatatatatatataaaaaaattagtcgggcgttgtggcgggcgggcgtttgtagttttagttattcgggaggttgaggtaggagaatggcgtgaattcgggaggcggagttcgtagtgagttgagatcgcgttattgtattttagtttgtgtgatagaggtagatatcgttttaaaaaaaaaaaaaaaaagagagagagagagcgggagattagagatttcgcggttttattgtatatatttcgtttataagaaatttaaaagaggcggggcgtagtggtttacgtttgtaattttagtattttgggaggcggagacggggaggtaagattgtttgagtttaggagatttagatttagattagtaatatagagatttttttttttttttgagacgtagttttattttgtcgtttaggttggagtgtagtggcgcgatttcggtttattgtaattttcgtttttcgggtttaagagattgttttgttttagttttttgagtagttgggattataggtatgcgtaattacgtttggttaatttgtatttttagtggaggcgaggtttttttatgttggttaggttggttttaaatttttgattttaggtgatttgtttgttttagttttttaaagtgttgggattataggagtgaatttttaagttcggtttgatattcgtttttttaaaaaataataataataaagtgtgagaagtgtgaaagatagaacgttaaaaaaaaaaaaaggttaaaaaagaattaaagatttaaatatttgtattaaaaatttaaaaaatatatattagttaggtatggtagtgtggtttgtggttttatttatttgggaggttgacgcgggaggattgtttgggtttgggaggtagaggttgtagtgagaagtgattgcgttattgtattttaatttgggtgatagagtaaattttgtttcgaataataagaagaagaagaaagaaatttataagaaaggttatgtaattgttatcgcgttataatttttaggtatttcgtggggcgaaaataaatgggaaaattatagtttttatgaggcgaaggggttacgatgttcgcggaagttatttttttttcggtcggtagggagttgtagttatttttgaaagtttttttttttttttggtataggcgggaaatgtggcgttaagaggttgggatttcgagaaagaagcgaggtttttacgaaaatgcgagcggtttcggtaaggggcggggtcgttggacgtggatgaaagttatagagttagcgtggattaattagatttttttggggcggggtttttgtggataagtgggcgtggtttaggggggaagttattaagaacgtatcggaggtttttgttcgttttggaaaacgttttttgcggtgaaggagaggtgagaggttagggtttttatatttttgggttttagggaggatgggggttagagggttggaaaattgggtttcggaggaggatgtattgggtgttagtattttaggttttgggaaaagaggaggttgggattttggatttttgggtttgggggaggaggcggtcgagatttcggatttttgagtgtgagagaggagcgtgttgggagttaggatttttgggtttgagggtttagatttttgtgtcggaggaagggaaggtcggaggtttggaattttggggtttgggtaataaaatgtttgtgttttgatttttggaagtgggggcggcgttgggggttcgaatttttggttttaggggaggaagaggtttgggatagatattatgtattatttagttttttattttttataga

SEQ ID NO: 1352 - DNA, 5443 bp, Artificial Sequence
  chemically treated genomic DNA (Homo sapiens)
tttgtgggggatggagggttggataatgtataatgtttgttttaagttttttttttttttggaattaggagttcgggtttttagcgtcgtttttatttttaagaattaagatataagtattttgttatttaggttttaggattttaggttttcggtttttttttttttcgatataggagtttgggtttttagatttaggggttttggtttttaatacgttttttttttatatttaggaattcgggatttcggtcgtttttttttttagatttaagagtttagggttttagttttttttttttttaggatttaaagtattggtatttagtgtattttttttcgggatttagttttttagttttttggtttttattttttttaggatttaagagtatgggaattttggttttttattttttttttatcgtagagggcgttttttagggcgggtaaggattttcggtgcgtttttggtgattttttttttagattacgtttatttatttatagaggtttcgttttaaagaggtttgattggtttacgttggttttgtagtttttatttacgtttagcggtttcgttttttgtcgaagtcgttcgtattttcgtgaaagtttcgtttttttttcggaattttagttttttgacgttatatttttcgtttatgttaaaagagagagaaggtttttaaagataattataattttttgtcggtcgggggaaaaataattttcgcgggtatcgtggttttttcgttttatgggagttgtagtttttttatttattttcgttttacgaagtgtttggaagttatagcgcggtagtaattgtatagttttttttatgagtttttttttttttttttttattattcgagatagggtttgttttgttatttaggttggagtgtagtggcgtaattattttttattgtagtttttattttttaggtttaagtaattttttcgcgttagttttttaagtagatgggattataggttatattattatgtttggttaatgtatattttttaaatttttaatataaatatttaaatttttaatttttttttagtttttttttttttttaacgttttgttttttatattttttatattttgttgttgttgttttttaaagagacggatgttaagtcgggtttgggggtttatttttgtaattttagtattttgggaggttgaggtaggtagattatttgaggttaagggtttgagattagtttggttaatatggagaaatttcgtttttattaaaaatataaattagttaggcgtggttgcgtatgtttgtaattttagttatttaggaagttgaggtaggataattttttaaattcgggaggcggaggttgtagtgagtcgagatcgcgttattgtattttagtttgggcgatagagtgagattacgttttaaaaaaaaaaaaaaatttttgtgttgttggtttggatttggattttttggatttaagtaattttgttttttcgttttcgttttttaaagtgttgggattataggcgtgagttattgcgtttcgttttttttaagttttttgtaagcgagatgtgtatagtgaggtcgcgaggtttttggtttttcgttttttttttttttttttttttttttttttgagacggtgtttatttttgttatataggttggagtgtagtggcgcgattttagtttattgcgagtttcgtttttcgggtttacgttatttttttgttttagtttttcgagtagttgggattataggcgttcgttcgttataacgttcggttaatttttttgtgtatatatatatatttttttttagtagagacggggatttattatgttagttaggatggtttagattttttgattttcgtgattcgttcgtttcggttttttaaagtgttgggattataggcgtgagttatcgcgtcgggtcggtttttggtttttttaaggaatttttatacggtattcgtgtttagaattttcggagtagggttgtttggttgtattagtgatcgagttcgttattttgttggaagtggagagtggagggttagaagggagtggattagtttaggttttagagggaattttttttttttttgagtcgtttttttttttttttttatttcgtagatatttcgagattaggtttttagtttttaaagagaggattaggtatgtttagagattggttagagaggtaaggtatcgaggtattaatgtgagtagtttttttaggtatttggtgaggagaataagtttttcggattttaggtaggtgggtagtggagttttaggtcgttgggggttgggtgtttgaagtgtatagttttgagttttgatgtttgggtgttggagaattagatatttgggggagagagaagcggatttgcggattttcgtgggaagttggaaataggttattagatttcgataggagtgggtgttgggattcgggttgtttgggttcggaagtaaatttaaaggtaaggattaggtcgggtattgtggtttatgtttgtaattttagtattttggaaggttaaggcgggtagattatttgaggttaggagttcggtattagtttggttaatatagtgaaaatcggtatttattaaaatataaaaaaattaggtagaatagcggacgtttgtagttttagttattcgggaggttgaggtaggagaatcgtttgaatttaggaggtggaggttgtagtggtcgagatggcgttattgtattgtagtttgggcgatagagcgaggtttagttgtttttaaatatataaataaataaataaataaataaataaataaggttaaagattaggtgttggtgggtaggatttattgggatgttggttttgattttgattttttatttttgtttttgtagaatgttttaggataatgatatattgatgagagagtgagtagggaaatagatgggtaggggtggaggtggaaagggttggggatttcgtgtattcggttttggttttataattatgtttgtaggtttagtattatcggttttgtaggaaggggttggggatttggatttttgtgttttgaagggatggggttagggtgtagatttttgggtttgaaagagaaggggttgggggttttagatttttgaattttgagataggagggatttgggatttttgggtttcggtttttgtgggttagtgttaggagaaagggttttataattggtggagtaggtttaggttttgtattttttgtgattttataggtgtttagaatttaagttgagataggggtaggatgggggaaggagggatttttttgggtaatcgaggttttttgtgtattgttattatgggtttgtgttttttttagtattttggggtatgagttcgttgttatgaggttgtagaagttggaatagtaggtattgtgtttaggaattttattattttaattttttcgttttttgtgtttttttaggggtttttttattaggttttgttttaggatttttagttcgtgttggttgttttttatttttgagtttttttattgagaaatgagaaaataggaatttggggtcgggtagggtagtttacggttgtaattatagtattttgggatgttgaggtgggcggattatttgaggttaggagtttaagataagtttggttaatacggcgaaatttcgtttttattaatatataaaaaattagttaggtgtggtggtaggcgtttgtaattttagttattcgggaggttgaggtaggagaatcgtttgaattcgggaggcggaggttgtagtgagcggagatcgtggtattgtattttagtttgggcgatagagttagattttgttttaaaaagaaaaaaaaaaagtaagaaaggaaaaagaaaagaaaataggaattgggggttttaaagaagtaaataaatttttgtgatgaatttttaaggaataaggtttttagaaggtaggatttttgggttttgggggatgagaggatagggtgttaggatttttggatttgagtttaacggtggaataagggaggagttgttgaagaattgagggtttggacgtgtgggttttagtggaggaaggggtttacgaattttcgcgtcgatgcgagtttttgttttaggttttattttatttttgtttttttatttggtttttgtttcggatatttattttttttatttttttagcggcggttgtttgaaaagaagtagcgatagaagcgttaggagttttttatggtttaggttaattttgacgttttttcgtggttttggcgtttttgtttgcgggaggagcgttttttaggtgatagaggtgattaaagatttttgggggcgttcgtttggaggggaggggtttgtgggagtttgtgggcggggtttagtggatgaaggggtggagttttagggtggggatttggtagtggatgggggcgggttttggtttaggagagttttagaatagggtttgtgggcgtttaggggagaggtttgtgggggtttttcgcggtaggatttgtgagggaggggttcggggtagggttatagagcgtaggggcggggtatggtataattagtaggggaaaggggtaagagaatgtgatgattgggtttggtagagttcggtggtggagtttgggaaagtcgggatttttattttaaattcgggattgcggagacggggtttaggggttcggggcggggcgcggttttattacgagagtttggcgcgagattttttacgtgcggagttcgtaataatttagcggtagggttgtgtttgtttgaggtttaggatgtagtttgggatttgggttttaaggtttgggcggttcgcgaaatagggtgattttttttttttttttgagacggagtttagtttttgttgttaaagttggagtataatggtaggatatcggtttatcgtaattttcgtttttcgggtttaagcgatttttttgttttagtttttcgagtagttgtgattataggtatgcgttattaagttcggttaattttgtgtttttagtagagacggtgtttttttatgttggttaggttggtttcgaattttcgattttaggtgattcgtttgtttcggttttttaaagtgttgggattataggcgtgagttacggcgtttggcgggggtgatatttgggagtttagtgacggggtggattttggttgaggatcggaatttgtagatcgtttttatgggttcgttgaatttttttttaggttttgggaattttttttttcggaagaaagtgttagaggtatatttgttttttggtatttatagtgttttgggtatcgtgagttgtggtggagacggtaggggcgagcgcggtttttcgatatcgcggatagaagtaggtatttgcgagtttatcgatt

SEQ ID NO: 1353 - DNA, 6881 bp, Artificial Sequence
  chemically treated genomic DNA (Homo sapiens)
tgatgtttatgtttattaaaattagtaatgaaatttaaaattaaagttatttttttttgtttaataaaaaatagtttttaaataagaaaatattaagtggttaatttaaaagtaagtatttaggagatggttattgggtgttaagtattaataaaaaatgaaggatttttattatgtaaaatattttttgagtggtatgaggttttattatatgtttagttttataattttaatttataagaagatgtttttagaaaaaagaatgttgttttttttttgtatatttttatatatttttagtattgagttttgtattaaagaaagaaataattttaaaagtatttgtgttaagtggtttttggtaaaaatcggttgagaaatattgaataaaagttataattatttaaaatgtgaatattaataaagtaattgatttgttttttaattattttatgagaaaggaataaataatttggttaattattattttgttaatgtaaatgaaatggtaaaagtaaaataataaaaatatttttagaagtaaaaattaattttgtatttttagaaatagattttttttaaagtgaaaatttattttttgtattagtaatgtgatttattgtttaatggtaataaatgttgtgaatgagtttgtttaaatgtaatttaaaatatatattttgtaatgttaaaaataggttttataaagtaattttattatgaaaaattttaaagttgttttaattcgtaaagtataataggtatgtttgttttattatatttgtattgtaaggtttattttgaatttatttgggaagaatggtgaaataaatttttaaaggttttttttttatgtattaaaatagaaaattttatgggattatatttatgtttgttttttaaattatgttaaaagtttaattttattaagtataatttgtttagttatgtataaaataaattattttggtttagatgtgagtatatgtattatttatgttgatttttaatgaaaatatgtttatatgtattaatatgttttgtttaatattggttaatgttataaaagataatatagtaatattatttttttaaatgtttttttgtggttatttaatagtgttttttaatagtaatgttttttaatttattttagttggttttaaaagaggataggtgtaatttttatttttatttattttaaaaattgttaagaaaatagatttttattgtggggtaattttatatatttatatatggtaatagtttaaagttatatcggttgcgggggtttgaaaaagttattattgttattttaattgagttataaaatattttatttgaattatttatgtttaagaattttgaagggttatagttatataaatgtagaattttagttttttttagtttaaagtatcgttttaatattttttgaaaggttgtttaattttatattttgattttatatgtgtaattaaatttttatgtataaaagtatttttttatgtattagtaaatatatttataggaatttttttttaaattataatttatttaatatgtaattataggattttaaaatatgtttttatttttttaaattgtatgttaatttgaattttttggtgataaaatgagagattttattattagtttgattttttttttttgtgatttaatagtgagttaagtatgagtaggaggaaataaagaaaattttttgtgaatttaattttatgtgttaaaattgttttttttttggagaaaatagaagagaattaaagatttttagttatttatgaattttagtataatatgaatatttgggtttgtagtattttttttggtttagtttaggtagtaaatagtttgtgtgtgtgtgtgtgtgtgtgtgtgtgtgtgtgtgtgtgtgtgtgtgtgagtgatttttttgaacgttgtggagttaggttttttattgattggattagttaattatatatatattggcggtgttattgagatatcgttttattagaatttggtgaggaaaattagtttggggttttgagcgtggttttttttttttttttaaatatttttgatttatatgttgaattttttttaatttattttattcgggttttatagaaattttagtttaagaagtagtttatttaaaattggtttaaacgagtttaatagttttatattcggcgtgtttttttaagaaatagtaaaagttttttagaaattagaataggattttgaagaggagagaatttttatatagatgatggaatagatgagaaaggtttttttttttttttattttaatttatatttaattttatatttaattatatttttagttaataataattgttataataagttgttgtgaaaacgattttttatttttggttgtattaagatttggataaaggttgttattaggaagtcgtattcgataggttgttattaaagaataaggtattatattataatgtttggtttttttggagtttattttaagaattttaggatattttttagttttttggggaggtatttttaaattgttttaggtttaatttaatttaaattgaatgtgtttttaatggtaatgagggagggggaagcgtgtagagtgaatgtatttatttagacgggagtatgtgtatggaggttggtggttataatttttaagttttttcggttttcgtttttttaggattatattaaaaaataataattgttatttcggcgtgtttgtgtttgagttttcgattgtttgaaaatagcggtcgggagtttggtttatcgcggggattaaggaaagtttttcgtggtcgcgttttgttttttcgcggaaggggaagggaattcgggagggcgtttttgagttggagttgttgttattttgggtttagtttggtcggtgcgttaatgtttgcgtttttgcgttatcgttatttttatttttttttttttttttagttttttaaatttttattttttttttttcgttcgtatggaatcgtttttgtttacggggcgttgacgttatcgagtttatgttaatatgttatttttcgtttttttttttttatttttttatttatatatttttattcgttattataattcgttttttttatttattttttggttttattttttttttcgcgttcgttagggtatcgtcgagtagcggcggcggcggtagtagtagcggtagtcgtaatatttgggggaaatttaaggtggttacgtaggttttttcgaggttgcggcgtaaaagagttcgcggttttttggggtagtcgtagggtatttgatggtaacgtttttttagtcgtcggcgagttgggggtagtagggagtaggtaaaggcggggttgtagattagggttgagtagttcgggatttcgaatagttttacggagttatcggtcggtattgagaatacgagtaggggggtaagttgtaaaagggtttcggttgtttggaaacgagttatatcgagaaaggaggggcggttgggacgttttgcgcgagtagaaaagcgggggcggtttcgaatttttttttttaaggtttagtcgttggaagtttcgcgggagaagttttaggaagtttttttagtttcggtcgggagacggggagggggtttgtttttcggagttgcggcgttttttttgttagaaagttttttgcgttttcggcgtggttaggggaaatgatttgtaaagtagaagcggcggcgatttggacggtcgcgggggtgggatacgtttttagagttagttcgggttttttttttggttgggttgtaggtttatattttacgttttgcggagacgttgtttttaatttttattcgtttcgttttttttgtttagtttttttgggttttaagattgaggttgtgatagattttgtgttttaaacgaagatcgatttatttttttaaaattcgtggaaggggtacgagttggtgggtatagaggagtatcgaaagtattagagtttgtagaaggtgggaattagagtatttttttgtagaaggcgtatttgttgtttgttgttcggttgtattgtttgcgaaaggaaaaggggcgacgttttattttgatttttggggtttttaaagagttgggttacggttattgtttatttttttttttttttttttttttttttcgtaagtattacgttttttatcgaacgtgggtattgtatggaaataaggaaatatagaaaaataagttttatttttatttttatttttttttagatgggagtgtggggggtgggggtggggtagagagagtgagagagagagataattagaatgaatatatgttagaagaggaggaggtttgggataggaaaagggagtaaaaggggatgaatcgggtagggaaattttattcgaattgcgtgagttttttgagcgtttcgtgttatgggatatttgtacgttttttcgttaagggggtgacgaaggtgggtgggagaggttagggcgttgtaaggtatattttatttcgtgcggttttaggtgcgtattatttggttacgtcggttttgtttttcgtcggtgtttttgttgtattttttttatatgtgagcggtcgagtcgttgcgcgggcgtaggggtttcggggaaagtgaagtgtcgcgacgttgcgggttgcgtagatttgggagaggttatatttttttcggaaaaaaaaaaagaaaagaaaaaaaatattaaaaattatttaagttggttattaaggtgaacgtagagcggtttttattttaaaatcggttttgttcgtgacgttaggtcggaaatatattaaagcgagcgcgggttaggagtttagggagcgcggtagcgcggcgattgggcggcgggtcgttgacgcgcgttgacgcgcggagattttaggtgtatgttggtagcggtagcgtaagttatataaataaaggtatattggcggttagggttagttcgttcggcggttcgcgtacggtttcgcggttttttttgtttgtttagtcggtcgtttgtttttgtttttttttttcgtgaggtgttcgggtttttttcgtttagtttttttatttttattcgatttcggcgttcgggtttttagagggaattgtatttcggtagagttgaatgaatgaagatagacgcggagaatttttaagtgagtagatgtagtttatgtagttcgtttttttttatgtttttttttttttttgtacgttttttttttttatttgtgtgggataggttttttggaagtgggagttagaggtttttagtgagagtgggatcgaaggatggggagtgcgtgcgcgtagttatcggggggtatttgttcgaatttcggttttggtattagtggggagttggttttcgatagaggtttttaggttttttattggtggacgtggaagggagattttatagtttgggagttgaggattagttcgcggaaatgtgcgtaaagtttgttgttagtgaggaattgattgtggtttgtgaatacggagattttaagttttatgtatacgagggaagttgtttataaattgatagggagaggaagttttttagtttatgcgttgtttgggaattgtgttttcgcggttggttagcgcgcgatgtttttcgggtattgttgagtaagggtggtgttggtagcgtgttttgttattaagttgtttgaaatttttggttttgatatatgttgtttttgggtttgcgaatgtattagagcgagaatatgaatatgtaaagagtatagttatgaaattgtggagttattagggggttaatatttaatataggaatatttttaagggttgtggggttcgagttttttttttgttttttttgggtaattttttttttatttttattattattatgaagtaagattgtgggggaggggaaagaataaaaagagaggatattggttttttttttttattagtaataagattgtttgtgttttagaatgttttttaagtgggaatatttgaaaattgttaggatataagaatgttttgttttagaaaggtagattgtggaaggtattatggggaaggtgtttattttgttgtgttgggaaatatttttaatattggtgttaatattatataagtagtatgttttttttttgtaattgatttaagaagtttttggaaaagtagattttttttttttattttgtgattattaagttttgtgattattaaagatgttgaaagataagttttttggaaaagtgaatattaatttatttgtagttttaattttagtgttttgttaaaagtattttagaagtgcggatgtttttatttaatttgtttttttagttaaggtttttttaatattttgtaagggggaagattgtttttttattttatatttttgatttttattttttttttttttattaaaagaaaaggtaattttattataagaaaaaaaaatgtaagagaaggttttaatgttgtatttttatattttagtttttatatttaggttttgaattaatttaagatggaaatgatttttttatttatattgtagtaaaggggttagtttattatattataaatgttaaatgagtttatggattagttttttttttgtaggattttttttttgtaaggatttatatagtgtaatgggtggtattttttgttgttttaagttattttttttatatatttattttaagtgttatgtttggtaaaggttttttatttatttttaatgagataaatagggaaggtatggaagggtttgtttggtgagtttatatatgtttagttgaatttttgtcgggaagaaattttgaagttttttgtgtttgtattttagg

SEQ ID NO: 1354 - DNA, 6881 bp, Artificial Sequence
  chemically treated genomic DNA (Homo sapiens)
tttgaaatatagatataggaagttttagggttttttttcgatagagatttagttgggtatatgtagatttattaggtaggtttttttatgttttttttgtttgttttattggaaatgagtgggaagtttttattaaatatagtatttaaaatgaatgtataaaagaaatgatttgaaataatagaaaatattatttattgtattgtgtaaatttttgtagagagaagattttgtaagaggaaagttagtttatgaatttatttaatatttatgatgtaatgaattggtttttttgttatagtgtaggtggagaggttatttttattttaggttaatttaggatttgagtatgaagattagagtatgaaaatatagtattggaatttttttttgtattttttttttttgtggtgaaattgtttttttttttggtagaggggaagaaagtagaagttaagaatataaaatgagaaaataatttttttttttataaaatgttagaaaggttttgattgagaaggtaagttgagtggaagtattcgtatttttaaagtgtttttgatagagtattgggattggagttatagataaattgatgtttatttttttagaaaatttgttttttagtatttttaatggttataaggtttaatggttataaggtgggaagaggggatttatttttttaggagttttttaggttaattgtagaggggggatatattgtttatatggtattggtattaatattagaagtgttttttagtatagtaagatgaatattttttttataatgttttttataatttgtttttttggaataaggtatttttgtgttttagtaatttttagatgtttttatttggaagatattttagagtatagataattttattattaatgaaaaaagaaagttagtattttttttttttattttttttttttttttataattttgttttatagtggtggtgggggtggggggaagattatttagaaaaagtagaaaggagattcgaattttatagtttttagagatatttttgtgttggatattaattttttggtagttttatagttttataattgtattttttatatatttatattttcgttttgatatattcgtaaatttaaggatagtatatgttaaaattagaaattttaggtaatttagtaataggatacgttattaatattatttttatttaataatattcgggaaatatcgcgcgttggttagtcgcggagatatagtttttaagtaacgtataaattgaagaattttttttttttgttagtttgtgggtagtttttttcgtatatataggatttggagttttcgtgtttataggttataattaattttttattaatagtaaattttgcgtatattttcgcgggttagtttttagtttttaaattgtggagttttttttttacgtttattaatgaggagtttggaaatttttgtcgagagttaattttttattagtgttaaagtcggagttcgaataaatgtttttcggtaattgcgcgtacgtattttttatttttcggttttatttttattagaagtttttggtttttatttttagagaatttgttttatataagtggaaagaagagacgtgtaaaagaaggaaaaagtataaaagaaggcgaattgtatgggttgtatttatttatttaggagtttttcgcgtttgtttttatttatttaattttgtcgaagtgtagttttttttgggagttcgggcgtcggggtcgggtaggggtgggagagttgggcgaagggaattcggatattttacggagggagggagtagggataggcggtcggttggataggtaaaagggatcgcggagtcgtgcgcgagtcgtcgggcggattggttttggtcgttaatgtgtttttgtttatgtggtttgcgttgtcgttgttaatatgtatttaaagttttcgcgcgttagcgcgcgttagcggttcgtcgtttaatcgtcgcgttgtcgcgttttttggatttttggttcgcgttcgttttggtatattttcgatttgacgttacgagtagggtcgattttaaggtgggaatcgttttgcgtttattttggtagttagtttgggtggtttttggtgttttttttttttttttttttttttttcgaaagaggtgtgattttttttaggtttgcgtagttcgtagcgtcgcgatattttatttttttcgaagtttttgcgttcgcgtagcggttcggtcgtttatatgtggggagggtgtaataaaagtatcggcggaaggtaaggtcggcgtggttaggtagtacgtatttggagtcgtacggaatgggatgtgttttgtagcgttttaattttttttatttattttcgttatttttttagcggaagagcgtatagatgttttatgatacgagacgtttagagggtttacgtagttcgggtgggatttttttattcggtttatttttttttattttttttttttgttttaggttttttttttttttggtatatatttattttaattattttttttttttattttttttattttatttttattttttatatttttatttgaaagggaatgggagtgggggtagggtttatttttttatgtttttttatttttatgtagtgtttacgttcgatggaggacgtggtgtttgcgggggggggggagaggaaggggagagggtagatagtgatcgtgatttagttttttagaaattttaaaagttagagtgaagcgtcgtttttttttttttcgtagataatgtagtcgagtagtaggtaataggtgcgttttttgtagaaaggtattttgatttttattttttgtaaattttaatattttcgatatttttttgtgtttattaattcgtattttttttacgagttttaagggaataaatcgattttcgtttgaaatataaggtttattatagttttaattttagagtttagaaagattggataagaaaagcgaagcgggtggggattgggggtagcgttttcgtaaagcgtaaggtgtgagtttatagtttagttaggagaggggttcgagttggttttgggagcgtgttttattttcgcggtcgtttaagtcgtcgtcgtttttgttttgtaagttattttttttagttacgtcgagagcgtagggagttttttagtaaaggaaacgtcgtagtttcggagggtaagtttttttttcgtttttcggtcggagttgggagggttttttagggtttttttcgcggggtttttagcggttgggttttgggagggagagttcggagtcgttttcgtttttttattcgcgtagagcgttttagtcgttttttttttttcggtgtggttcgtttttaggtagtcgggatttttttgtaatttgtttttttattcgtgtttttagtatcggtcgatggtttcgtggaattattcgggatttcgggttgtttaattttaatttgtagtttcgtttttgtttattttttgttgtttttagttcgtcggcggttggggaggcgttgttattagatgttttgcggttgttttaggaagtcgcgggtttttttgcgtcgtagtttcggggaaatttacgtgattattttaagttttttttagatgttgcggttgtcgttgttgttgtcgtcgtcgtcgttgttcggcgatgttttagcgggcgcgagaaaaaaaataaaattaggaagtgggtggggggggcgggttgtggtggcgggtgagggtgtgtgagtagggggatgaggaggggagggcgaagaatagtatattagtatgagttcggtagcgttagcgtttcgtgggtagaagcgattttatgcgaacgaaagggaaaaagtgagagtttggagagttggggagaaggaagggggtgggggtggcggtgacgtaggggcgtaggtattgacgtatcggttaggttgggtttaaaatagtagtaattttagtttagaggcgttttttcgggttttttttttttttcgcgagggagtagggcgcggttacgggaagttttttttgattttcgcggtgggttaggttttcggtcgttatttttaggtagtcggaaatttaagtataggtacgtcggggtggtagttattattttttaatatagttttaggaaaacgggggtcgggagaatttgaaggttgtaattattagtttttatatatatattttcgtttaagtagatatatttattttgtacgttttttttttttttattgttattaaaaatatatttagtttaggttgggttgagtttgggataatttgaaaatgtttttttagagagttgaaaagtgttttggagtttttaaagtgagttttaaggaagttaaatattgtaatatgatgttttattttttaataataatttgtcgagtgcggttttttgataatagtttttgtttaagttttaatgtaattaagaatgaagggtcgtttttatagtagtttattataataattattattaattgggaatataattaaatataaaattaaatataaattaaaatgagagaaaggggagattttttttatttattttattatttgtgtaagagtttttttttttttaaagttttattttggtttttgggaagtttttattgttttttaggaagatacgtcggatgtaagattgttaaattcgtttaaattaattttgaataagttattttttaggttagggtttttgtaaggttcggatgagatgggttggaaaggatttagtatatagattagaagtgtttaaaaaaaaaaaaaaggttacgtttaaaattttagattagttttttttattagattttgatgggacgatgttttagtagtatcgttaatgtgtgtgtaattgattgatttagttagtagggggtttgattttataacgtttaagagaattatttatatatatatatatatatatatatatatatatatatatatatatatataagttatttattatttaagttaaattaaagagaatgttgtaggtttaaatatttatattgtgttggaatttataaataattaaaaatttttgatttttttttattttttttaaaagggaaatagttttaatatatgggattaggtttataaaagattttttttatttttttttgtttatgtttaatttattgttaggttatagaaggaaaaaattaaattggtaataaaattttttattttattattaagaagtttaaattggtatatagtttggaaaaatgaaagtatgttttaaaattttatgattatatgttaaataaattatagtttagaaggagatttttgtgggtatatttgttagtatataagagaatgtttttgtgtatagagatttaattatatatatggaattaaaatgtagaattgaataattttttagaaaatgttaaaacgatgttttaggttaaaagaaattgaaattttgtatttatatgattgtaattttttaagatttttgaatataaatagtttaaataaagtattttataatttaattaaaatgataataatggtttttttaggttttcgtagtcgatataattttaaattattgttatgtataaatgtgtaaagttattttataatgaaggtttatttttttaatagtttttaaaatgagtgggagtaaaaattgtatttatttttttttgaaattaattaaaataaattaaaaagtattattattaagaaatattattggatgattatagaaaaatatttaggaaagtaatgttattatattattttttatgatattaattaatattaggtagaatatattggtatatgtaaatatatttttattaaaaattaatataaataatatatatatttatatttaaattaaagtagtttattttatgtatggttaggtagattatatttaataaaattgagtttttggtataatttagaaagtaaatatgaatgtaattttataggattttttattttaatgtataggaaagaggtttttagggatttattttattattttttttaaatgaatttagaatagattttataatgtagatatagtgaaatagatatatttgttatgttttacgagttgaggtaattttaagattttttataataaaattattttgtagaatttatttttagtattataagatatatattttaaattatatttggataaatttatttatagtatttgttgttattgggtagtaagttatattattgatataagaaataaatttttattttgaaaaaaatttgtttttgaaaatataaaattagtttttatttttgaaagtgtttttattgttttgtttttgttattttatttgtattgataggatagtaattgattaaattgtttgttttttttttataggatggttaaagaataagttaattgttttgttaatatttatattttggatagttgtagtttttatttagtattttttagtcgatttttattaaaaattatttaatataaatatttttaaaattatttttttttttgatatagaatttagtattagaaatgtgtaaagatgtgtagaaaaaaaatagtatttttttttttggaagtatttttttgtaaattgaaattataaaattgaatatatggtaaaattttatgttatttaaaaagtattttgtataataaaaattttttattttttgttaatatttgatatttagtaattattttttaaatatttgtttttaaattaattatttaatatttttttatttaagaattattttttattaggtaaagaagaataattttggttttagattttattgttaattttagtaaatataggtatta

SEQ ID NO: 1355 - DNA, 6590 bp, Artificial Sequence
  chemically treated genomic DNA (Homo sapiens)
ttagtttaggtaataagagtgaaatttcgttttaaaaaaaaataaataaaaataataatttttaaaaagagtattatgaaagtaaaagtatgtatataagaggtattttttggtcgggtgcggtggtttacgtttgtaattttagtattttgggaggttaaggtaggtggattataagagtttgagattagtttggttaatatggtgaaatttcgtttttattaaaaatataaaaaattagttgggtgtggtggtagatatttgtaattttagttattcgggaggttgagggaggagaattgtttgattttaggaggtggaggttgtagtgagttaagattatggtattgtattttagtatgggtaatagagtgagattttgttttaaaaaaaaaaaaaaaaaaaaaaaaaaaaaaaaaagaggtattttttgtttggtttttgtttatatttgttgtgtgattttgaataagttattttttttttttgttttttgattatataggtagatattagagtattatgattttttatgttaattgttatattttataaatgtgtcgttgttttttaattattcgttgaagatcgagatttttttgttgaggataggttttttgattggagttttatattattttttttttaaagcgtaagaatgagtggtgtgtaattttttgtttttgtttttttaaaggaaataataatttaaagttatttgtaaaggtatgaaggtataattttgggtaaaagtggatttgttttaatttatttttttaattttttatgggattattttatttttagttaattttacgtaatgtttgtttttattgtatttttttaaagaattggatgttggttttttaaggatagtttttttttgtatttatttgtttatagatatatatatttaattaaaaatatttaataattgtaattgttatgaggatatttgggagtaaataaaattttatttatttatttagagatagggttttattatgggagtaaataaagttttttttatttatttagagatagtatttagttatgttgtttaggttggttttaaatttcggagtttaagtgagttttttgtttttattttcgaaagtgttgggattataagtttgaattattgtttttggttagaatttttttttttttttttagttaatttagaaagtttattttgttaaggttgaggatgttaattcgtgatatagttttaggaggatttgaggatatgtgtttaaggtagttagagatagtttggttttatatattttaggggatatgagatattaattaacgtatgtaagatggatattggtttggtttggaaaggcgggataattcgaagtggggagggggtttttaagtggtaggtatataagatataaatggttgtattattttgaatttttgattagtttttttgaagggggtaattagaaatgtatttattttagtgagtagaggggtgattttgaatagaacgggaggtaggtttgttttgagtaattttttagtttgatttttttttttagttgagtgattttggggttttaagatattttttttttatatttttttttttttttttttaaaaatattttagataaagtattttagaagaaaatgagtttttagttttaggttttatttgattttttttggttaggatggtttattattataggggtaagttcggagttattaggaaagtttatttttagaaggttgtaaagttttatgttttgtgaagagaaaatagggggaggaagggagaatataataaataaaagaataattttggaaaattaagatataggttagagtatttcgaagtttatatattagtagataggtatgaaagtggtttacgtttgtaaatatgtaattatttttttttgaggtttaagttgtttagttttagtttgtagggttttataaaagtataatttagtttttagtgattttaaattagggaaaatggggggaaaagaaggaaaaaatttaaaatattattttggagatttgtagttaagaaaaattagaatttagtttaaattatagaaaataataaaaattgaaaaatattaggtaagattagaatgtaataataggtgtattatagtttttgaagtataatttttttttagttttttatttttattaaagatgaattatggtaagggaggagattattttttatattgttttatgtttaatttttgtttttaaagaaagaagatgtaaaaattaaaaggtagaaatgaaatttataagtaggtagtttggtgttatattttgggtttggtagttaaagatcgatttttgatttaataggttatttgtataaaaaaggtattgtgaagatttttgttttattttgttttgttttaattattggtgtatgtaatttttagttatgtattttttgtttgtttaatttattacgatttttttatatggatttttttagagttgtgagtttttaaaagggataagaatcgtttattcggggagtttagtttttgagataggggttttgtttatgttttcggtcgaataaattttttttttttttaattcggtgtttgaggggtttttgtttgtagttttttttgttataatggtatgattggtttgttttattatatttggtttaattttttgtatatagtgtagtaagaatttttaattagtaaatgaagtgagtattgtaaagatagtattttatttttatggtgatatttagttttaggttaaagttaatattttatatagtaggagtggagagtgttaatttatgaataatttggttaagaggttaagggtttgtaagaaagatagttggtatttataaaatattttatttaataaaaataggaaatatattttttttaaatttatatagaatatttattaagatatattatgttttgggttagaaaatatattttaataaattttaatagagatatgttatgtaaagtatgttttttattataatggaattaaaaaagaaatttataaaagaaagatagttggaaaattttaaaatatatggagattaaagaatatatttttaaataatatatggggtaaggaagaagttttaagagaaattttaaaatattttgggttaggtttagtggtttacgtttataattttagtattttgggaggttgaggtagatggatcgtttgagtttaggagttcgagattagattgggttatatgtagaaattttatttttataaaaaatataaaaattagttaggtatggtggtatgtatttgtagttttagttatttgggaggttgaggtgggaggattatttgagtttaggaggttaaggttgtagtgagttaagattgtgttattgtattttagtttgggtaatagagtgagattttgttttaataaaataaataaatatattttgaattaaattaaaatgaaaaaatagtttattaaaaagtgtgggatgtagtgaaagtagtgtttagagggaaagttatagtattgaatgtatatattaggagaagaaagatttaatttagagagggatgaataggtgaggtataggggattttaaggtagtgaaatttttgtagggtaggggagttttaaaattgggatatcgttcgggaaggtttttggtttcgtttaggaaggaatttaagggtgagttagaggaggaagaaaaaggtttattgaggtagtagggttatagttttgtgattgtttttgtagagtagggttattttataggtagtgtttggagagtagtagtttagggtatttttatagttatatttatatttatttttaaatacgtgtaaattaagggtaggttatttagaaatttttagaagaagggtggtaattgggttattgttagggaatgagtaaattgtttatggtgttggtgtttatgttagttagtttttaatttggttttgagttaagttttattttttattttaaaattattttgtatggtgttgtaatggtggatatatgatatgttatgtttggtaaaatttatagaattgtaggatataagagtgaattttaatgtaaattttaatgtaaatggatttttgttaattatgatgtattaatattaatttattaattgtaataaatgtattatagtattgttaataatagaggaatttattggtaggagagagagtttatggaattttttgtatatttagtttaatatttttgtaagtttaaaattgttgtgagaaataaaatttaatttgggtaatatagtaagattttgtttttataaaaaataaaaaatgagttgggtgtagtaacgtatgtttgtagttttaggtatttaggaggttggggtaggaggattttttgaatttaggaagttgaggttgtacgagttatgattatgtttttgtattttagtttggataataaagtaagattttgtttttaaaaaataataaaataaaataaaaatttattaattgaaagggaaaaaagtatagtataatattatttttaataaaaagaaaagagatttgtgtttgtgtgtgtgttaatatttgaaaaaaatttggaaagttttatattaaaacgtttatagaggtaattttgtagtgttagaattatagatgatttttttattttttggtttttttgattttttttttttttgtagtgggtatgtattgttggaaaatattatagataattgtgaaaggattttattaataataaaaaaaagataaagaaggaaatataaaatttgttaaataagatttatgttggttggaggttaaaatgtatttttagagtagagtttagagaaaggttgggttgtttgttgttggttaaaggataaagggtaagttttaggaagtagaagagtgagtagatgaaatttagtattgggattaggggagtgtttgatttgtaaaaggaaagtgtaaagatagttttttttttttgaggaaacgaaattaatagtagtttaagtttagttagtagaagagataaaagtaaataggtttgggaggtagttttgttgttatttttttttttgttaatgatggattttagaaatattttagttaaatttttggataagtttattgaagattattttttgttagatacgtgttttcgtatgtaaattaattatgttattgatattatttgtgggtttttgaaggaaaggtgttttcgaggtagtttttattttgtgtgtgtgtttaaggtggtaaaggtgagtttaggtttgtttggttaggggaggggtggttgaatgtgtaagagttgagattgagaatgagagagagagagagagagaagtaaaaatttagaatttagggtgtaaatgtgagtatagagagttgagattttttgggatggtggttttttatttatttatatagtatgttaaaatagattttggggtgaaattttatatttttattattaataagtgatttttttttttatttttcgttgaagtttatgaattattgttttgggcgatgtttattttagaaatagggaattgaattttagttttggtaaatagtttgttaattcgtggttaggttaggggtttattatttttgtagtgaagaattatatgttttgaaagtaaatagtatttgttggttgtaagattttgagtaagttatttaattattttgtgttttaatttttttagttataatttttaatattgttgtagttttgttagtgtattttaatgtagtagttttttattgaattagtatttaaggttttttgttttgtatttaagaaaattaaggaatatggatataaacgtgagtttggagtaaaagtttagtaagtaaaagaagaaagttgtttttattgtggagagggaagtttgagtggattgttagattgtagttgaatgtaaaaaatttttataagaaattatttttttttttgtaattgtttgagaaattttttattagtaaagttgtgtaattttttttattttatgtagttgtgggtatatttttaggtaagtataaagcgttgttttttttgtatgtataattgtggatttgttttaggtaagttttattttttgcgttagttttaggtaggtcgtttttttagggtttagttttgattatttatttaattgattttttttttatttttttttaatattttatagggtcgtgtagattaagtaaaatagtaagtgtgaattatttagtataagttagttttgggtatcgtaaaggataatgggaaaagaatatagattttggaagaaggtttttaggtttgaattgtatttgttatttattagttgggtgatggggttgatatattattttattgagtatttatttttttatttgtaaaatgggaattaatgataatggtatttaaattatagtattattgtgagtattataggagtttaagatatgtaatgtttttagaatagtggttagtgttttataatgttagtgattgtttttgttattttatttagggaggtttgttttattaagtattaattattatttttgtcgttttttttagg

SEQ ID NO: 1356 - DNA, 6590 bp, Artificial Sequence
  chemically treated genomic DNA (Homo sapiens)
tttgaaaaagacgataaaaataataattgatgtttagtgaggtaaatttttttaaataaaatgataggagtaattattaatattatggagtattagttattgttttgaaggtattgtatgttttaaatttttataatgtttataatgatgttatgatttggatgttattattattagtttttattttatagatgggaaaatggatgtttagtgagataatatattagttttattatttagttagtaggtggtaaatataatttaaatttgggggtttttttttaggatttgtgttttttttttattgttttttacgatgtttaggattagtttatgttgggtggtttatatttattattttatttaatttatacggttttatgaggtattgagggaaagtagaggaaaaattagttaggtaaatggttaaggttgggttttggaggagcggtttgtttgaaattggcgtagggagtgggatttatttaaaataaatttatagttatatatataagagaagtagcgttttatgtttgtttagagatatatttatagttgtataaggtaagggaagttgtatagttttattgataaaaagttttttaaatagttatagggaggagagtggttttttataaaagttttttgtatttagttgtaatttggtaatttatttagatttttttttttatagtggagatagttttttttttttgtttattgaatttttgttttaagtttacgtttgtgtttatgttttttaatttttttggatgtaggataaagaattttgggtattaatttagtgagaagttgttatattaaggtgtattggtaagattgtaatagtattggggattatggttgaggaaattggaatatagagtagttaagtgatttgtttaaggttttgtagttagtaggtgttatttgtttttaaaatatatgattttttattgtagaaatggtgagtttttagtttggttacgaattagtaaattgtttattagagttgggatttagttttttatttttgaaatgggtatcgtttaggatagtggtttataaattttagcgggaagtaggggggagggttatttgttaataatagggatgtaggattttattttagaatttattttaatatgttgtgtggataaataagaaattattattttagaagattttagttttttgtatttatatttgtattttgggttttaggtttttgttttttttttttttttttttttatttttaattttaatttttgtatatttagttattttttttttggttaggtaggtttggatttatttttattattttggatatatatatagggtaggagttatttcggaagtattttttttttaggaatttatagatgatgttaatggtatggttgatttgtatgcggaaatacgtgtttggtaagagatagtttttaatgaatttgtttagagatttggttggggtatttttgagatttattattgataggagagagagtggtaatagaattgttttttagatttgtttgtttttattttttttgttgattgagtttggattgttgttggtttcgtttttttagaagggaggagttgtttttgtattttttttttgtaaattagatatttttttgattttagtgttgaattttatttgtttatttttttgttttttgaaatttattttttgttttttagttagtaataagtagtttagtttttttttgaattttgttttggaaatgtattttaatttttagttaatataaattttatttaatagattttgtgtttttttttttattttttttttgttgttgatgaaatttttttatagttgtttgtggtattttttagtaatatatgtttattgtaaaaagaaaaaaagttagaaaaattaggaagtggaaagattatttatgattttaatattataaaattgtttttataaacgttttgatatagagttttttagattttttttaaatgttaatatatatataaatataggttttttttttttttgttaagaatggtattatattatgttttttttttttttaattagtagatttttattttattttattattttttggagataggattttgttttgttatttaggttggagtgtaggggtatgattatgattcgtgtaattttaattttttgggtttaagggatttttttgttttagttttttgaatatttgggattataggtatgcgttattgtatttagtttattttttattttttgtagagataaggttttgttatgttgtttaggttggattttattttttatagtagttttaggtttatagaaatattgagttgaatgtgtagagagttttataagtttttttttttgttaataagtttttttattattaatagtattgtgatatatttgttataattgatgaattgatattaatatattataattaataaaagtttatttatattaaggtttatattaaggtttatttttgtgttttatagttttatggattttgttaaatataatatgttatgtatttattattatagtattatgtagaatagttttgagataggaggtggggtttgatttagggttagattgaagattggttggtatgagtattagtattatgaatagtttatttattttttggtaatgatttagttattattttttttttagaaatttttgaataatttgtttttaatttgtacgtatttaaaagtgggtatgaatgtgattatagaagtgttttgagttgttgttttttaggtattgtttatggggtggttttgttttgtagggatagttatagaattgtaattttgttgttttaataaattttttttttttttttttagtttatttttgaatttttttttggacgaagttaagagttttttcggacggtgttttagttttggggtttttttgttttgtaagagttttattattttaaaattttttatgttttatttgtttatttttttttgagttagatttttttttttttaatatatgtatttaatgttataattttttttttaaatattatttttattatattttatattttttgataggttgtttttttattttaatttaatttaaaatatatttatttattttgttgagatagggttttattttgttgtttaggttggggtgtagtggtataattttagtttattgtagttttgattttttgggtttaggtgatttttttattttagttttttaagtagttgggattataggtatatgttattatgtttggttaatttttgtattttttgtagagatggggtttttgtatgtggtttagtttggtttcgaatttttgggtttaagcgatttatttgttttagttttttaaagtgttaggattataggcgtaagttattgagtttggtttaaaatattttaaaattttttttgagattttttttttgttttatgtgttatttagaggtgtgttttttaatttttatatattttggaattttttagttattttttttttgtgggttttttttttaattttattgtagtaaagggtatgttttgtataatatatttttgttgaaatttgttaaagtgtgttttttagtttagaatataatatgttttggtgaatgttttgtgtgagtttgagaagaatgtgttttttgtttttgttggatgaaatattttgtaaatgttaattattttttttataaatttttaattttttaattagattatttatgagttgatattttttatttttattgtataagatgttgattttggtttaagattaaatgttattatgagggtggggtgttgtttttgtaatatttattttatttattagttgaagatttttgttgtattgtatgtaaaaaattaggttaagtatgataaagtaaattagttatattattgtagtaggaagagttgtagataaaaattttttagatatcgagttaaagaaggaaggggtttattcggtcgggagtatgggtaagatttttgttttaagagttgagtttttcgagtgagcgatttttgttttttttaagggtttataattttaagggggtttatgtgagagggtcgtgatggattgagtaagtagggggtatatgattgggggttgtatatattagtaattagaatagaatagaataggatagggatttttatagtgttttttttatgtaaataatttattaggttaggagtcgatttttaattattaggtttagggtgtggtattaggttatttgtttgtggattttatttttgttttttagtttttatattttttttttttggaggtagaaattaggtataagataatatgaggggtggtttttttttttattatgatttatttttagtaaaaatgggaaattggagaaagattatgttttaaaaattatagtatatttgttgttgtattttagttttgtttaatgttttttaatttttattattttttatagtttggattgaattttaattttttttggttataagtttttaaaataatattttaaatttttttttttttttttttttattttttttaatttggaattattgaaaattaagttgtgtttttataaagttttgtaaattggagttagataatttaaattttagaaaaaaataattatatatttatagacgtaagttatttttatatttatttgttgatgtgtgaatttcggaatattttggtttgtattttgattttttaggattgtttttttgtttgttgtgttttttttttttttttttattttttttttataggatatgagattttataattttttaaaaatgagtttttttaataatttcggatttatttttatagtaataaattattttagttaagagaaattagatgaaatttgagattagagatttatttttttttaaaatgttttgtttaaaatatttttaaaaagaaaagggaggaaatgtgaaaggaaaatattttggggttttaaaattatttagttaaagggaaaagttaagttggggaattgtttagggtaaatttgtttttcgttttatttaaaattatttttttgtttattgagataaatgtatttttgattgttttttttagagaggttaattagaaatttaaaataatgtaattatttgtgttttatatatttattatttggaagttttttttttatttcgagttgtttcgtttttttagattaaattaatgtttattttatatacgttgattgatgttttatgttttttaaaatgtataaaattaaattgtttttgattgttttgggtatatgtttttaggtttttttgaggttgtgttacgggttggtatttttaattttggtaaaataaattttttaaattaattgaaaaaaaaaaaaaagattttggttaggagtagtgatttaggtttgtaattttagtattttcggaggtggaggtaggaggtttatttgagtttcggagtttgagattagtttggataatatagttagatgttgtttttaaataaataaagaagattttgtttgtttttatagtgagattttgtttttaaataaataaataaaattttgtttgtttttaaatgtttttatggtaattgtagttgttaaatatttttgattaaatatatatatttgtaaatagatgagtgtaaaagagagttgtttttaggaaattaatatttaattttttggaaagatgtaataaaggtaagtattgcgtagaattagttaagagtgagatgattttatagaagattgagaaaataagttgaaataaatttatttttgtttaggattatgtttttatgtttttgtaggtggttttaaattattgttttttttaaagaaatagaaataggaaattatatattatttatttttgcgttttgagagaaagatagtgtgggattttagttagggggtttgtttttagtaaaaaggtttcggtttttaacgaatgattaggaaataacggtatatttatggggtgtaataattaatatagagaattatgatgttttgatgtttatttgtgtagttagagaataaaaaggggaagtgatttatttaagattatatagtagatatggataagagttaagtaaaagatattttttttttttttttttttttttttttttttttttttgagatagagttttattttgttgtttatgttggagtgtagtgttataattttggtttattgtaatttttattttttgggattaagtaattttttttttttagtttttcgagtagttgggattataggtgtttgttattatatttagttaattttttgtatttttagtagagacggggttttattatgttggttaggttggttttaaatttttgtgatttatttgttttggttttttaaagtgttgggattataggcgtgagttatcgtattcggttaaaagatattttttatgtatatatttttgtttttatggtattttttttaaaaattattatttttatttatttttttttgagacggagttttatttttgttgtttaagttgg

SEQ ID NO: 1357 - DNA, 13449 bp, Artificial Sequence
  chemically treated genomic DNA (Homo sapiens)
aattagagttttttagaaaaattaaattattagaatagaggaagagatatataaagagatttattatgagggtttgatttgtgtgattatggagtttgagaagttttgtgatttatcgtttgtaagttggagatttaggaaatttagtggttgtagttttagattaatttagaaggttgagaattaggagattgttggaataagttttaatttaagtatgaaagtttaagaattaggagtattaatattcgagtgtagacgatagatgttttagtttatgtagggagagaaaatttgttgtttttttttttgttttatttaggtttttagtggattggaagatgtatatttattttggtgagggttgttttttttatttagtttatagattgaaatattaattttttttaggaatatgtttataggtatatttagaaataatattttattagttatttgggcgttttttaatttcgtttagtagatatataaaattaatttttatgtatatttaggagtggaattgttggattacgtgataattttatgtttagttatttgagaattgttagattgttttttatagtggttgtattatttatatatatttatttttggtagtgaatgaaagttttagtttttttgtatttttgttaatatttattgtttattatgttgattatagttattttagtgggtagatgagaaagtgatgatatgttgttaaaattattaggtttgtttaatgtggttaggattttatatggtaaaaaagaatagggttttgatatatagaatgggaatatataggttgatgttattgagaattttttttttttttttttttttttgagatagtgttttgttttgtcgtttaggttggagtatagtggtataattttggtttattgtattttttattttttgggtttaagtggtttttttgttttagtttttcgagtagttgggattataggtatatgttattacgtttgattaatttttgtgttattagtagagatggggttttattatgttggttaggttggttttgaattttttattttaagttatttgtttattttagttttttaaagtgttgggattataggtaagggttattatttcggttttattgagaattttgaatttttagatttttttgatttttagagttgtaaaagtgatttatttatttttttttgttaagagttaattttttttttttgtttggaaattttatagaggtatttataagacgtttgtttttgtgtttatttttttttttgtttataagggttgtaattaggtttaaattttagtataaataagttagggatgtgacgggttttataggggaggaaagggtttatattttaaagtagttggagggttaagttagtatgattagtagaagtcgggtgagtttgtgtaggagttaattttgagggtgttcgattagggggttgtagtgtgaggttagataggaaagggtttattgattcggaagttttttgggagtttagggttgtatatttaggtaaggattttaggagaaggtgtaaatttgttgttaggagggtttttagaagacgggaaaaagtaggaggttatgttaagtgagatttaaatgttagaattgttaggggagacggtggtagatgcgatgaaaggttagggaagtggtaatgtttgggaaggttgtataaggtttagggagttagaggcgacgattttttatggaaaggttaagatttttttttattaagtttacgaggaatggattaggaagagaatattagttagtattatagagaagtttagaaagttttttttgtaggagatgttattataggatggtgggtgaggttttttgggagttaggtttattgatagtaaaagggatggtggaattttggagtaagagaggttaggagatggtatttattaggggatatagtgtttattatgagtggtagggtttaggattggttaggaggggttggtttgtagaatatggagatgatttttaaattttggtgtttatagggatagattagatgggttataagtaggtagttatttaatttacgttattaaaatattttaagaatgaacgtcgaggaaattttttttagtaaaaatattattattgtttttttagtgggttttttaggaaatacgtttgttatatacgttagttaaatgttatgtgtgagtttagatgttggcgggggtgcggatgttataaagaagagtattggaatcgttggtaaattttttaatataagaatgtatttatggttggatgtagtggtttatatttataattttattattttgggaggtcgaggtaggtagattatttgagtttaggagttcgagattagtttgggtaatatggtgagattttatttgtataaaaaaatataaaaattagttagatatggtggtgtgtgtttgtggttttagttatttaggaagttgaggtagaagaatcgtttgagtttgagaggttgaggttatagtgagtcgagattgtgttattgtattttagtttgggtgatagtgagattttgtttgttttaaaatatatatttatataatatttatataataaacgtatatttattatatatgttatataaattatatattatataaattatataaaattatatttattatatatgttatgagatgatagtattgtattaatgataaaagtttgaattggattattgttttgtgtttttgtaatataatatttttgtttttaggagatataggttgaagtatttaggagtaaagggatataaattatgtaatatgtatttaaatggtttaggaataaaaatatttatgaagggttgggcgtggtggtttaggtttgtaattttagtattttgggtggttgaggtgggaagatcgtttgaggttaggagttcgagtttagtttgggtaatatggtgatattatgatttttatttttattaaaaaattttaaaaatttagttaggtatggtggtgtatgtttatagttttagttatttaggaggttgaagtaggaagattgtttgagtttgggagggtgaggttatagtgagttataattacgttattgtattttagtttgggtgatagagtgagattttgttttaaaaataaaataaaataaaaattttttaaaatgtataaatagtaagaaaatgaggggtaaatgtggtaaaaaatataatggttaaaaagtttaaggaagttttttgtgtgtattttgtaaatttttttagtattttaaattattttaaaataaagtgtttttttaaataataaataaagtataggttttggagttaggtagtgtgttagtgtgagaatttagtttgataattttttagttgtgtgattacgggtaaatgtttttatttttgtgagtttttatgtttttatttgaaaaaggaattttaggattacgtttgtttagtttgtttatttttcggtgttgtagtaaaagttggataagggtaggaaaggtttttaatgagtatgtgtattaatcgaggtttttttagaattaatagggtatttatatttattttgaggtatttattttaaggaattggtttatgtgattgtggaggttggtaaatttaaaatcggtagggtagattggtaggtgggagatttaggaaggagttgttgttgtaagtggaggttaaggtattgtagtcgaatttttttttttttgggggagtttagtttttagtttattaaggtttttaattgattgaattaggtttattattttatagatgataatttattttatttaaaaaaaaagtttattaatgtaaatgttaattttatttttaaaaaatatttttataaaaagatttaggataatgtttgattaaatatttgggtatttgggtttagttaatttgatatataaaattaattattttagtatggaagggttttggttttttattatattttggagatttttgttttttttgtgaattattattgttgggttaaggtagttggttgggagttttttgcgagttttgtttttaaagttttgggtataggagttgtatgtttgttttttttttggtttatatatttggggtgtgtttttttgtttttgcgaggttggataagtgttttatacggtttttcggttgtttataagtgtgttgagaaattggatatatagaggtttttattcgttgattatacgggggtttgtgtttatttagaagtagattaaaatttgagtttagttaggtttttgttttgttgtgtgtttttgagtaagttagttttttttttgggttttttttttttttttgtcgttttttttgaatgtgagttttttggttattgagaatagggggaaagggatagagttttaaaagatgatttgtgcgtttttgtttttaagtattttgtaggtattatttaattattaagttaattttacgagagagttgttatttttttttagtttatagatgggggaattgaggcgcgaagagggtaggcgatgtgtttaaggatagatatttagtaggtatgaagtttttataatggggttttagaggttgtttagttaattttaagttttggggagtttttgaagggttggttattacgttgtcggggatagggaaagtttttgagtttgagttagttttggtttttttgttggggtgtaggagttagtaaattttgttgtaaggggcggggaagagtatttgagtttaagttagttttggtttttttgtttcggatgtaggagttggtaaatttattgtaaggggtagggtagagtttttgagtttaagttagttttgtttttttgtttcggatataagagttggtaagttcgttgtagtgggtggagagaggtttttagattttagttttagttttttggttttgggtagtagtaagaatttttttgttttttattttattatttattgttttgtcggtagttagttgagagtaatgggaaatggggagttttagttgttttcggtgtttgtttagaagttgggttggtttatttaggaatatttgaagttttacgaagaatgttagatattgatcgacgagatggtgaatattatttgtgacgttttgtaggaattcgaatagttttttttggtgtagggagtggttatagtgagtttagggttgaggttgggtttttgggaggtaggagattttacggcggtagtaaggtcgagttattgggtgttgggtgtttattatgtgcgaggtttatatttgggtgggatgtggtgtaggagttttaggttttggagtaggcgtttgttttagagttgtgtgatattgggtaggttatttaatttttttgtgttttagtttttgattttgtaaaatggggagaggtataatatttattttagagtatcgtaaggtttgagtatattatgtttttagtaaaagattggtagtgtttagtgaatttattgtgattatttattgcgatttttttttattttttttatagtatagaggagtaaatttagggaggttagagaattttgtttaaattatttaggttgttttgtggttttttcgtagtaagaaggagtggtttttattagttagaaatatttggttttgtggatataaattttaggattgaggttgaaaattttggatttttggggaggaagggggattggggagatgttaggattttagaattgggggcgtgggggttttgatggtttaatattatttttttagttttttgagttgttgacgttttttttttgttgttgttatattttttggtttttattttttgtatatattcgttagtgttttaataaagaaatttagatacgtggtgtttttagttttggtttaggttagtaagttaaggtaagtttggttaatagttattgttagaattgggattttaagtttgggtaattggtttgagggtatgtatgtttaattattatattattttgttttttaatttttttttttttatggaagtaaaatagaaaaagtgtttagattaaagtgtttagtttgataggtagttataaataatgtaattgtgtaatttttatttagatttagaaataaaatatttttagttttttagagttttgggttttcgatttagttagtatttttaaatttaggtaggtaattttttgatttttaatagtatagatacgttttgtttgtttttaaacgttttataattatagggtgattaattattttagtttatttaagattggggtgttttttgggatgtgggatttttggtgtgaaagttgggaatgtaaattaggatgtatgggtgaattttatataaatggtattatgggttttgtgtgttttagtgcgtggtttttttgatttatgatgtttatgaaatttatgttgtggggtatagttgtttatttttttattgttgtgttaattttattatgtgaatattttatatttgtttattttattgtgtttttttatttttatataattgtgtatatttatatggggtatatgtgatatttggatatatggatataatgtgaaatgattagggtagttaggatatttattattttaaatattgattatttatttgtgttgagaatagtttagatttttttttttaattattttgaaatatataataaattattgttaattatagttattttattgtgttattaaatattagaatttattttttttatttaattgtatgtttgtatttattaattaatttttttttatttttttttttattttttagtttttggtaattatgattttattttttatttttatgagattaattttttttaatttttatataaatatatgtaatattgtttttttatgtttgatttattttatttaatataatgatttttagttttatgtatattgttgtaaatgatagaattttattttttttgtgtttgaatagtattttattgtgtatatatattatattgtttttatttatttagttgttgatggatacgttggttgattttatattttggtttttgtgaatagtgttgtaataaatatgagggtgtagttattttttttttggataaatatttagtagtgggattgttggattgaatggtagtgttatttttattttttttagaaatttttatattgtttttcgtaatgattgtgttaatttatatttttattaatagtgtgtaagattttttttattttaaatttttgttagcgtttattttttgtttttttgataatagttattttaattggggtgagatggtattttattgtggttttgatttgtatttttttagtgattagtgatgttaagtatttttttatatatttattggttattttgtatgtttttttttgagaaatgtttatttaggttttttggttgttttttaatgggatgggttgttttttttgttgttgagttgtttacgttttttgtatattttggatattaaatttttgttggaaaaatagtttttaaatatttttttttattttatagtttgtttttttatttttgattgttttttttgatgtgtagaagtttttttatttaatatagttttaattgtttattttttgtttttgttgtttgtgtttttgaagttttagttataaaatatttgtatagattaatattatgaagtattatttttttgttttattttattaattttattattttaggttttatgtttaattttttaatttatttttagttaattttttataagatgatagacgggggtttagttttatttttttatatatggatatttagtttttttaatattatttattgaagagagtattttttttttaatgtgtgtttatggtgtttttttaattagttggttgtaaatttgtggatttgtttttgggttttcgattttgtttttttggtttatatgtttgtttttatattaattttatgttgttttggttattatagttttgtagtatattttgaagttacgtagtatgatgtttttagttttgttttttttttttagtattatttggttatttgagattttttgtgtttttatataaattttaggattgttttttttatttttgtgaaaaaaaatgttattggtatttataaggattgtattgattttgtagattgttttgggtagtatggttattttaataatattaatttttttaatttatgagtatgggatgtttttttatttgtttgtgttatttttagttttttttattagtgttttgtagtttttattgtagagattttttatttttttagttaaatgtatttttaggtatttttgttaaatattataagattgtttttttgattttttttttagttagtttattattgatgtgtagaatatgttggtattttggtatgttggtatggtatgttgattttggtattttgattttgtattttgtaattttattaaatttattagttttaagaggtttttttggtggagtttttaggtttttttgtatagaagattatatggtttgtaaagaggggtaatttgattttttttttttttatttggatgttttttatttttttattttttgggattgttttggttaggatttttaggatataggttgaaagttttttttaatttagtatgatgttaattgtgggtttgttatatatggattttattatgttgaggtatgttttttatatgtttaatttgttgagggtttttagtataaagggatgttgaattttattaaatgtttttttatatttattaggataattatatgatttgttttttattatgttgatgtgatgtgtaaatgtttaatatttgttgatttgtttatgttgaattatttttgtatttttgggataaattttatttgattatgtgttattttttcgaagtattattggatttggtttgttagtattttgttgaaggtatttgtatttatgtttattagggatattggtttgtagtttttttttttgttgtgtttttggtttagttttggtattagggtaatgttgattttatagaagtggttaggagtaatttttttttttttaatttttttggaatagtttgagaagaattggtgttaatttttttttataagtttggtagagtttagtagtaaagttatttagttttgggttattttttgttgaggagttttttattattgatttaatttatttatttattattggtttgtttaggttttttgtttttttttggattaattttagtaggttgtatgtgtttaggaatttatttattttttttaggttttttaatttgtttatatgtagttgtttattatagtttttaatgattttttttatttttgtggtattaatggtaatgtttttttttttatttttgattttattttatttgggttttttttttttttagtttatttagtttaagtagcggtttatttattttgtttatttttttaagaaattaattttttattttgttaatttttagtttttattatgtttagttttgttttgatttttattatttttttttttttattaattttaggtttggtttatttttgtttttttgtttgtttttgagatggatttttgtttttgttgtttaagttggagtgtaatgacgtgattttagtttattgtaatttttgttttttgggtttaagtgatttttttgttttagttttttgagtagttgggattataggtatgtattattacgttcggttaattttgtatttttagtagagacggggttttattatgttggttaggttggttttaaatttttgattttaggtgatttattcgttttagttttttaaagtattggaattttaggtgtgagttattatgtttggttttttttgtttttttaattttttaagatgaatcgttaggttgtttatttgaaattgttttattttttttgatgtaagtatgtattgttttaaattttgttgtattttttaggttttggtatgttgtgtttttatttttatttgtttttagaaattttttgatttttttttaaatttttttattagtttagtggttgtttaggagcgtgttgtttaatttttacgtatttgtataatttttaaagttttttttgttttattgtggtttgtatttattgtggtaagtatttattaagatatttgatagtattttaatttttaaaaatttgttgagttttgttttgtgatttattatagggtttattttggagaatattttttgtgttgataagaatgtgtattttgtagttgaataaataatttgtaaatatttattaggtttatttggattataatgtagattaagtttagtattttttgttgaataaataatttgtaaatatttattaggtttatttggattataatgtagattaagtttagtatttttttgttgattttttgtttacgtgatttgtttaatattaaaagtgagatgaagtttttagttattattgtattggtagtttttcggtttttgtttagttttaatatttgttttatatattttagtgttttatcgttgggtggttatatatatgtgtataaatatatatatatatatatatgtttatatatatatatatatatatttatattttttggttgaattgattttttgattattaattataaaatgattttttttgtttttttttatgtttttgatttaaagtttattttgtttgatataagtatagttatttttgtatatttttggtttttatttgtgtggaatattttttttatttttttatatttagtttatatgtatttttatagatgtagtgagtttattggaggtagtatatagttggattttattttttatttatttagtttgtttgtattttttaattagagaatttaaatcgttgttaaatttagggttgttattgataggtaataatttatttttgttattttgttatttgttttgattgttttgtatattttttgtttttttttttttttttattgtttatttttttaattgttgggggttttgtaatgataatatttgatttttttttttttgttatttgtgtatttgttttattagtgagttttatatttttgtgtgtttttatgatggtagatattatttttttgtttttagatgtaatatttttttaagtattttttgtagaattagtttagtggtgatgaattttttttgtttttgtttgtttgggaaagattttgttttttttttatttttgaaggatagttttgttgggtatcgtatttttgtttgaaagggtttttttttagtattttgagtatattattttatttttttttgatttgtaagttttttgtttagaaatttgttattagtttgaggagaatttttttatatgtgattttatatttttgttttgttatttttagaattatatgtttgtttttgatttttgatagtttgattataatatgtttgtagaagatattttggggttgaatttatttgagaatttttgagttttttgtatttgggtgtttaaattttttgtaagatatgggacgtttttagttattattttattaaatagattttttatgtttttgtttatttttttttttagatttttttaaatttaaatatttggttattttatgattattaatatggtatataggttttttttatttatttttatttatttttttttttttttgtttggttggattattttaaaagaattgtttttaagtttagaaatttttttttttttttgatttagtttattgttaaagtagtgagttgtatttttattttatttattgatttttttagttttaggaattttttttggttttttttagtaatatttatttttttgttgagttttttatttagagtataaattatttttttgatttatttgtattgtttatttgtgtttttttgtattttattgaatttttttaatattatggttttgaattttttttaattattgtatagatattattttttttgggatttgtattaaagaattattgtgtttttttggaagtgttatgttttttttgtttttttatgtttttgtgtttttatattgatattagtatagttaatgtaatagttatttttttaattttatttattgatttttatagggaaagatatttttttttgttgggtatgatggtttatgtttataattttagtgatttaggaggttgaggtgggaagattgtttttggtaggagtttgaggttatagtgagatatgattgtgttattatgttttagtttaggtgatagagtaagattttgtttttaaaaaattaaataaaaataaaataaaaaagatgtttttttgtagatgtgtttatagtgttggttgagtggagcgttttggttttgattttgtgtgggtatagttagtggagtttttatatgattttattagtattagtgttgtttgtgagttttttagtggttgatagtgtagttgttaatggagtttgtggaaaggttgtgttgggaatagggatattaggtaggttggtttttaagtattagtggtgatagtagtatgttaggtatgttggtttttaggtttttaggtagtgtatgtgggtgttaatgttggtgtgtttaggtgggtagggtattagattttaagatgatatgttcgggtgttagtggtagtagtagtggattgaataggtaggtttttgggtttttaggtggtttgtttggaagcggtagtagtaggttaatttttaggtttttaagtggtgtatataggtattagtgatggtaagttgggtaggttggtttttaggtttttgggagatatatgtggttattagtggtaggtagagtgggtttatttttaggtttttggatggtgtgtgtttgtgttgttggtggtaaagaggacgggttaattttttggtttttgggtagtatatgtggatgttggtggtaggtggggcgagtttgtttttaggttttttaatggtgtgtgtaggtgttggtcgtaggtgggatagttttatttttatttttttagatgcgtataggtattagtaataatggtaggtgaggcgattttatttttaggttttgggatagtaagtataggtgttggtggtaggtggggtagtttaattcgtttttattgttagcggttatttgagttatttttaggttggggttagtatgaaaagtgttattatgagtattttaattaggtttttgtggggtaaatggatgtttgttatttaatgttaagattatttttggtttttatttgagttgagaaatattattgtttgttagagatttttgtaattttagaatttagtgttttatatttgtttttttgttattggtagg

SEQ ID NO: 1358 - DNA, 13449 bp, Artificial Sequence
  chemically treated genomic DNA (Homo sapiens)
tttgttagtgataaagaagtagatatgagatattagattttggggttatagggatttttagtaggtagtggtattttttaatttaagtaaaagttaaaaatggttttaatattgagtggtaggtatttatttgttttataaagatttgattgggatgtttatagtaatattttttatattagttttaatttggaggtgatttaaatggtcgttggtaatagaaacggattgaattgttttatttgttattagtatttgtgtttattgttttagggtttgaggataggatcgttttatttgttattgttgttggtgtttgtgcgtatttgggggaatgggggtaaaattgttttatttgcggttagtatttgtatatattattagggaatttgaagataggttcgttttatttgttattagtatttatatgtgttgtttaggggttaggagattaattcgttttttttattattagtagtataggtatatattatttagaggtttaaggatgggtttattttgtttgttattagtgattatatgtgttttttaagggtttggggattagtttatttagtttgttattattgatgtttgtgtatattatttgagggtttgagggttggtttgttgttgtcgtttttaaataagttatttgggggtttaaggatttgtttgtttagtttattgttgttattattggtattcgaatatgttattttgaagtttgatattttgtttatttggatatattagtattgatatttatatatattgtttgggggtttgaggattagtatgtttggtatattgttgttattattggtgtttgaagattaatttgtttgatgtttttgtttttagtatagtttttttatagattttattaataattatattgttagttattgaggagtttatagataatattgatgttaatgaaattatgtggaggttttattaattgtgtttatatagaattaaagttaaagcgttttatttaattaatattatagatatatttataggaaaatattttttttattttatttttatttaattttttagagatagggttttgttttgttatttaggttggagtatagtggtataattatattttattgtaattttaaatttttgttagaagtaatttttttattttagttttttgagttattgggattataggtatgagttattatgtttagtagaggaaaatgtttttttttatgaaagttaataaataaaattggagaagtgattgttatattagttgtgttgatattaatgtaaggatatagaaatatgaaaaagtaagggaaatatggtatttttaaaggagtataataattttttagtatagattttaaagaaaatgatatttgtgtaatggttaagaaaaatttaaaattatgatattaaagaaatttagtaagatataagaaaatatagataaataatataaataaattaggaaaataatttatgttttgaatgagaaatttaataaagagatagatattgttaaaaagaattaaagagaatttttgaaattgaagaaattaatgaataaaataaaaatataatttattgttttaataatagattaggttaaggagaagaaagaatttttaaatttgaagatagtttttttgaaataatttagttagataaaaggagagaaaaataaataaaaatgagtgaagaaagtttatgtgttatattggtaattataaagtaattaaatatttaaatttggaaagatttaggagaagagatgggtaaaggtatagaaaatttatttaatgaagtaatagttgaaaacgttttatgttttataagagatttagatatttagatataggaagtttaaagatttttaaatagatttaattttaaaatgttttttgtaggtatattatagttaaattgttaaaagttaaagataaatatataattttgaaaatagtaagataaaagtataaagttatatataagggaattttttttagattaatagtagatttttgagtagaaaatttataggttagaagagaataggatgatatgtttaaagtgttaaaaaaaaatttttttagataagaatacgatatttagtaaagttattttttaaaaatgaaggagaaataaagttttttttagataagtaaaaatagagggaatttattattattagattagttttatagaaaatgtttaagagagtgttatatttggaagtaaagggatgatgtttattattatgaaaatatataaaagtataaaatttattggtagagtagatatataaatgataaagagaaaggagttaaatgttattattataaaatttttaataattggaaaggtaggtaataaagagaaagaaaagaataaagaatgtataaaataattaaaataaataataaaatgataggagtaagttgttatttattaataataattttgaatttaataacggtttaaattttttagttaaaagatatagataagttgaatggataaaaaataaggtttaattatatgttgtttttaataaatttattgtatttgtgaagatatatatagattgaatgtgaaggaatggaaaaaatattttatataaatggaaattaaaagtgtgtaggagtagttatatttatattagatagagtagattttaagttaaaaatataaaaagagataaagaaggttattttataattaatgattaagagattaatttagttagaggatataagtatgtgtatatatgtatatagatatatatatgtatatgtatatttatatatatatgtatgattatttaacggtagagtattgagatatgtaaagtaaatattagagttaaatagagatcgagagattgttaatatagtaatagttgggaattttattttatttttggtattgggtagattacgtagatagaaaattagtaaagaaatattggatttagtttgtattatagtttaaatggatttaatgaatatttgtagattatttatttagtaaagaatattggatttagtttgtattatagtttaaatggatttaatgaatatttgtagattatttatttagttatagaatatatatttttattagtatagggaatgttttttaggatagattttatggtaggttataaaataaggtttaataaatttttaaaaattgaaatattgttaggtattttaatggatatttattataatggatatagattataatggaataagaggaattttggaaattgtataaatacgtgaaaattaaataatacgtttttggataattattgggttgatgaagaaatttaaaaggaaattaaaaaatttttggaaataaatgaaaatggaaatataatatattaaaatttaagggatatagtaaagtttgaagtaatatatgtttatattaaaaaaagtagaataattttaaataaataatttaacggtttattttaaggaattagaaaagtaagaaaagttaggtatagtggtttatatttgaaattttagtattttgggaggttgaggcgggtggattatttgaggttaggagtttgagattagtttgattaatatggtgaaatttcgtttttattaaaaatataaaattagtcgggcgtggtggtgtatgtttgtgattttaattatttaggaggttgaggtaggagaattatttgaatttagggggtagaggttgtagtgagttgagattacgttattgtattttagtttgggtaataaaagtaaaaatttattttaaaaataaataaaaaagtaagaataaattaaatttaaaattagtagaaggaaagaaataataaaaattagaatagaattaaatataatagaggttaaaaattaataaaataaaaagttggttttttaaaaagataaataaaatggatgaatcgttatttagattaaatagattaaaaaaagagaagatttaagtaaaataaaattagggataaaaaaggagatattattattgatattatagaaataaaaggggttattagagattatgatgaataattatatgtgaataaattggaaagtttagaggagatggataaatttttgaatatatataatttattaagattgatttaggaagaaatagaaaatttgaatagattaatagtgagtgagtagattgaattagtaataaaaaattttttaataaagaatagtttaggattagatggttttattgttgaattttattaaatttataaagaagaattaatattaattttttttaaattattttaaaaaaattgaagaggagggaattatttttaattatttttatgaagttagtattattttgatattaaaattagattaaagatataataaaaaagaaaattataggttaatatttttgatgaatatagatataaatatttttaataaaatgttagtaaattaaatttaataatatttcgaaaagataatatatgattaagtgggatttattttagggatgtaaggatggtttaatatgagtaagttaataaatgttgaatatttgtatattatattaatataatgaaggataaattatatgattattttggtagatgtagaagaatatttggtaaaatttaatatttttttatgttaaaaatttttaataaattaggtatgtaaggaatatattttaatataataaagtttatatatgataaatttatagttaatattatattgaattgggaaaggtttttagtttgtattttggaagttttagttaaagtaattttaaaagataaagaaataaaaggtatttaaataggaaaagaaaaagttaaattgtttttttttgtagattatatgattttttatatagaaaaatttaaagattttattaagaaaattttttagaattgataaatttggtaaagttgtaggatataaaattaaaatattaaaattaatatattatattaatatattaaaatattaatatattttatatattagtaatgaattagttgaaaaagaaattaagaaagtaattttatagtatttaataaaaatatttaggaatgtatttaattaaggaagtgaaagatttttatagtgaaaattataaaatattgataaaagaaattgaaggtgatataagtaaatggaaagatattttatgtttatggattggaagaattaatattgttaaaataattatattatttaaagtaatttatagaattaatgtaatttttataaatattagtgatatttttttttatagaaatagaaaaaataattttaaaatttgtatggaaatataaaagattttaaatagttaaatagtattgaggaaaaagaataaagttagaggtattatgttacgtgattttaaaatatattataaagttatagtaattaaagtagtatgggattggtataaaaatagatatatagattaaaggaatagaatcgagaatttagaaataaatttataaatttatagttaattgattgagaaagtattatgaatatatattagggaaaggatattttttttaataaatggtgttgggaaaattggatatttatatgtagaagaatgaaattaggttttcgtttgttattttataaaaaattaattaaaaatgggttaaagagttaaatataaggtttgaaatgataaaattaatagaataaagtagaagagtaatgttttatgatattggtttatgtaagtattttgtggttaagattttaaaagtataggtaataaaaataaaaaatagataattgggattatattaaatgaaaaagtttttgtatattaaagggaataattaagagtgaaaagataagttgtagaatgggagaaaatatttggaaattatttttttaataagggtttaatatttagaatatataaggaacgtgaataatttaatagtaaagaaaataatttattttattaaaaagtagttaaagggtttaaatagatattttttaaaagaagatatataaaatggttaatgggtatatgaaaaaatgtttgatattattaattattagggaaatgtaaattaaaattataatgagatattattttattttagttagaatagttattattaaaaagataaaaaataaacgttagtaaggatttggagtaaagggaattttatatattgttggtgggaatgtaaattagtatagttattacggaaaatagtatggaggtttttaaaaaaaataaaaatggtattgttatttaatttagtaattttattattaggtatttatttaaaaaagggataattgtatttttatgtttattgtagtattatttataaaagttaagatatggaattaattaacgtatttattagtagttgaatggataaagataatgtagtatatatatataatagaatattatttagatataaaaagaatggaattttgttatttgtagtaatgtgtatggaattagaggttattatgttaaatgaaataagttaggtatagaaagataatattgtatgtgtttatgtggaagttaaaaaaagttgattttatggaggtagagagtaggattatagttattagaggttgggaagtagaggaggaaatgaagagaagttggttaatggatataaatatatagttagatagaagggataaattttagtgtttgatagtataatggggtgattatagttaataataatttattatatattttaaaatagttagaagagaagatttgaattgtttttaatataaataaatgattaatgtttgaggtgatggatattttaattattttgattattttatattgtatttatgtgtttaaatattatatgtattttatataaatatgtataattatgtaaaaataaaaaaatatagtagaatggataaatgtggaatatttatataatggaattgatataataatgaaaagataaataattgtattttataatataaattttataaatattataggttagagaaattacgtattaaagtatatagagtttatgatgttatttatgtagggtttatttatgtattttggtttatatttttagtttttatattaagagttttatattttaggaaatattttaattttggatgaattgggatagttggttattttataattgtaaaacgtttaaaaataggtaaaacgtgtttatgttgttagaagttaggagattgtttatttgggtttggaggtgttgattggatcgggggtttagggttttggggggttgagaatgttttgtttttggatttgggtgggggttatatagttatattgtttgtggttatttattaagttggatattttgatttgggtattttttttgttttatttttatgaggaaaaaaaaattgagaggtaggatagtgtagtggttaaatatgtatgtttttaagttaattatttaggtttaaaattttagttttgataatagttattaattaaatttgttttagtttgttggtttgggttagggttggggatattacgtgtttagatttttttattgaggtattagcggatgtgtgtaaggggtagagattaaaaagtgtggtagtagtagagaagggacgttagtagtttaggaggttaagaggatagtattgggttattaggatttttacgtttttaattttagggttttggtatttttttagtttttttttttttttagaggtttagaatttttagttttagttttgagatttgtgtttataaaattaaatatttttaattgataaaagttatttttttttgttgcggagaaattataaggtaatttgggtagtttgaataaagttttttagtttttttaagtttatttttttgtattgtggagaggatagaagaaaatcgtagtgagtaattatagtgaatttattgagtattgttagttttttgttaagaatatgatgtgtttaagttttacgatattttgaagtgggtattatgtttttttttattttatagagttagagattgaggtatagagaggttaagtagtttgtttagtgttatatagttttggagtaagcgtttgttttagagtttgagatttttatattatattttatttaagtgtgggtttcgtatataataggtatttagtatttagtagttcggttttgttgtcgtcgtggaattttttgttttttagagatttaattttagttttggatttattatggttattttttgtattagggggaattgttcgggtttttgtaggacgttatagatggtgtttattatttcgtcgattagtgtttgatatttttcgtagggttttaggtatttttggataaattaatttagtttttgagtaggtatcgaggatagttgggattttttattttttattgtttttagttggttgtcggtaagatagtgaatggtaggatgggaggtagaggaatttttgttgttgtttagagttaggaaattgaaattgaagtttagaggtttttttttatttattgtagcgagtttattaatttttgtattcgggatagggaaataaaattaatttaagtttagaggttttgttttgttttttgtagtgagtttattaatttttgtattcggggtagggaaattaaaattaatttaagtttaaatgttttttttcgttttttgtagtaaggtttattgatttttgtattttagtagggaaattaaaattgatttaagtttagaggttttttttgttttcggtagcgtggtgattagttttttaggggttttttaaaatttgaggttaattaaatagtttttagaattttattgtgagggttttatatttgttagatgtttgtttttgagtatatcgtttgtttttttcgcgttttaatttttttatttgtaagttgggggaaaatggtagttttttcgtaggattagtttgatgattaaataatatttgtaaagtgtttagaagtaggggcgtataggttattttttgaggttttgtttttttttttttgtttttagtggttagggaatttatatttagggaaagcggtagagaggaaaaagagatttagagagggaattgatttgtttagggatatatagtaaagtagggatttagttggatttaggttttggtttgtttttgggtaaatataggttttcgtgtggttagcgggtgggaatttttgtgtgtttagttttttagtatatttgtggatagtcgagggatcgtatgaggtatttgtttagtttcgtaagggtaagaaaatatattttaagtgtgtgagttagaaaggagatagatatgtaatttttgtgtttagagttttgaaaataaaattcgtagaggatttttagttagttgttttggtttagtaataataatttatagagaaggtaaaaatttttaagatgtagtgggggattagggtttttttatattgggatggttaattttatgtgttaagttggttgagtttaggtatttagatatttggttaaatattattttagatttttttgtgaaggtattttttaaagataagattaatatttatattggtagattttttttttgagtaaagtggattattatttgtaaggtggtgggtttgatttaattagttgaaggttttaatagattaaagattgagtttttttaaggaagagggaattcggttgtagtgttttggtttttatttgtagtagtaatttttttttgggttttttatttgttagtttattttgtcgattttggatttgttagtttttataattatatgagttaattttttaaaataaatattttaaaataaatataaatattttgttagttttggaaaaatttcgattaatgtatatgtttattaagggttttttttgtttttatttaatttttattgtaatatcgagaggtaggtaggttgggtaggcgtagttttaaggttttttttttagatgagaatatggaggtttataaaggtggaaatatttgttcgtgattatatagttaggaagttgttaggttaggtttttatattaatatattgtttgattttaaagtttgtgttttatttgttatttaaaaaaatattttattttgaagtaatttgaaatgttgagaaaatttataagatgtatataaagaatttttttagattttttagttattatattttttattatatttgttttttatttttttgttatttatatattttaggaggtttttgttttgttttgtttttgagatagagttttattttgttatttaggttggagtgtagtggcgtgattatagtttattgtagttttatttttttaagtttaagtaatttttttattttagttttttgagtagttgggattataggtatgtattattatgtttggttaaatttttaaaattttttggtagaaatgggggttatgatgttattatgttgtttaggttgggttcgaatttttggttttaagcgatttttttattttagttatttaaagtgttgggattatagatttgagttattacgtttagttttttatgagtatttttatttttgaattatttgaatgtatgttgtatgatttatgtttttttatttttaaatgttttaatttatattttttaagagtaagaatattgtgttatagaagtatagaataatggtttaatttagatttttattattgatataatgttattattttataatatatataataaatataattttgtataatttatataatatataatttatataatatatataataaatatacgtttattatataaatattgtataaatatatattttgagatagatagagttttattgttatttaggttggagtgtagtggtataatttcggtttattgtagttttaattttttaggtttaagcgatttttttgttttagttttttgagtagttgggattataggtatatattattatgtttgattaatttttgtatttttttgtataggtagggttttattatgttgtttaggttgatttcgaatttttgggtttaagtgatttgtttgtttcggttttttaaagtggtagaattataggtgtaagttattgtatttagttataaatatatttttatattgaaaaatttattaacgattttaatatttttttttatagtattcgtattttcgttaatatttaggtttatatatgatatttagttgacgtatgtgatagacgtgttttttgggaagtttattaggaaagtaatggtgatgtttttattgggggaagttttttcggcgtttatttttgaggtattttgatggcgtaagttgagtagttgtttgtttgtggtttatttagtttgtttttatgaatattaagatttaagggttatttttatgttttgtaggttagttttttttggttaattttgggttttattatttatggtgagtattgtgttttttaatgggtgttattttttggttttttttattttagggttttattattttttttgttattagtgagtttagtttttaaggggttttatttattattttgtgatggtattttttgtagaggaggttttttgagtttttttgtgatgttggttggtgttttttttttggtttatttttcgtggatttggtaaaggggaattttggtttttttatggaagatcgtcgtttttggttttttgggttttatgtagtttttttaagtattgttatttttttgattttttatcgtatttgttatcgttttttttggtaattttggtatttggattttatttagtatggttttttattttttttcgttttttaggagtttttttggtagtaagtttatatttttttttggagtttttgtttgggtgtgtagttttgaatttttaaaggattttcgaattaataaatttttttttatttgattttatattgtagttttttgatcgagtatttttaaggttgatttttgtataaatttattcgatttttgttggttatgttggtttggttttttagttattttgggatataggttttttttttttttatgaggttcgttatatttttggtttgtttatgttggaatttaagtttagttataatttttgtgggtaggagaggaggtgggtatagggataaacgttttgtggatgtttttatagggtttttaagtaagggaggagggttagtttttaatagggagggatggataggttatttttatagttttaggagttagaggaatttgaggatttaagatttttagtgggatcggggtggtggtttttgtttgtaattttagtattttgggaggttgaggtgggtagataatttgaggtgaggagtttaagattagtttggttaatatggtgaaattttatttttattaataatataaaaattagttaggcgtggtggtatgtgtttgtagttttagttattcgggaggttgaggtaggagaattatttgaatttaggaagtggagggtgtagtgagttaagattgtgttattgtattttagtttgggcgatagagtaagatattgttttaaaaaaaaaaaaaaaaaaaaaagatttttagtggtattaatttgtatgtttttattttatgtgttagggttttatttttttttattatgtagggttttgattatattgagtagatttgataattttgatagtatattattatttttttatttatttattaggatggttataattaatatgatggataatgagtgttggtaaggatatagagaaattggaatttttatttattgttaggggtgggtgtgtataaatggtgtagttattgtggaaaatagtttggtagtttttaaatggttaaatatagagttattacgtgatttagtaattttatttttaggtatatatgagggttaattttatgtgtttgttggacggggttaagggacgtttagatggttggtaaaatgttatttttggatgtgtttgtgagtatgtttttggaagagattagtattttaatttgtagattgagtagagaagatagtttttattagggtgagtgtgtattttttaatttattggaggtttgaatagaataaaaagaggaatagtaaattttttttttttgtatgagttgaggtatttgtcgtttgtattcgaatattgatgtttttggtttttgggtttttatatttggattgggatttattttagtaattttttggtttttagttttttgaattggtttgaaattataattattggattttttgagtttttagtttgtagacggtggattataaaattttttagattttataattatataagttaaatttttataataaatttttttatatatttttttttttattttaatggtttggtttttttggagaattttgatt

SEQ ID NO: 1359 - DNA, 8064 bp, Artificial Sequence
  chemically treated genomic DNA (Homo sapiens)
ggtagggtttgtggaatattagtggtttagggagttggagtggtaaaagaggttgggagggtgggtagggtaggttttagagggttttgggtgttaggttaaggtgtttggattttattttgtggatttagggttattagtgaagggtttgaaatagataagttaagtaggtagatggtaaagtttttgtttacgtgtcggatggtatgtttgaatattgattcggtataggtttaatgggattttgatttttgtttattgaaaaagataaggaagtgggaagtaaaataatgataaatattattttttttatgaaaatgaatttttttaggtcgggtgcggcggtttatatttgtaattttaatattttgggaggttgagacgggcggattatttgaggtcgggaatttgagattagtttggttaatatggcgaaaatttgtttttattaaaaatataaaaaattagttaggagtggtggtgtacgtttgtagttttagttatttaggaggttgaggtataagaataatttgaatttaggaggtagaggttgtagtgagttaagattgtgttattgtattattttagtttgggtgatagagtaagattgtgttttaaaaaaaaaaaaaaaaagtatttttttaaatttttagtttttagataagggtttttttttttttgtaattgtgtgtgtttattgatttgtttttagggtttttttgggttttaggaggttttggtttagtttttatttggttttttttttagtagttttttagtgagttatattagggttggggtaaggtagggtcgtgatgtaatattttataaaataaatattttgggatttttatttatatatgggcgttttttgtttttagtagatttttttggaggagttttatttttttgatgatgttattattgtttagaggaaggaaggtttttttgaaagttgttttttatgttttaggtacgttatttggattatgggtagagatggtatattttttattttggagggtggattggatttttcggaaatatttaaaattatttaaagggtaaggttaaaggattggtgagtgattgagttaaggaaaattatttttggttaaatatttagatgggattagagtatttgtgattagtttttattatttaggtgttttgagttagggtatttttgttagggtagaagttaattttttaaagtttttatggggttggaggttatgagttttattttatagtttatttttttatgtttttggaagaagtttggtgaagtagagtataattacggatacgtaagtagcgtttaaatttattttttagaaagtttttaatgttaaattttttaatattgagtaaatggatatataaatgtttgttggttattgttttttatgtgatttatttttttttgataagggtgaggttaggcgcggtggtttacgtttattattttagtattttgggaggttaaggtaggtagattatttgaggttaggagtttgagattagtttggttaatatggtgaaattttatttttattaaaaatagagaaattagttggatgtggtggtgggcgtttggatttttagttatttaggaggttgaggtaggagaattgtttgaaattgggaggtagaggttgtagtgagttagtattgcgttattgtattttagtttgggtaatagagtaagttttttgatttaaataataataataataatgataagggtgattgtttaagtttgtaattattatatatttttataagtttttttatgtaagttagtaaagaagaaaaaagatattttttttattagatatgtttttggttttggtttagaaaatttggttagtggatttatatagaattttgtgaaataagtagatttttagaatattagaaggaaagaagaatttgagtttttagttagtttaattattttatttttagaaaggtagtttggaatttagagagatagagtgatgtttaaatttttataatgagcggggtagagcggcgggggggtggtaagggggtttaaggaattttaagaaaatgggagttggttttagaatttaggtgagatgattaagtttttagaagtatgtttagtgtagtatttaatgtttttatttatttttttagtattatatatagaagttttatttttggttaggtatagtggtttacgtttgttattttagtattttgggaggtcgaggtgggtggattatttgaggttaggagtttgagattagtttagttaatatggcgaaattttatttttattaaaaatgtaaaaattagttgggtacggtggtatatgttcgtaattttagttatttaggaggtcgaggtatgagaatcgtttgagtttgggaggtagaggttgtagtgagacgagattacgttattgtattttagtttgggtaatagagtgagatttttagaaaaaaaaaataaaaaagaaattttatttttatatgagggtgatttttaagtgcgtggtattacgtattttttttataaagatttgttgtttgttttcgaagaaaagaaaatagtaatggagaggatgaagtttattgaaaatatattgaaagataataaagttatgtattttaagtaaggttaggtttagttattattatttgagtttttggaatttagttgagtggttgggttttataattttagttttgttgtttatagttttgttgtttagggtttttgcgggtttttttgtagtcgtagagtagagtttcggggaaggagtaggtttttttttttttttttattttttttgttgggttttttaggtaagggtttatttttttagtatgcgggtaggagtttgggttttggggtgggttggcgggagaggaaggtatgtgggcgatagtagtgtgagtggtttgtatgtgtaatagttagagtttttttggttttttgagttaagaattggtttttacgttttagttaatgtttttatttgattatttttaggttgttaggggaattttatttgttaagatatttaggttttttgtttggaggttgtatattgggtagtgttgggaacgattggttgataggtgtgtcgggaagttgggcgattttggtagtgtaggatattttcggagtgtgaggaaaattgcgttattggaataaagtgattttttatagagaggtataaagttcgtattattatagaattaaagatgttttatttagcgttggagttataacgttttttgatgggttttgatggttaattttattaagaattaagtttgttaagggtggagttaatttttttttttttttttttagttcggggaatacggtgttcggtgggcgtttaaggattatgtaaagataaagttgataggggcgtattatttttatatttttttatataggaagaagatttatttttgtttacggttagcgtttgttttgtttttgtggaagtcgtgtttgttttaggaagagttggattatttatttatttatttatgtatgtatttattaaataggtatttattgattgtgttttagatttggttttgggtattaaggaagttttttaaaattttatagggttttgtagttataaagatatgtaaggatttttgggttatttgaagtttagagaagggagataatttgtttaagagtatatagtaagttgggggtagcgttgggttagtgttttgagtttttttaatttcgtttttatttatttaaggttagatttagatttatttatttttttttttaattttttatcggttgtatttttattttaaggagtcgaaatttttattttagggagagatatattttgtttggattgtttaaaagggaatgaaaggtaaaaatgaaaaaaaaaaaaaaaagtgtttttaatttaagtgtagtgtttttttggtgcgggtattttagcgtggtttggagtgagtggtagtttatttttagaggcgttttttgggcgtttttagggattcgaattttttacgcggttttttgttttatgtatttattgtttagacgttttcggttaaagtattttgggattttcgtaatttttagagcgcgttagggagtcgtttttaaagatatttagttattgatgagttttattcggtaaagtagagggtagtgggcggtttggagatttaggattcgggtttttttacgtttttggttgagtttttggttttataggggaaattattttcgtaggttaggatttatttagttataggatatttcgatgttataaagacgaggtttttagcgcgggggcgtggaggcggttgttagttttgttcgtagcgtgttggcgattttcgggacgttttttttttttcgcgtttttgttttttagttggtgggagtagagcggtatcgggattatttttaggttttttgtatcggaggaatgggcggtagtagggttcggagtcggttcggcggggtttacgtggttagtatatcggtttttcgttcgcgatttttttttttcgttttcgggtacgaggtattgaacgttaggtggaagtatagttgtgtagttataggttttgtcgtttagttgtcgcgggtcggggtcggggtttgcggcgtcgtgcgcgtgcgcggattagttttaggcgggcgagatcgtcgtagggcggggcggggcgaggcggtcgtagggcggggagggcggggagaggcggtcgtagggcggggagggcggggcgcgaagtcgggggcgggggttacgcgtggggtaggcggtgttcggttcggttgacgtcggttcgtcggcgttttattagtttcgcgcgggttcgggttggttatcgtcgggttttcgtttttttttcggcggtgtttcggtcggaatcgatcgtggttggtttgagttggtgcgtttttatggcgattcgtcggtgttataagtagggagcggcgtgtcgtggggttttgttagttttttttgtagtcgtcgtcgtcgtcgttcgtcgtttttttgttagtagtttcggcgttatttcgggtcggcgttttcggcgggcgggagttaggcgttgacgggcgcggcgggggcggtcgagcgtttttgcggttgcgatttaggtttcggcgtttgcgtttttttatggggttggtttgcggcgtttgggcgttttgaggtgagggatttttcggtcgcggaggaagggagggagcgagggcgggagtcggggcgggttgcgggtttcgggtttcgggtacgtgtgcggcgcgtttcgtcggtttgcggagatacgtggtcgtcgagcgggttacgattttgaggcgtcgttttttttcggttcggggttttttcgcggttggataagggtgattcgggcgtttcgttttgttttcgtttttatagttcggggttggaggggtttaggggagatttattcggagattttgcggtttcgcgtcggttttttttttaatttttcggcggtcgcgcgttggtcggggagtcgttggggaggttttggcggtcgcgtagtaggtgtaggggcgtagagttcgggttcgttttggtatagacgagcgggtttcggttttggcgtttttagtttttttttagtttttattttcgttgtgtttatagagtagatgatattaatttggaaattcgcgagagtgggtagagttaagatagttttgttgtagtagttgtgatattagatgttcggttatgatttagaggtgtttatttaaggattgtgaatgattcggtgatttcggaaaagtttggtttagatgaacggatatatataggggagatagttttaaggtttgtagaaaaggttgattgtgttgtttgcgaagtcgaaataattggtgaaagtgtagaaggtagaattttttaggaatgtttggggaggataaagaatgtgttggttgattttgtttaaatataaaattgggtagattttaattgatttgtgaaattttttttaaagtttgtttgaattagtttttattttttttaatattatttttttgtgttaattgattgattattttaaataatttagttgttatagaaagatcgaaaggtgttttttagtaaaatatatttaagtaagttatttaagtaacgttttaaaagatatagaaaagtaaaaaagtattggcgtattaaaaagaaattaaaattttttaagtttaggtttgaatattgttttaaaaatatttaataaggttttaaatgatttagttcgagattgtatgagtttatttattattaaattgtaaatattttttatataaataaaaatatataattatgtttgtaataaaaatggttttgttagcgttgttatttttttttttttttcgaggggtgatttaggtaatttcggaggttgataatgttaagtagttataatagatagagttttaaagtaaattttatgtatgggtttggatttatgataggttcgttattttgggtttgttatagtattttatgttagagtaaattgtgttttcgaattattgtttggtttttgtgttcgtaggttgttggtattgaagtgggttgtatagtggaaaagaagaaagttttatttggtagaaatttttaaaggttaaaataaataattttaagaaagttggtttataaggtgttatatttgatgaaagtaaaatatagtggtttttattgttattagagtgatgtttttgtttgttttttttttttggtgaagttagttttaaattatttttatagttaagtaaatacgagagtgattgtaaggatagttggtattttcggaattgttaaatttggtaggtaacgttggtttaagaatattgagttttagtcgggcgtggtggtttacgtttgtaattttaatattttgggaggttgaggtaggcggattatttgaggtcgggagttggagattagtttgattaatatggagaaacgttatttttattaaaaatataaaattagttaggtttcgggtgtggtggtatatgtcggtaattttagttattcgggagattgaggtaggagaatcgtttgaatttaggaggcggaggttgaggtgagtcgagattatgttattgtattttagtttgggtaataagagtaaaattttgttttaaaaaaaaaaaaaaaaaatattgaattttgattaggtaatagtaattgtaatataatgtgataagttgatttgaagattatagtttttaagaagtatatatttagttaatatatgaaaattaattcgtaaaattttaaatgttttagatatttttatgatgtttgttggttagtaaaaattattttaagatttagtggaagtaggaaatgtttgtatggttgtgtataaaggttataatgtaattttagtattttggaagatcgaggcgggtggattatttggggttaggagtttgagatttatttggataacgtggtgaaattttgtttttattaaaaatataaaaattagtcgggtatggtggtaggcgtttgtaattttagttgttggggaggttgaggtaggagaatcgtttgaattcgggaggtagaggttgtagtgagttaagattgtatcgttgtattttagtttgggtgatagcgtgagattttgttttaaaaaaaataaaaaagtttataatgttattttaagtttttaaggaattgaaattgttttgaaataaattagattattataagatttttttttatattagtgagttaagtgtagataagtttttgaaatttgtatgttagatttttttggtataaatatttgaaatgtttagtgtgttgttttggaaaaatttggtattttttgttgtgtttttatattgttaaggtttatggaattatgtattttatgtttagtaataattaggatgattaggttagtgagtggtttatattcggggtatgattagttttgcgtgtgtttagttagtgttttatttttaattcgatgtgtttttaaggtagatagtaaattttttattttattttttaga

SEQ ID NO: 1360 - DNA, 8064 bp, Artificial Sequence
  chemically treated genomic DNA (Homo sapiens)
tttgagaaataaaatagggaatttgttgtttattttaggaatatatcgagttgaagatggggtattggttgagtatacgtagagttaattatgtttcggatatgaattatttattggtttggttattttaattattattaggtataaggtatatgattttataaattttggtagtataaggatataataaaaaatattaggtttttttaaggtagtatattaagtattttaaatatttgtattaaaaaaatttagtatgtaagttttagaagtttatttgtatttagtttattgatatggaaaaaagttttataatggtttgatttattttagagtagttttagttttttagaaatttaaaatagtattatagatttttttattttttttgagatagagttttacgttgttatttaggttggagtgtagcggtgtaattttggtttattgtaatttttgtttttcgggtttaagcgatttttttgttttagtttttttagtagttgggattataggcgtttgttattatgttcggttaatttttgtgtttttagtagagataggattttattacgttgtttaggtgggttttaaatttttgattttaggtgatttattcgtttcggttttttaaagtgttgggattatattatagtttttatatatagttatataaatattttttatttttattaagttttagaatgatttttattgattaataggtattatggaaatgtttggagtatttgagattttacgagttaatttttatgtattagttgggtatatattttttaaaaattgtaatttttaagttaatttattatattgtattatagttgttgttatttgattagaatttagtattttttttttttttttttgagatagagttttatttttgttgtttaggttggagtgtaatggtatgatttcggtttattttaattttcgttttttgggtttaagcgatttttttgttttagtttttcgagtagttgggattatcggtatgtgttattatattcggggtttggttaattttatatttttagtggagatggcgtttttttatgttagttaggttggtttttaattttcgattttaggtgattcgtttgttttagttttttaaagtgttgggattataggcgtgagttattacgttcggttagaatttagtatttttaaattagcgttgtttattaagtttagtaatttcgggaatgttaattgtttttatagttattttcgtatttgtttagttatgagaataatttggggttaattttattaaaaaagaaaaataagtaagaatattattttagtaataataaaagttattgtattttgtttttattaaatgtggtattttgtgaattagtttttttaaaattatttattttaatttttaaaaatttttgttaggtagagttttttttttttttattgtgtaatttattttagtgttagtagtttacgggtatagaggttaggtaatggttcggggatatagtttgttttggtatggggtattatgataggtttagggtgacgggtttgttataaatttaaatttatgtatagaatttgttttaaagttttatttattgtgattgtttggtattgttaattttcgaagttgtttaaattatttttcggagaagggaagagagtaataacgttagtaaaattatttttgttatagatatggttatatatttttgtttatatgaagaatatttataatttaataataaataggtttatgtagtttcggattgggttatttgaggttttattaaatatttttaaggtaatgtttaggtttaaatttggaaagttttgatttttttttaatacgttaatatttttttgtttttttgtattttttaaggcgttatttaagtaatttatttgaatatattttattgaagaatatttttcggtttttttgtaatagttaagttatttaaaatggttaattaattagtataagaggataatgttagaagagataggggttaatttaaataaattttgaaaaaaattttataaattaattaaagtttgtttaattttatgtttaaataaagttagttaatatattttttgttttttttagatatttttgagaggttttgttttttatatttttattaattatttcgatttcgtaaatagtataattagttttttttgtaaattttagggttgttttttttgtgtatgttcgtttatttaagttaagttttttcgaaattatcgagttatttatagtttttaaataaatatttttaagttatggtcgagtatttaatattatagttattatagtaagattattttagttttatttattttcgcgggtttttaaattggtgttatttgttttgtagatatagcgaaaataaaaattggaaggaaattgaaggcgttaaggtcggggttcgttcgtttgtattaaggcgagttcgggttttgcgtttttgtatttgttgcgcggtcgttagggtttttttaacggtttttcggttagcgcgcggtcgtcgaagggttgggaaagaggtcggcgcggggtcgtagggttttcgggtgggttttttttaggtttttttagtttcgagttgtgaagacgggggtagaacgaggcgttcggattatttttatttagtcgcgggagaatttcgggtcgggaggaagcggcgttttaaggtcgtggttcgttcggcgattacgtgttttcgtaggtcggcgaggcgcgtcgtatacgtgttcggggttcggggttcgtagttcgtttcggttttcgttttcgtttttttttttttttcgcggtcggggagttttttattttagagcgtttaggcgtcgtaggttagttttatggggaagcgtagacgtcggagtttgagtcgtagtcgtaggagcgttcggtcgttttcgtcgcgttcgttagcgtttggttttcgttcgtcggagacgtcggttcgaggtggcgtcggagttgttggtagaggggcggcgggcggcggcggcggcggttataggagggattgataaagttttacggtacgtcgttttttatttatagtatcggcgggtcgttatggagacgtattagtttaaattagttacgatcggtttcggtcgggatatcgtcgggggaggggcgggggttcggcggtggttaattcgggttcgcgcggagttggtggggcgtcggcgggtcgacgttagtcgagtcgagtatcgtttgttttacgcgtggttttcgttttcggtttcgcgtttcgtttttttcgttttgcggtcgttttttttcgtttttttcgttttgcggtcgtttcgtttcgtttcgttttgcggcggtttcgttcgtttggaattggttcgcgtacgcgtacgacgtcgtaggtttcggtttcggttcgcggtagttgaacggtagagtttgtagttgtatagttgtgtttttatttggcgtttagtatttcgtgttcgagagcggaaaagggaaatcgcgagcggaggatcgatgtgttggttacgtgggtttcgtcgggtcgatttcggattttgttgtcgtttattttttcggtgtaagggatttggaagtgatttcggtgtcgttttgtttttattagttagggagtagaggcgcgggagggaaggggcgtttcgggggtcgttagtacgttgcgggtagggttggtagtcgtttttacgttttcgcgttggaagtttcgtttttgtaatatcgaggtattttgtaattagatgggttttggtttgcggaggtagttttttttgtgaagttagggatttagttaggagcgtgaggggattcggattttgagtttttaagtcgtttattattttttgttttatcggatggaatttattagtaattaggtatttttaagggcggttttttggcgcgttttgagagttacggaagttttaaaatgttttgatcgaaaacgtttaaatagtgaatatataaagtaaaaagtcgcgtgggaaattcgagtttttaggagcgtttaggggacgtttttggaggtggattgttatttattttaggttacgttggaatgttcgtattagggaggtattgtatttgaattggggatattttttttttttttttttatttttattttttatttttttttggataatttagataggatatgtttttttttagggtggggatttcgattttttagggtgggagtatagtcgatgaagagttaaggagaggagtgggtagatttagatttagttttgggtgggtgggggcggggttggaggagtttagagtattggtttagcgttgtttttaatttgttgtgtgtttttggataagttattttttttttttgggttttagataatttaaggatttttatatatttttatagttataaagttttgtgaggttttgaaaaatttttttggtatttaaaattaggtttgaggtatagttagtgaatatttgtttaatgaatgtatgtataaatgaatgaatggatgatttagttttttttggagtaggtacgatttttatagaaatagagtaaacgttagtcgtaagtagaagtgagttttttttttatgtgaagggatgtgggggtggtacgtttttattaattttatttttatatagtttttgagcgtttatcgggtatcgtgtttttcggattagagggagggagaggggggttagttttatttttaataagtttaatttttgatgagattaattattaaaatttattagagaacgttatagttttagcgttgaatgagatatttttgattttgtggtgatgcggattttgtgtttttttgtgaggaattattttgttttaatgacgtaattttttttatatttcggaagtgttttgtattgttagaatcgtttagtttttcggtatatttattaattagtcgtttttagtattgtttagtatgtagtttttaggtagagggtttggatgttttggtaggtagggtttttttagtagtttgggggtggttagatagaaatattaattggaacgtagaggttagtttttggtttagggagttaggagggttttgattgttgtatatataagttatttatattgttatcgtttatatatttttttttttcgttagtttattttaaagtttaaatttttgttcgtatgttgggaaggtgagtttttgtttggagagtttagtaggggaaatagaaggagggaaggaggtttgtttttttttcggagttttgttttgcggttgtaggaagattcgtagaggttttgggtagtagaattgtggatagtaaggttggagttgtgaaatttaattatttagttggattttagaagtttaggtggtggtgattaaatttggttttatttaaaatgtatgattttattgttttttaatgtatttttagtaaattttattttttttattattattttttttttttcggaaataagtaatagatttttgtaaaaaaaatacgtgatgttacgtatttaggaattatttttatgtggagatgagattttttttttattttttttttttgagagttttattttgttgtttaggttggagtgtagtgacgtgatttcgttttattgtaatttttgttttttaggtttaagcgatttttatgtttcggttttttgagtagttgggattacgggtatgtattatcgtgtttagttaatttttgtatttttagtagagatggggtttcgttatgttggttaggttgattttaaatttttgattttaagtgatttatttatttcggttttttaaagtgttgggatgataggcgtgagttattgtgtttggttagagatgagatttttatgtgtggtgttaaaagagtgaataaaaatattagatattatattggatatgtttttaagagtttagttattttatttaagttttgggattaatttttatttttttaggattttttgggtttttttattattttttcgtcgttttgtttcgtttattatgaaagtttggatattattttgtttttttgggttttagattatttttttgaaaatggggtggttggattggttgaaagtttaggtttttttttttttttaatgttttaagaatttatttattttatagagttttgtataaatttattgattaagttttttaaattaaaattaaaaatatgtttgatgaaggaagtatttttttttttttttgttaatttatatgaaaaggtttataaaggtatatagtgattgtagatttaagtagttatttttattattattattattattatttgagttaagaggtttgttttgttgtttaggttggagtgtagtggcgtaatattggtttattgtaatttttgttttttagttttaagtaatttttttgttttagttttttgagtagttgggaatttaggcgtttattattatatttagttgatttttttatttttagtagagatggggttttattatgttggttaggttggttttaaatttttgattttaagtgatttgtttgttttggttttttaaagtgttgggatgataggcgtgagttatcgcgtttggttttatttttattaaaaagaagtaggttatatagaagataataattagtaagtatttgtgtatttatttatttagtattggaaagtttgatattgagagttttttggaaaatgggtttgggcgttgtttacgtgttcgtggttgtattttattttattaaattttttttagaagtatagaagagtggattgtggagtgaggtttatgatttttagttttatgaggattttgggaggttagtttttgttttggtaagggtgttttaatttaggatatttgggtaatggggattagttatagatgttttagttttatttggatgtttggttaaaaatagttttttttagtttagttatttattagttttttaattttgttttttgaatggttttaggtgttttcgaaaaatttaatttattttttaaggtggaaagtgtgttatttttgtttataatttaaatggcgtgtttgaggtatagaaagtagtttttagggaggtttttttttttttgagtaatggtggtattattagaaaagtggagtttttttaaaaggatttgttggaagtagaggacgtttatgtgtaagtggaagttttaggatgtttgttttataaagtgttatattacggttttattttgttttagttttggtgtggtttattgggaagttgttgggaaaggagttaaataggaattaggttagggttttttggagtttagaagggttttgggggtaggttagtgggtatatatagttgtagagaagagggggtttttgtttggaggttgagagtttggaagagtattttttttttttttttttgagatatagttttattttgttatttaggttggagtggtgtagtggtataattttggtttattgtagtttttgttttttgggtttaagttatttttatgttttagttttttgagtagttgggattataggcgtgtattattatttttggttaattttttgtatttttagtagagataggttttcgttatgttggttaggttggttttaaattttcgattttaaatgattcgttcgttttagttttttaaagtgttgggattataggtgtgagtcgtcgtattcggtttggaggagtttatttttatggggaaagtgatgtttattattattttgttttttatttttttgttttttttagtgggtagaagttagagttttattaagtttgtatcgagttagtatttagatatgttattcgatacgtggatagaagttttgttatttgtttatttggtttgtttgttttaagttttttattggtggttttgggtttatagagtaaagtttaaatattttagtttggtatttaggattttttgaggtttgttttgtttatttttttagttttttttgttattttagttttttgagttattgatgttttatagattttgtt

SEQ ID NO: 1361 - DNA, 6925 bp, Artificial Sequence
  chemically treated genomic DNA (Homo sapiens)
tttttattttttaattaggggttttttagttgtttttttggttatttgtataagagttaattttttaaattttaagtttttaaaatgatttttttaacgttagttggagtaatggttttatatgtttagggtatgattttggatatttattttttttaaattaggttttttattaattttttttttttttttttttgttttaggtttgggttttaatatgtttttaattttcgtatatgaggtgggtaggagaattttagttttgttttttaaaaagaattcgaagatagttggatcgtttaagaggtcgggtcggttttttaaaaatcgggagagttagatgatttttagttacggaggtagttttgtggggtttttttagttttttattatgagttttttgcgttagcgtaagcggggtaggagttttcggtttagttcgagtttagatagcgatagtgataagtttatagaagattttttaatgggtgagttttattattatttagttttttaagagagtgagtaaagttgttattttttttagtatatttttagttatttttttatttgtttataaaagagcgagttagaagggtttttaggaattttttaattttatttatttattttatagttgggaaaattgaggtttagagatattacgatttagttaaagttttatttagggttttttgtttttattgtattattttattttttttttttttattttttttggggattttttgttttttaagttatttgtgttttaaagttagtaattgtcgagggaagtaaggggtggagtagggttgtggttaattgtggtagatattgtttagagttagttttgttggttaaggttggaggaattttttagtatagaaggggaatttaagttttaagttttttttatttttatgttatttttgatttatatttttttgatcggtttttttttttttttttttttttttaattaagatttattagttaatggttttagcggtggaaattaattagtgaagaagagttttttggtatatcgtaatgattgtagtttttttcggagtagtttagattttgagtttagtagtagtagtagtagtagcgttgttttagatcggattaggtattagttttttagatcgaggttaattttaggggatgtttttttagggtttttgggtttgtgtaggtttttttgttggaagtggggtggtagttattttagtttagattaagatggtttaaatttaaggttttttgttaaataaataaattagtgttattattaatagaatagagagaattattttggattaaggtgatgattagagtatgtatttttgtcgttattgtttaggttaatttatttttgttaggttattagtttagtttttgtgggtgtttgaatttgaaattttttatatagtttttgttttttaaaagttttagattttgcgggttttaagagttgagggtatatattatgttgttttttatttttttttttttttgagttgagtttttattgttttgtttatagtataacgtttttaaaataaggtcggggtaaattttttttttttcggggtatttttttagaggatagtagtgaggatattttaggtattgagaatgaggtttatttcgtgggtattggtcgcggcgtgggttatagtagtaagtttttttgtttaaggttagggatgttggggatttagtgttagggtttcgttagttttttagttgttgatttatttttttttttttatttttgtgaagtggtaaggaagagtttgggtcggggagttggttggttgttagaggatgaggatttttcgttggatgttttggatttcgtgtgggttaaatgtcgaggttatttattatatttagttttggtatgtttgtttttgttatattttttgttttttaattttagaatatagatttatagttagtagattttttttattttttgttgagttgtggggtatagagttttttggtaaggtagattggtgggtagatatagtttgagtattatttagaggtttttatttagtttttttattttttttttttgtttttttttgttttttgggttttgaaataatttagtatggaaagaagttgagggttagtattgtagttttagtagtatgatattttttttgtttttattttagatatattttttaagtttttgaggaggaaaagttttgggaggatatggattgaattaaattgggtttttattatatttttagattattgatttaaagatgtttcgagaaggtatgttttattatggggtttttatttttgtgtttttattggaggtgttgaaatttggggagtagatgatttaggaagttcgagagtatttttatttcgtttttttttttgataataaacgaatttggtaaggaggggagtatttggtgtgatttatagttatagatgtagttttgtgtggtatgggggtagattgttaggaaattttagtaataggtagattgggttattataagttagtgggggagggatttagaatagttttttgagcgaaagggttgtgtcgattatgtgtttgagaggttgagtgggtattagtggatatagttatagttagaaattaaaggattattagagatttatgataaatatagaggtggtttttatttagatttagatggtttttagatttagtttttttatttttgtttttatagtgataaaatgaggataaagtaggtataaatatttaggttttgaatttttgttttgttatatttatatatgtagtttttttgttaattgtttgtagaggatatttaatgttagtaaagtttgtttagagtttatggtatagggtagttatttttggtgaggttagggtgttttttttttgtatttataaatattttgtgattattttttcgtcgttattatatagtataattgttgattgggtttttttatttttagattatgaatagttttttgagggtagggattattatagagtttggttagagtgggtgtttgggtggtgtgtttgagtgaatagaggaggaaggttggtttttgttttttttgagatgatttatttgatttttattttattttataggtagtggttgtttaggattaagttggtttttttgggtgtgaattaggatttagataaggagaagatgttggagggtcgtaagtttaatattcgtaagttagtatagatcgtttattatagggttttgtagtatcgtagtaaggtgtaaggcgagtagagtagtgagattagcgatagtgattgatattgtttaatatagtttaatttatagtgttttgtgatttttttttttttttttgtttattgttttggagtggtatcggtttttgtattgatttatttttggttttggggttagttttaggggaagttgggtgggggaggttttttttgttttaagtgtagttggattgtatagaatattttaagggttaatggtagtttagcgtaaggagagggagggtttataggttagaaaaagttttagagattttatagtattgtagggcggggtggtgggttaaagttaggatattgcgtaaaataggttattttattatttttatttgtttatgttaggagaatttataattgtttagaggtttggggtttttatcggtcgtgaggtgagtgggtatttgtttagtttggaagaggggtattaggtgatttttttttttgttgttgtaaatattgtaattatcggagaatttaaattatttttatttgtaattgcgttttcgggtcgcgttagagttatttggtattaaaaaaaaaaaaaaaaaagattgggggttgtttttatttttttttttttttttatagatttttttattttttaaattggtttgtatttattttaaaggaagaaaatatattgatttttagaaaataaattgttaatttagaattttttgtttttgttttttgttagggtaaaggggatataaagggaggttttgtgttttagggatgatatataattgggtttaagtggttgttgattgttgtgtatgttatattttataagatatagtaaagagagtttttgttgtttatgtatggagtgagtggtaggttttgtgttgagtatttttagatatttagttttgcgtaatttttgtaataattatagggtagtttaataatagattggttatttttataaagatgttgaagttttaaaaaattattttgtttaagtttttataattaggaaggtgtagagttagaattggaatttaggtttgtttgtaaatttggttttttaattagtatgttgaattgttaggggaagagttaattatcgatttttatttggtttttagaggttttaagttttttgttagtggtatggtttaagtgttttagtattaatatagttgagattttttttattgtttaatcggagatagagttgggatggagacggttgttttttgtttatttttaattttagtattttttttttagattttatcgatatttattgaaggaatgttttttaagtgttaggcgtttgtgggatggtatgtttatagataggaatagttataggaagaaggggcggtttaggttttgtagttattgaggattggtattgagataatgatggtattggtttgatgttgattttatgttgacggtatatttcgttaggtttttggttgggatataagggttaattcgttgtagatgttgttttttaagaatttgtagtttgggcggggtgcggtggtttacgtttgtaattttaatattttaagaggtcgaggcggttggattacgaggttaagagatcgagattatgttagttaatatggtgaaattttatttttattaaaaatataaaaattagttgggcgtggtggcgcgtatttgtagttttagttattcgggaggttgaggtaggagaatcgtttgaattcgggaggcggagtttgtagtgagtcgagatcgcgttattatattttagtttaggcgatagagtgagatttcgttttaaagaaaaaaaatttgtagtttgatagttaagatatagtaattttaaatttttatgttaaaaggtgagaatggtttagataaaggttatgttttttagttttttgtttttttatgttattttttagaagggaagaaattaaataatttatttttttattttaggcgattagaaggtaggttgttttagggttatatattgggatttggatttaatttgatgggtttttgggtttagttttagataaattttcggtaaacgttttatttcgaggaaagtatgagtagatggagtatggaagaaatgtttaagacggtaggtagtagttgtggcggtcggcgggacgataattcgaggagaggtttttgatgttttgaggttttagaggacgtttaaaggttttgaatgggataagtttagcgggcgggcgtagaagagaataatattttggagatatttttcgagggttttggggtcggagttgtgttcgtttcggtttttggtgaagatagggttcgtgggaggcggtttaaggagggcgaacgtttaagattgtaaaggttcgggggagaacggttttcggagaacgggttggggaaggacgtggttttgaagacggatagttttgaggaatcgcggggcgtttagatggaattcgttagcgtttcgagtgtagataatttcggagggggaaaggcgagtagttggtagagagtttagtgtcggttaatcgcgcgagcgttttagaacggttcgtttattttgattttttattggcgttttttatttttttttcggattggttatttttaggtgaaatgagcggtggttgagttttattttcggtggtgttgtggtttgtttttggagaatttagaagaatatagttgtgcgcgtttataggttttgggggcgggagaagataagtcgtaaggagggggcgggatttatattttaggaaagtcggagaattggggtacgaagcggggttttgatgattcgtaaagggcgaggtatgtaggaggtggaggaattaagtgaaatagggaaggttgttaaatagtatcgtgtgggcgaggttttaagggtcgtggtttttgtttgggcggggtttttgggcgtcgacgaggtttggttttgggtaggcggggttattacggggcggtgtttgttgtggaaatgtttgttcgcgcgtttttgtttaggcgtatggggtatcgtattttagtttttatttttgttttgtgggtttttatttcgtgttttcgttttgagttgcgtttggatttggttttgttttttggataattttttcggtgagtgattgagtttgagaagtttgttttttcggattggtttttgtcgttttaatattgtttggtatggggtataaaggaatttgggggatgatggaagaaattcggggtataaaagaggaaataagtacgggtagttaatttgttatttttaatatgtttgtatagtgataattgtaaggatttagcggtataatcgatgtagaagataatagtatttgtttttttttttttgagatagggtttcgttttgttgtttaggtaggaatgtagagaggtttattttagtttcgatttttcgggcgtagtttttcgagtagttgggattataggtgtgcgttatgttcggttaaatttttgtattttttgtagaggtgaggtttcgttatgttgtttagattggaagatagtattgttatttgtattagtttcgtatatggagttattgtaggataggagggattttaaagggtgtaagaaaggaaattgagtgttagggttgttatgtgttttgggtttagg

SEQ ID NO: 1362 - DNA, 6925 bp, Artificial Sequence
  chemically treated genomic DNA (Homo sapiens)
tttgagtttaaggtatatgataattttggtatttaatttttttttttgtattttttggggttttttttattttataatagttttatgtacgaaattaatataagtaatagtgttattttttagtttgagtaatatggcgaaattttatttttataaaaaatataaaaatttaatcgggtatggcgtatatttgtagttttagttattcgggaggttgcgttcggggggtcgaggttggaatgggtttttttgtatttttatttgggtaatagagcgagattttgttttaaaaaaagaaaaataagtgttattattttttgtatcggttatatcgttggatttttataattattattgtatagatatattaaaggtaataggttggttattcgtgtttgtttttttttttgtatttcgggttttttttattattttttaaatttttttgtattttatgttaggtagtgttgaggcggtaggagttagttcgaggggataggttttttaggtttagttatttatcggaaagattgtttagaaggtagaattaggtttaggcgtagtttagagcgagggtacgggatggaggtttatagggtaggagtggaggttagagtacgatgttttatgcgtttgggtagaagcgcgcgggtaggtatttttatagtaggtatcgtttcgtagtagtttcgtttatttagaattaggtttcgtcgacgtttaaagatttcgtttagataaggattacgatttttaaggtttcgtttatacggtgttgtttaataattttttttgttttatttaatttttttattttttgtatgtttcgttttttgcgggttattaaagtttcgtttcgtgttttaatttttcggtttttttgaggtgtaggtttcgttttttttttgcgatttattttttttcgtttttagagtttgtgggcgcgtatagttgtgtttttttgggttttttaggggtagattatagtattatcggaagtagggtttaattatcgtttattttatttagaggtagttaattcgaggaggaggtaggaggcgttaatgagaaattagggtgggcgggtcgttttgaggcgttcgcgcggttggtcggtattgggttttttgttagttgttcgttttttttttttcgggattgtttgtattcggggcgttaacgagttttatttgggcgtttcgcggttttttagggttgttcgtttttagagttacgtttttttttagttcgtttttcgagagtcgttttttttcgagtttttgtagttttaggcgttcgttttttttgggtcgttttttacgaattttgtttttattaagaatcggagcgaatatagtttcggttttagagttttcgggaagtgtttttagagtattatttttttttgcgttcgttcgttaagtttgttttatttaaggtttttaggcgttttttgagattttaggatattagaggttttttttcggattgtcgtttcgtcggtcgttatagttgttgtttgtcgttttgggtattttttttatattttatttgtttatgtttttttcggaatgggacgtttgtcgggggtttgtttggggttgggtttagaagtttattaggttgagtttaagttttagtgtgtggttttgaggtagtttgttttttagtcgtttggagtaggaggatggattatttaatttttttttttttggaggatggtatgaaaaagtagggagttaggagatatgatttttatttgggttatttttattttttagtatagggatttggggttgttgtattttaattattaggttgtaagttttttttttttgagacggagttttattttgtcgtttaggttggagtgtgatggcgcgatttcggtttattgtaagtttcgtttttcgggtttaagcgatttttttgttttagtttttcgagtagttgggattataggtgcgcgttattacgtttagttaatttttgtatttttagtagagatggggttttattatgttggttagtatggtttcgattttttgatttcgtgatttagtcgtttcggttttttaaagtgttgggattataggcgtgagttatcgtatttcgtttagattgtaaatttttgaagagtaatatttgtagcggattgatttttgtgttttagttagagatttagcggagtgtatcgttagtatggaattaatattagattagtgttattattgttttagtgttagtttttagtggttgtaaggtttgggtcgttttttttttttgtgattgtttttatttgtaggtatgttattttataggcgtttagtatttggaaggtatttttttaataaatgtcggtggagtttggaaagaaggtgttgaggttgggggtgagtaaagagtaatcgtttttattttagttttgttttcggttaagtagtggggaaggttttagttgtattgatgttgaaatatttgggttatgttattggtaaaggatttgaggtttttaagggttaagtaggaatcgatagttgattttttttttggtagtttagtatattggttgaagagttaggtttgtaaatagatttgggttttaattttagttttgtatttttttagttgtaggaatttaggtaagataattttttgaaattttagtatttttgtggagataattagtttattattaaattattttatagttattgtaaggattacgtaaagttgaatgtttaaaggtgtttaatatagggtttgttatttattttatgtatgggtaataggggttttttttgttgtgttttatgaaatgtagtatgtatagtagttagtaattatttgggtttaattatgtattatttttggggtatagaatttttttttgtattttttttgttttggtagggggtaagaataaagaattttaaattgatagtttattttttaagaattaatatattttttttttttgaaataaatataaattagtttgaaaggtgggggaatttatgggaaagagaagggaaatggggatagtttttagttttttttttttttttttttagtattaaatgattttggcgcgattcggaaacgtagttataaatgagaataatttaaatttttcgataattatagtatttataatagtaggggagggagttatttagtgttttttttttaggttggatagatgtttatttattttacgatcggtaggggttttaggtttttaggtagttatggatttttttggtatgagtaggtagaggtggtgggatggtttgttttacgtagtgttttaattttggtttattatttcgttttataatgttgtgaggtttttggagttttttttgatttgtgggttttttttttttttgcgttgaattgttattggtttttggagtgttttgtatagtttagttgtatttagggtaggagggattttttttatttagttttttttgagattggttttaagattagaaatgagttagtgtagaggtcggtgttattttaggatagtgagtaaaggggaggagagaagttatagggtattataggttgggttgtgttgagtagtattaattattatcgttggttttattgttttgttcgttttgtattttgttgcggtgttgtagagttttgtggtaggcgatttgtattgatttgcggatgttggatttgcggttttttagtattttttttttgtttaggttttggtttatatttagaggaattagtttggttttgggtagttattgtttataggataaggtgaagattaaataaattattttagggagaataaggattagttttttttttttatttatttaaatatattatttaagtatttattttggttagattttgtgatggtttttgtttttaaaggattgtttatggtttagagatgaaagagtttagttaatagttatattgtgtggtggcggcgggagggtaattatagggtatttatgggtataaaaaggaggtattttgattttattagaaatagttattttgtgttataggttttaggtagattttattgatattgaatattttttgtagataattaataaaaagattatatgtgtaaatgtgatagaatagggatttagagtttgaatgtttatgtttgttttatttttattttgttattgtggaggtagaggtgggaaaattaagtttagaagttatttgagtttgggtgggagttatttttatatttgttataagtttttgatggttttttggtttttagttatagttgtgtttattagtgtttatttagttttttagatatatggtcgatataattttttcgtttaaaaaattgttttaagttttttttttattgatttgtgatagtttagtttgtttgttgttggagttttttggtagtttgtttttatattatatagggttgtatttgtggttgtgagttatattaaatgtttttttttttattaggttcgtttgttgttaaagaagaggacgaggtagagatgttttcgggttttttgggttatttgttttttaagttttagtatttttagtgggggtatagggatgggaattttatggtggaatatattttttcggggtatttttggattaatgatttgaggatataataagagtttagtttggtttagtttatgtttttttaaggttttttttttttaagaatttagagagtatgtttgaagtggggatagagagggtattatgttattagaattgtaatgttgatttttagtttttttttatgttaaattattttagagtttaaggagtaaagagaagtaaaagggagagatggagaaattgagtgggagtttttaagtggtatttaagttgtatttgtttattagtttattttattaagaaattttgtgttttatagtttagtagggagtaggaaaagtttgttaattgtgaatttgtattttgggattggaaagtaagaagtgtaatagaagtaagtatattagagttgggtatgatggatagtttcggtatttggtttatacgaggtttagagtatttagcggggagtttttattttttgatagttagttagtttttcggtttagatttttttttattattttataggaatgggggagagggggtggattagtagttggggggttggcgagattttgatattgggtttttagtatttttggttttgggtaagggaatttattgttgtggtttacgtcgcggttagtgtttacggagtaggttttatttttagtgtttgaggtatttttattgttgttttttgggaaagtgtttcgagagaaggagggtttgtttcggttttgttttgagggcgttgtgttgtggataagataatgggagtttagtttaaaggaggggaagaatggggaatagtatggtatgtgtttttagtttttaaagttcgtagggtttgagatttttggaaagtagaggttatatgaggaattttaaatttaaatatttataggggttaggttgatgatttaatagaggtgggttagtttgagtagtggcggtaggagtgtatattttaattattattttaatttaggatggttttttttgttttattaatggtaatattgatttatttatttagtagagaattttgagtttgagttattttaatttagattgagatggttgttattttatttttaatagggaaatttatataggtttaagagttttggaagggtattttttgaggttggtttcgatttggagggttggtatttggttcggtttgaagtagcgttgttattgttattgttgttggatttagagtttgagttgtttcggggaaggttgtagttattacggtatattaagaaatttttttttattggttggtttttatcgttgaagttattggttggtaagttttggttgaagggaaggggaggagggaaggaatcggttaggaagatgtagattagagatgatatggaggtaagagggatttggagtttgggttttttttttgtgttggaaaatttttttaattttggttagtagagttagttttgggtagtgtttattatagttggttatagttttgttttattttttgtttttttcggtagttattggttttaggatataaatggtttaaagggtaggagatttttaaggaaggtgagaagagaaaaggtaaagtgatataatggaggtagggggttttggatgggattttagttgggtcgtagtgtttttgggttttagtttttttaattgtaagatgagtgagtggagttaaaggatttttaaggatttttttagttcgtttttttatgggtaaataaaggggtaattgggagtatgttgggaagaatggtagttttgtttatttttttggggggttgggtgatggtaaggtttatttattggggggttttttgtggatttattattgtcgttgtttgagttcgaattgggtcgggggtttttatttcgtttgcgttgacgtagggaatttatgatggggagttgggggggttttataggattgttttcgtggttgggggttatttggttttttcggtttttggggggtcggttcggttttttgggcggtttagttgttttcgggttttttttggagaatagaattgaggtttttttgtttattttatgtgcgggggttgaggatatgttgggatttaggtttggagtagagaaagaaagaaggagagttggtgaggggtttgatttgagaagggtagatatttagggttatgttttgggtatataggattattattttagttaacgttggggagattattttaggggtttggaatttggaagattaatttttatataaatagttagagaggtagttaagaggtttttgattggggaatgaggg

SEQ ID NO: 1363 - DNA, 6954 bp, Artificial Sequence
  chemically treated genomic DNA (Homo sapiens)
gaaataggtggaaaagaatatgaaaaagaaaattgataaatatatataggtttttttaagatttatggatttttggtttgagtttaataaagattgtttgtttattttttaaaaataaataaataaaaaaaaattttttgtattataaattattttgtgtaatggtgtgttattatatatttttttataattttgtatttttagtaattttatattgatagtttaaaattggttatggtgagaatatttatattgtagaaattagtaaatgatgtaaattaaggtttttttgtttggatttgtagtatatttatgttttattggattttattatgacgggagagttttaatatggtattgaagtaaaaatgtaaatgtaaatgtatatttatatttatatttgtaaatttaaattgtttttggtttttttttttgatagtatttgaaaagaatatatttagttaggtacggtggtttacgtttgtaattttagtattttgggaggttgaggtaggtagattacgaggttaggagttaaagattagtttgattaatatggtgaaattttgtttttattaaaaatataaaaattagttaggcgtggtggtattcgtttgtagttttagttatttaggaggttgaggtaggagaatcgttcgaattcgggagggggaggttgtagtgagttaagattatgttattgtattttagtttgggtaatagtgagattttattttaaaaagaaaagaaaagaatatattatttattagattaatagttatataatatggatttgaaatcgtgttaattaggtataatagttgtaattatagttattttttggttgagtttgtgttagtttggttattttttaagttgtatttgatatttgtagtgattagattggtgaattaaatgtgaaatatgatagaaataaattttcgtattttttaaaggtggttttaattagttattttttttgaattgtgatattgtttttgatttattgtttttgcggtaagaggtgtagatttagggtttttattttaatttgtagttcgtattttatagattaaagaattatgtggggattttgttaatggttaagtatgtgtattttagttatagatttagagattatagaaatgattattgggtagatttatggatttagtatatgttatttattagttgattttataggttttttttttaatggaagagaagtataacgatttagttatatgaagattggttaaatgttttaagtattttttaaatttagagttttataattttttgttattatagtgtgttttattttagaataattaaatagaaaaggaggaagttgagaattttaaaaattgaggttttgaatagatgaattataagtttgagaggattattaggatgttcgggatttattggaggtgggagtagagatattgttttttttttttttgttgatagaaagaagtaatgagtgattttttttatttattatagtgatgattattgttggtatattttttatagatatttttttgttttttttattataatttgtggttaatgaattgtttgtgggttatggattttagagttttagtagaattaatgagtttttttttttcgtgggatttttttattattatattatgttaatatttttatttttaatgttattaaaatagaggtatatttttgtttagattgagggggaaaattgttggtaaagaatttaatggtaaagaattttatggtaaagaattcgatggtaaagaatttaatggtaaagttttgattttggttttattttttttgtagagatttggtgggttttggttggtgtaaattttttatagttagtagatttgggtttaaatattagttttggtgtttattaattatattgttttgggaaagttatttatatttttttgttttaatttttttatattggaaggaagagaataatatgtagagttgtgaaggataattagtagtgtagagtaaatgtttaataaataatttggttggtggtagatggggagagttttaatttgtagtgtttgttaatttttatagtgtaaatatttttgttatggttgttttaagttattgatggtttaataattgttttataaaatttttaaaaatttattaattaagagataatttgagttagttttagtttattatatatatgtgtgtttagaaaagtgttagatggttagtattagtaatttttattgtgattagagatgtagttgtttatttaaggatgtttatttttttttatttttttgtttttttttgatgtataagtggaggttgggtattagttaagagttttgttatggggaattgttggtattagaagagatttttatttgattgaaggtaagtagaatttttgttttttggttgtgagatattagttttcgtttatttttaatattggaggattagatttggagttaaatttattttaaaattttagttttagtatttattgattaggtaattttttataagttttttgtttcgtttgtgattgtttattttttggtaaaattgggataattttatttttttgtagggttattgtgagaattagatgtttagggagttgtttattattatgttttgatggtagttattaatagtaagggtagtttatggttattagattattataaattttttttaaaggattttttaattttttttttagtttttaatataatgttggtattttggggtttaagaaatgaataaatgcgtagattaatgtatgaatattttagaaggaaaaggagtaggagaaaaataatgagagtggaaaagatagagaataaagagggaaagggaaatagttattaagaaaggtgtaatttaaagagatttagcgatatagtagagaaaggaaaggaatgaaatgttaagataatgataaagttagaaatgtagaaaattaattaggatgatatatgatggatgaataagaaataattggttattgtttaaggttatatgtaaagaattttatattataaagaaaataaaggagggggcggtagttaatgagtatgaggttttttttgggagtaatgaaatattttggaagtaaatggtgttggttgtataatttgtgaatatattttaaattattaaattatatattttaaaagggcgaattttatggtacgttaaatatattttaaaaaatgaaagcgaaggtataattaaaaatttagaggttaggtatagtgatttatgtttgtaattttagtattttgggaggtcgaggtaggtagattatttgaggttaggagtttgagattagtttggttaatatggcgaaatttcgtttttattaaaaatataaaaattagttaggtatggttttgagtgtttgtaattttcgttatttgggaggttgaggtaggagaatagtttgagtttaggaggtggaagttgtagtgagtagagatcgtgttattgtattttagtttgggttataaaacgtgattttaaaaaaaaaaaaaaaaaaaaaaaattagaatggtggtgatattttgaggggtgataaattgagaaaattgagagattagggaggggtatatagaagtttttaagatatttgaaatatttgtttagttttttaatttagttgtttaaatatgtaataatattttgaaaattaaaaatatattttaagtgagaaaagaataatgggaaaaataggaagaagatagagataatggtagagagttttggtaaaaagggagatgtgatagagtttaatataagatggggattttgtaagaggaagatatttttgttattttttgagttttatggtacgtttgtggtgtggtttattattttattttttttttttatggtttttttaaggttttgtaagattttgagtttttgtttttgatttgttagagtggttttagttttttatttttagtttttaattgattttttatgttttaatatatttttattttaaggaaaaagtttagttattttttttaggaagttttttttgatatatttaattaaattggttagttattttatagaatttttatttttatttatttagtatattggtgttattggtttttaaattttggattttttttttggtggtgtttgaaagattataagatttagggagagtgatttttggagtttttcgataatgtttttgtgaattttggtgattttaatatgtttgtggttatttttgttttttatttgtaagttatttatggtaaggacgaagtatgtggattaatttttatttttttttgaaagttagttggtttagaaatttaggttgttaaaaaggttagggtaattaatttgatttttttataagtagggatattttaaaataaaataaaattttttttatagataaaatattgtttttgataagtttatttgtaaatgaaaaaatataaaataaatggaatgtatagagttttataaaatttatttaattaatagagtaataattgagtttatagagataatttattagaaaatttatttaatatattttacgagattatttaatagataagagataattttagaatagtatttagaatatagtggtatttaataaattttttttgaatgaatgaattaatgaattagtgtatattttaattagttttttttgtttttatttaggaagttagaggtattagtgtgagtatttatttgttgtttagtatatttatggattttttatttttattagataatgtttgattaggaagaatagggaatgagaaggagttgttggatggtgatgagttttggaaagggaggttgggcgagtagagatagaagagaaatatttatttgttgtgattttataaatatttaggttgagttttgataagataggttgaattatattggggtgatagttttatttttttaggtataaataagaataggttatggttaattaaagttttatatcgggttttttttttttgggtttttttgaatatttagggttggaaaggatttttttcgtggttgtttttattttttattttttaattttagtgggtaatatatttattattttgttgtttgtgttggattttaagttttattttttaatgtatttttttttttttaattttttttttttggatttttgttttattacgagttgtgttttttaaatgttggttaatttttggggtttaaagaagattattagttttttggattgttttgtttagatttttatttttttgtttttggggataattgagtgtatttttttgatagtgatggtttttgatcgttacgtggttgtttgttagtttttttattatgttattattatttattttcgtttgtgttggtagttggtatttgtggtttgggttattgggttagtggagttagtggtttagatattatttattttgtatttgtttttttgtttcgatcggtaggtggatgattttgtttgtgaggttttagttttaattcgatttttttgtgaagatattttttataatgagatttaggtggttgttgttagtgtttttattttggttgtgttttttagttttatttttgttttttacggagttattatttgggtagtgttgaggattaattttgtaaaagggcggaggaaagtttttgggatttgttttttttattttattgtggttatttttttttatagtttagttattgttgtttatttttagtttaaaaatttttatgtttaagagaggggtaagttttttggttttttttatgtagtgggtatttttttatttaatttttttatatatattttgaggaataaggaggtaattagggtatttaggagattgttggggaaggaaatggggtttatataaagttgagggagagttgtttaatgtgttttaaaagagaggagattttatgtgtttttattagaaagtttgagttttttgtttttttgttttttttatatttattatattgtgggaatggatgaaagttatatgtttgtgtgtgtgtatgtatgtgtgtaagagatagcgattgaaatgtagtaaagggaggtatttttatgcgaaaaattataggtattaagtatattttatatttttttttattttaagttttcgtttttatagttatgtttttatttttattatttttatttttaattttttttttttgttatatttttattatttttttatttttaattttaatttttattatattttttttgttttttttttatgttttttttattttattatatgtttgttttgtatttttattttattttattttttaaataatagtaaaagagaaggggaagttgaagtttagttaagttcggaaatttatttaagaatatatagtgtttatagtattagaattaaaatttaggttttataatttttagttaggtaatttttaaatatatattgttgtttttatattataattaaatattttagtattttaggtttgagttttataaaggaaatttagtttttttagttttatttttttttttataatgtttataaatcgtaggtaaaggagtagttaaaaagatataaaaatatttttatgtttaggttggtatattgtggattttggtgttatttatcggttaaatatggtattgtatgtgatattttagatttttgttttagggttattcgaattgtattttgtttaaagatatagatatggttatgatattataagtatttatgtaattgttatgttaatttaagtaatatttaaagtatagatgttttttgatttataatgatgttattttttaaaaaatttattatatattgaaaatattgtaagttgaatatgtattttatatatttaatttattaaatattatagtttagtttagtt

SEQ ID NO: 1364 - DNA, 6954 bp, Artificial Sequence
  chemically treated genomic DNA (Homo sapiens)
ggttaggttaagttatgatgtttggtaggttaggtgtatgaaatgtatatttaatttataatatttttagtatatgataggttttttgggaggtaatattattataagttaaggagtatttgtattttaagtgttatttgggttaatataataattatataaatgtttatagtattataattatatttatgtttttgagtaaagtatagttcggatgattttggagtagaagtttgggatgttatatgtaatattatatttggtcggtagatgatattaaggtttataatgtgttagtttaaatatgaagatatttttgtgtttttttggttgtttttttatttgcgatttgtgggtattgtaagagaagaaataggattgaagaagttaagttttttttgtaaggtttaagtttgaaatattgggatatttgattatggtgtgaaagtaatagtgtgtatttgagagttgtttgattgaaaattatggggtttggattttagttttgatgttgtggatattgtgtgtttttgggtgagttttcgaatttagttgggttttagttttttttttttttttgttgttatttgaggaataaaatagaatgagaatataaaatagatatatagtgaagtgggaaaaatatgagggagaagtaaagaagatatggtaggaattagaattggaggtgaaggaatagtggggatatggtaagggaggggaattaaaaatggaagtgataaaggtaggaatatgattatggaggcgaagatttaaagtagaaaaaaatataaaatatatttgatgtttataatttttcgtataaagatatttttttttattatattttagtcgttgttttttgtatatatatatgtatatatatagatatgtggtttttatttatttttataatgtaatgggtgtgaagaaggtagaggggtagggaatttaaattttttgataaaagtatatagaatttttttttttttaaagtatattaagtagtttttttttagttttgtgtgagttttatttttttttttagtaattttttgaatgttttggttatttttttgttttttagggtgtatatgagagggttaagtgaaggagtgtttattgtatagaagagattaaagaatttgttttttttttgggtatagggatttttgggttggaggtagatagtaatgattgagttgtagaagagggtgattatagtgagatgggaggagtaggttttaaaagttttttttcgtttttttgtagagttaatttttagtattgtttaggtaatggtttcgtaagagataaggatgaggttgagaggtataattaagatgaagatattggtaatagttatttggattttattgtaggaggtgtttttataggagagtcgaattagagttgggattttatagataaaattatttatttgtcgatcggggtagaagggtaggtgtagggtggatggtgtttggattattgattttattagtttaatgatttaggttatagatgttagttgttagtataggcgggggtggatgatggtggtatagtggaggggttggtagatagttacgtagcgattaaaagttattattgttaagaggatgtatttagttgtttttagggataggaagatgaagatttggatagagtagtttaggaagttgatggttttttttgggttttagaggttgattagtatttggggaatataattcgtggtgaaatagaggtttaagaaggagaggttggagaggaaaaagtatattggagagtggagtttggggtttagtatagatagtaggatgatgagtgtgttgtttattagggttaggaggtaggaagtgaagataattacgaagagagttttttttagttttgggtgtttagagaagtttagaaggaggaagttcggtgtggagttttggttaattatggtttgtttttgtttgtatttggagggatgaggttgttattttagtgtgatttaatttgttttattaaaatttagtttgggtgtttgtgaggttatagtaggtaggtgttttttttttgtttttgttcgtttagtttttttttttaaggtttattattatttagtagtttttttttattttttgttttttttggttaaatattgtttagtgagagtgaggaatttatgaatgtattggatagtagatggatatttatattggtgtttttgattttttgggtgagggtaaaggaggttgattaaaatatgtattaatttattaatttatttatttaggggaaatttattgagtgttattatgttttgaatgttgttttagagttgttttttatttattggatgatttcgtaaggtatattgaatgaattttttgataagttgtttttgtaggtttaattattgttttattggttgaatgaattttatagaattttgtatattttatttattttgtatttttttatttgtaagtaagtttattagagatagtgttttatttatgagagagattttgttttgttttaagatatttttatttatagagagattaggttggttgttttggtttttttagtaatttaagtttttgaattaattgatttttagggaggggtggaaattggtttatatgtttcgtttttgttatgagtagtttataagtaggaggtaagagtggttataagtatgttaaaattattagggtttataggaatattatcgaaagattttaagaattattttttttaaattttgtagttttttagatattattaaaaagagagtttaaaatttaaaggttagtaatattaatgtattgggtgaatgagagtaaaggttttgtaggatgattgattaatttggttgggtatattagggaaagttttttagaggaggtgattggattttttttttaaaatagagatgtattggggtatagaaggttagttgagggttgggggtgggagattgaagttattttggtaggttagagataaggatttagggttttataggattttaggaaggttatgaggggaggagatgagatggtgggttatattataaacgtgttatggagtttagaggatggtaggaatgttttttttttatagggtttttattttgtattaagttttattatatttttttttttgttaggattttttgttattgtttttgttttttttttgttttttttattattttttttttatttaaaatatatttttaatttttaaaatattgttatatatttaaataattaggttaaggaattgagtaaatgttttaagtattttagaagtttttgtgtgtttttttttgattttttaatttttttaatttgttattttttaagatgttattattattttaattttttttttttttttttttttttagagttacgttttatagtttaggttggagtgtaatggtacgatttttgtttattgtaatttttattttttgggtttaagttatttttttgttttagttttttaagtagcggggattataggtatttaagattatgtttagttaatttttgtatttttagtagagacggggtttcgttatgttggttaggttggttttagatttttgattttaggtgatttgtttgtttcggttttttaaagtgttgggattataggtatgagttattgtgtttggtttttaaatttttaattatgttttcgtttttattttttgagatgtatttaacgtattataaaattcgtttttttgaagtgtgtaatttagtggtttaaagtatatttataagttgtgtaattaatattatttatttttagaatattttattatttttaaaagaaattttatgtttattggttgtcgtttttttttttgttttttttgtaatataaaattttttgtatgtaattttaaataatagttaattgttttttatttatttattatgtgttattttaattaattttttatatttttaattttgttattattttggtattttattttttttttttttttgttatatcgttgaatttttttagattatattttttttagtgattgtttttttttttttttttgttttttgttttttttatttttattattttttttttattttttttttttttgaaatatttatgtattggtttacgtatttatttattttttgagttttaaagtgttagtattgtgttaggagttggggaaggagttgggaggttttttgaaaggggtttatgatagtttagtgattatgagttatttttgttgttagtagttattattaaagtatggtgataaataattttttgaatatttggtttttatagtgattttataaagagataaaattattttaattttattaaaaagtgaatagttatagacgggataagagatttgtagaaggttatttagttaataagtgttaggattaggattttagagtaagtttaattttaaatttggttttttagtgttgaggataggcggaaattgatattttatagttaaagagtaaaggttttgtttatttttaattaaataaaaattttttttggtattagtaattttttatgatagagtttttaattggtgtttagtttttatttgtatattaggaagaaataaaaaaataaaaaggaatgggtatttttgaatgggtaattgtatttttggttataatagggattgttaatgttgattatttggtatttttttaagtatatatgtgtgtgatgagttggagttggtttagattattttttgattagtaaatttttaggaattttgtgagatagttattaaattattagtggtttgagatagttatggtaggaatatttatattatgaaaattggtaaatattataaattagggttttttttatttgttattaattaagttgtttattaaatatttattttatattgttgattattttttataattttatatattatttttttttttttaatatgaagaagttgaaataaagaaatataaataatttttttaaggtagtatagttagtaagtattagagttgatgtttgaatttaaatttgttaattgtagagggtttgtattaattaaagtttattaaatttttgtagggaggatgaagttaaggttagaattttgttattgagttttttgttatcgagttttttgttatagagttttttgttattgagttttttgttaataatttttttttttagtttaggtagaggtgtgtttttgttttagtggtattggaggtagaaatgttgatatggtatggtggtagagggattttacggagggaaagagtttattaattttgttgagattttagggtttatagtttatagataatttattagttataaattatggtaaaaggggtaggggaatatttataggaaatatgttaataatagttattattgtggtaggtaaaagaggttatttattgtttttttttgttaataggaagaaaaaggatagtgtttttatttttatttttagtgagtttcgggtattttgatagtttttttaggtttatgatttatttatttaggattttagtttttaaagtttttagttttttttttttttatttagttattttgagatggagtatattgtagtaatagagaattataaagttttgggtttggagagtatttagaatatttagttaatttttatataattgaatcgttatgttttttttttattagaaagggagtttatgagattagttaataaatggtatgtattaggtttatggatttatttagtagttatttttgtagtttttaaatttgtaattggaatgtatatgtttggttattggtagaatttttatatagttttttagtttgtggagtacgagttatagattgaagtggaagttttgaatttatattttttatcgtaaagatagtgaattaagaataatattataatttaagggaaatggttgattgaggttatttttaaagggtgcgggggtttgtttttattatattttatatttaatttattagtttggttattataaatattagatgtaatttgaaagatgattagattagtataaatttaattaagaaatagttgtaattatagttgttgtgtttgattagtacggttttaggtttatgttatatggttattaatttggtgaataatgtgttttttttttttttttttgagatggaattttattgttgtttaggttggagtgtaatggtatgattttggtttattgtaatttttttttttcgggttcgagcgatttttttgttttagttttttgagtagttgggattataggcgaatgttattacgtttggttaatttttgtatttttagtagagatagggttttattatattgattagattggtttttaatttttgatttcgtgatttgtttgttttagttttttaaaatgttgggattatagacgtgagttatcgtgtttggttgaatgtgttttttttaaatattattaggaagaaagattaaaggtagtttgaatttataggtatggatataagtgtatatttatatttatatttttgttttagtattatgttaaaattttttcgttataatagggtttaatgggatatggatgtgttgtaagtttaggtaaaaaagttttgatttatattatttgttgatttttgtagtgtaaatatttttattatggttaattttaaattgttaatgtgagattattgaaaatgtagagttgtagagaaatgtatggtaatatattattatatagaataatttataatatagagggtttttttttgtttgtttgtttttgaggaataaataaatagtttttattaggtttagattagaagtttatggattttgaggagatttgtgtgtatttgttagtttttttttttatgtttttttttatttatttt

SEQ ID NO: 1365 - DNA, 6494 bp, Artificial Sequence
  chemically treated genomic DNA (Homo sapiens)
gagattattttggttaatacggtgaaatcgcgtttttattaaaaatataaaaataaaattagttgagtttggtggcgggcgtttgtagttttagttatttaggagtttgaggcgggagaaaggcgtgaattcgggaggtggagtttgtagcgagttgagatcgcgttattgtattttagtttgggcgatagagtgagattttgttttaaaataaataaataaataaaataaaatataatgataaagaaatgtttttatagagtttttagttttaatttttgaagtgatagattgtgataaagataatttaaataagaaaagttttttggatttttaataatttaaaaatgtgtaaagagttttgagattgaaatatttgataattgtttatttattagaaagtgataaggggttgtattagggtaatggtaaatttttgtaattggaaattgaagagtaagatttgaatagaaatgaggttttagattttagaaagatatttaggtttatgtattatttaaattagttgtttttggataaatttttaagagttgatttagttggattttagatattatttttaggtttttaaaagaattaggttttttaaggacgattttgtatagttaaatatagtgtattatttataataattttttttgttaatttttaggttatatataataggatataaaaagttaaataataaaggataaatttttttatatgtgtgtaattttataaattttttttgaagttgatttttatatttttattttatagaaaaggaaattaaatattaggaagtataagtaatttagtaagttataaggaagtaaatagttgagattggattttgaattgttttttttttaattaaaagttcggggtttttatttattttattttagatggttttgttttaggtttattgggtagaagttggtgtgaggagttttttgtttttatttatttatttatttttttattatgtaaataaagagtgtttattttattttatttgatatgtatgtaataatttagtgattaaggataatattgtattataatgtatttgtatttttattagttatgtttatttaaaagttagataatatagaaaatatttataaataaatatataaaatgtttttttaatgaaattttggatgttttatttttttgagttttaaattattgtaattgttttttgtatagtatttatgtttgtgttttttattaatagttattaattatgtgttttattaatagttatttttaatagaattaggattaagttattaaagtaagtgtaggatgaaggtaattttatgaataattaagttaatagatgttgaaatttaaagaagagaagtgatttttagtatttttttgggatttattcgtgttatgaataaatacgttgttttgaaataaataatttttgtgaaaaatgttgtatgatatgggtttgatagtaatgtttaatttaaatgtatagataataaattatttttgtttcgaatagaaagtttgggttaagtaagaagtattaataaaaagatagatatttttattgtataaattatatattaaggtttaatgaaataaaagatatatttgggattaatattgtatgaaataattatgtttgtaataaattgatttatttatttgtagtttatttttttttatgagagatttgaatttttataatagattttagattaattgagtaggaaatgaataattatggaggaaatagggaatatattatagggaaattttgaaataataaaaatttgaaattgaggtgtttttatattatatattaagtggtattaatttattatttttggaatagtttttttttaggttttttaagattgttaatatatttgaaagaaaattaaatttgttttgtagttttttgaattgtatattaaatgggtggaagatattaagatataaatgttaaataatttaaggaaggatatgtaatgataattagaatattttatatttaaaatagaaggataataattatttttattgaaagatgataaagattaatagaaaataaaaaaattaattttagttgagaatatgaagtataaagtttaagttttgttttagagagtaattgtatttttttataaaatagaataaaaaaataattgtttttagaaaagggtaatgggaatggggttgttttttgtttgtaattttagaagaaaaggtatatggttagtttataagtttatatatttaagttttggttggttgatagattatattgagttaaaaaggataaaacgtttttattaaggtttttttataaagatgttttatttttaaattgtgttattaaaaaaattatttagattgttttatttttattttatattatttattatttagattgtatatattttatgttattatttgggtataatggtataaaatatatgttaattatttttttaattgaatttaaatattatgtatattaatatttatatatgtttaatatagaaagaaatatagagagtgagggagggagtttattatgtattaagtattgtgttagtgagtagattttttttaggaattttattacggagtataaagttaggagagtaaataaagtatattaaaaaatgtatataaaagatgatagaattattattttaaaagattttggtggataagaattatgaattggatttaataagatgtaatttaaaagtaaaaaaatttatagtgttgtattgagttttttttaaagtaattataaatttataggagatgaaatatatgatttattaggtataagaagaaagttttcgtaattaaatattattgtatttatttttttaaattttagtttttattatagtatttggtttaaagtagatttttagtatttgtggaattggtttggattgtgtttaggaaattttgttattggtaaatttaaggagagttaagagaataacgtgattaaaaaataaaattaaaaaaaaaaaaaagggatttttattgtattggtagaaagataaagtttataatttggtttagtttttttttttgttgttgtttgttttttggttagggtaaatttaggttattatttttaatattggaattgtagttttagagtagatagataaattataatgagaatagatgaatagtaaggttattgaaaggatttagaattatattttataagaaataattgaatgatgttaatgtttaatttgtaaaagagaaaatttagttgattttaaatatatgaaatatagtggtaaggagttattatttattaagtaattattattgtaatgtatatttatttaattttgttaatagatatatgaggtgaatattattagtttattttcgttttttttaagtaatgagaagattgttattttgtagggtaaagtaatatgtttaaatttatatagttataaagttataaagttgatttataaaatgattgattttaaggttaggaattattatattgtgttttgttttttatatgaattaagtataaaggaattgaatgtaggtagatagattttagtttaatataagagaattgttatattagtttatggaagaatatgttttaaggtatttttgttagtttttaggaaatttttgtaatattttattgtgtaaattatatgttttaatgtaagaggataaaaataatagtgaatattggtaaaatagtttatgattaatagagtttatttatgagttatttgtttttaagataaatgttaaaaaataatattggaattaaatgttttttttaagattttttttttttgttttttgaaattgtagtgaattttttaagattaattgaggatatgtatttttaatgtttatggttaaaagatatgtatatgtatagatatatatatgtatagaaatgagaattattttagaattggtgttaattttagaaaaaaaaagattaagaatttatttttggtatttataaatttatttttaaaatagaagtatttatggatttagaagtaaggtataaaatttaaaaacgtatttatgttttttaaggattttgttgtaggttattttaattttatatattatgtggttttttttagaatttttatattagaaaatagattgaatgtaaattttgttttgttttaataattttttttttagaagtatatgtttatcgaggaagtttttagataaaaaagataaataattttaaataggtttatgagatttaagatgtgaaagattaatattatttttagttgattttattggatgttataattttttgatttttgtaattattttttatgttttttatttattgaaataaaattagaggtaaatagagttttattttagaaattggggaaaatgaggaataggttttttgtataaaagtttatttgttttttattttttttttagaaaataaaggatcgttgttgtttttaataggtttgtagggaagaaaattggagaaatattattatttttttttagatgttggtaacggaggtaataaggattgtaaaagaaaattgtgtgttttttatttttaaataattaaaattggtagtagggatggaagagtattggggttttagggttgttagggttttattaagttaatgtattttttgttagattttaaggagaaaaaggcgttggaaaattgagtgatgttagtttttttttttattttttattgttattaaagattaattttatttttttttttaatttttttttttattttttttttttagatgtgtttgtatagaagagtgtttagtgaagagatttattttttggatcgttttgcgtaaaatttattttttttttttttttttttttttttagttttcgaatttcgtatggtttacgttttttttttgtagcggtgcggggtaggtgatgagtttttgtgaattattaaggtgggagggggttatacgtagaggagaatgttagatgtttagttcggtttttttcgtttgacgtttttttttgttttagttaggattggtttttgtaagaaatagtaggagttgtggtagcggcgaaaggaagcggttgaggcgtttggaattcgaaaagtttcggtgtttttggttatttcgtatagcggtgttcgttcggtcgttagtattatggatagtagcgttgtttttacgaacgttagtaattgtattgatgttttggcgtatttaagttgttttttagtatttagtttcggtttttgggttaatttgttttatttagatggtaatttgttcgatttatgcggttcgaatcgtatcgatttgggcgggagagatagtttgtgtttttcgatcggtagtttttttatgattacggttattacgattatggttttttattttatcgtgtgcgtggtggggtttttcggaaattttttggttatgtatgtgattgttaggtaaggaaagcgttagggtttcgagcggagggtttagcggtttaagggggtataaagagatatttaatttttaaggtttaatgttgggcgggaggatgaaagaggggaggtaaattggggggattttggaggagattacggatagtgattgttatttttatgagaaaatttatttttttgttttttttttaattgataaagaaagaatttaaaattttaggagtagagaagttgttttggtaaaagttataaatgtttaggggtggggggcggagggaagttatagtatagatttggagcgtttttttatattgagtaaagagggtttttggtagagttttatatttagtttttttgtaggagttatggaaagagtaagttgtgaataatgggagagaaattttagttagtttttttaaatttggttggggtcggtgtgtgtgtgtgtggcggggggagtagttttaagtttttttaattgttttgagatggattttggtaatttttttatttttgttggtttagtatttttttgtattataattttattttttttttttttttgttatagtagtttttatttaatttttttttttattttgaggtaatattaggtagaggaagtttttttagtatttttttatgatagtttttttttgttataataaatatgataaatgtgttgtttagattagtttgtcgttagtagttttagatcgtttaagttataaattgtatttggaatgggtaggttggtttaggagaatcgtaggatatggttgtattttattgtttttataagttggagttaattaggagtgattaaaagtattataattttatattagaaattgtagaaatttttatataggaagttgtgatgggtgttttagataaagtgtttttattaagtaaaattaatttaaaagagttgtagtttattttttgtttatttagatgttttcggtatatttggtagagtgtggaagtttttagtatt

SEQ ID NO: 1366 - DNA, 6494 bp, Artificial Sequence
  chemically treated genomic DNA (Homo sapiens)
aatattgagagtttttatattttgttaaatatatcgggaatatttgggtaaatagaaagtggattataatttttttgaattaattttatttgataagaatattttgtttagagtatttattataattttttgtataagagtttttgtagtttttaatgtggaattatgatgtttttggttatttttaattagttttaatttgtgaaggtaatgaaatatagttatgttttgcggtttttttgaattaatttatttattttagatgtagtttgtgatttaggcgatttgaagttattaacggtaaattggtttaggtaatatatttgttatgtttgttataatagaggaaaattgttatggagagatgttaggaaaattttttttatttagtgttgttttaggatgaaaggaagagttgggtaagggttgttatggtaggggagaagaaagggtggggttgtggtatagggaagtattaaattagtaggagtaggaaagttgttaaggtttattttaaaataattgagaagatttgagattgtttttttcgttatatatatatatatcggttttaattaaatttgggaaagttaattagaattttttttttattatttataatttattttttttatagtttttgtagagggattgagtgtaggattttgttaagagttttttttgtttagtataaggaagcgttttaagtttatgttatagttttttttcgttttttatttttagatatttgtagtttttattaaagtaatttttttgtttttgaaattttgaattttttttttattagttgaagaaaaaatagaaaagtaggtttttttatagaaataataattattgttcgtggttttttttagagtttttttagtttatttttttttttttattttttcgtttaatattgagttttgggagttaggtgtttttttgtatttttttaagtcgttgaatttttcgttcggagttttggcgttttttttatttgataattatatatatgattaggaagttttcgaagagttttattacgtatacgatggagtagagggttatgatcgtgatggtcgtgattatggagggattgtcggtcggagggtataggttgtttttttcgtttaggtcggtgcggttcggatcgtatgggtcggataggttgttatttaagtgggataagttgatttaggaatcggggttgggtgttggggagtaatttgagtacgttaaggtattagtgtaattgttggcgttcgtgggggtagcgttgttgtttatggtattgacggtcgggcgggtatcgttgtgcgaggtagttaggagtatcgagatttttcgggttttaagcgttttagtcgttttttttcgtcgttgttatagtttttgttgttttttatagaaattagttttggttgagatagagaggagcgttaggcggaggggatcgagttgagtatttgatatttttttttgcgtatagtttttttttattttagtagtttatagaggtttattatttgtttcgtatcgttgtaggaggggagcgtgggttatgcgggattcggaggttggaagggagggaggagggaaaaggggtggattttgcgtaaagcgatttaaggagtaggtttttttattgggtatttttttgtgtaaatatatttaaaggagggagatggagagaagggttggggagagagatagagttagtttttggtagtagtgaaaaataagaaagggggttaatattatttaattttttagcgtttttttttttttaaaatttggtagggaatatattggtttgatgaaattttaatagttttaaaattttaatgtttttttatttttattgttaattttgattatttaggaatgggggatatataatttttttttgtagtttttgttgttttcgttgttaatatttaagaaaaggtaataatgtttttttaatttttttttttataaatttgttgggaataatagcgattttttattttttgaaaaagaaatgagaaataaataaatttttgtgtagaaaatttgttttttattttttttaatttttagggtgaagttttgtttgtttttgattttgttttagtgggtaggaggtataagaagtggttatagaaattagaaggttgtggtatttagtaaagttaattaaagataatgttgattttttatattttaaattttatagatttgtttggaattgtttattttttttatttgaagattttttcgatagatatatgtttttgagaagaaggttgttaaaataaaataaaatttgtatttagtttgttttttagtgtaaaaattttaggaaaagttatataatatatggaattagagtggtttataataagatttttgagaaatatggatacgtttttgaattttatattttatttttaagtttatgagtgtttttattttagaaataaatttgtaaatattaagagtaagtttttggtttttttttttttaaagttaatattaattttgaagtaatttttatttttgtatatgtatatatttgtgtatgtatatattttttaattataaatattgaaaatatatgtttttagttggttttgaaaaatttattgtaattttagggagtagggagggaagattttgaaaggaatatttaattttaatattattttttggtatttattttagaaatagataatttataggtaaattttattaattataggttattttgttaatgtttattattatttttatttttttatattaaagtatataatttatataataaaatgttatagagattttttagagattaataaaaatattttaaaatatatttttttatgaattaatgtaataatttttttatattgagttgaaatttgtttgtttgtatttagtttttttgtgtttagtttatgtggaagataagatatagtataataatttttgattttggagttaattattttataaattagttttgtaattttgtagttgtatgagtttggatatgttattttattttataggatgatagtttttttattatttaaaaaaggcgagggtaggttaataatatttattttatatgtttgttagtaggattaaatgagtatatattgtaatagtaattgtttaataagtgataattttttattattatattttatatatttgaaattaattgagtttttttttttgtaagttaaatattagtattatttagttgttttttataagatgtagttttgagtttttttagtggttttgttgtttatttatttttattatagtttgtttatttgttttgaaattatagttttagtgttaaaaataatgatttaaatttgttttgattaaaaaataaataataataaaaaaagaaattaagttagattataaattttgtttttttattagtataatgaaagttttttttttttttttttagttttattttttggttacgttgtttttttgattttttttaggtttattaatgataaaattttttaaatataatttaagttagttttataaatattaaagatttgttttggattaggtgttgtgataggagttggagtttaaaaagatggatataatagtgtttgattacggaaattttttttttatgtttggtgaattatatgttttattttttataaatttatagttgttttggagggagtttagtataatattatagatttttttatttttaagttatattttgttagatttaatttatgatttttatttattaagattttttggaatggtgattttgttattttttgtatgtattttttaatatattttatttatttttttagttttgtatttcgtaataaggtttttaagggaggtttgtttattaatatagtatttaatatatagtggatttttttttttattttttgtgtttttttttatattaaatatatatgaatattaatgtgtataatatttgaatttagttgaaaaaatgattagtatatattttatgttattatatttagataatggtataaaatatatgtaatttgggtgataaataatataaaataaaaataaaataatttgggtgatttttttaatgatatagtttgaaaataaaatatttttatgggaaaattttaatgaagacgttttgttttttttgatttaatatagtttgttaattaattaggatttaaatgtatagatttatggattagttatatgtttttttttttagaattataggtaaagagtaattttatttttattgtttttttttagaaatagttgtttttttattttgttttatagaaaaatgtaattattttttagagtaggatttgaattttgtgttttatatttttagttgagattgatttttttgttttttattggtttttattattttttagtgaggatagttattatttttttattttgaatatagaatattttggttattattgtatgtttttttttaagttgtttaatatttatattttggtattttttatttatttaatatataatttaggaagttgtagaataaatttaatttttttttaaatatattgatagttttgagaaatttagagaaaaattgttttagaaataataaattaatattatttaatatgtagtataaaagtattttaattttaagtttttgttattttagagtttttttatggtatattttttgttttttttataattgtttattttttatttaattggtttgaagtttgttgtgaaagtttaagttttttataaaaggagatggattgtaaataaatgagttaatttattataaatataattattttatatagtattgattttaaatatattttttattttattgagttttaatatgtaatttgtataatagaaatatttgtttttttgttgatgttttttgtttagtttaggttttttattcgaagtaagaataatttattatttatatatttagattgaatattgttattaaatttatattatgtaatattttttataaaaattatttgttttaaagtaacgtatttatttatagtacggatgaattttaggaaagtgttaaaagttattttttttttttgaattttaatatttattggtttagttatttatagaattgtttttattttatatttattttaatagtttagttttgattttgttgagagtggttgttaatggaatatatgattaatggttattaatgaggaatataaatataaatattatgtaggaaataattatagtggtttgaagtttagaaaaatgggatatttaaggttttattggaggaatattttatgtatttgtttatagatattttttatgttatttaatttttaaatgggtatagttaatgagaatgtaaatgtattgtgatataatattatttttgattattggattgttgtatatatattaagtaaaatggaataggtattttttatttgtatggtaaaaaaataaataagtaaatgaaagtaaaaaattttttatattaatttttatttaataaatttaaaataaagttatttagaataaagtggatgaaagtttcggatttttgattaaaaaaaaagtagtttaaaatttagttttaattatttatttttttgtgatttattaaattatttatattttttgatatttggtttttttttttgtaaaataaaaatatgagaattaattttaaagagggtttataggattatatatatatgaaagaatttattttttgttgtttggttttttatattttgttgtatgtggtttagaaattagtaagaagaattattataaataatatattatatttaattgtatagaatcgtttttaaaggatttgatttttttaagggtttgaaggtagtatttagggtttaattaaattaatttttgaaaatttatttaaaaataattagtttaaatgatatataagtttaaatgtttttttaaaatttggaattttatttttatttaagttttgttttttaatttttagttatagaggtttgttattattttagtatagttttttattattttttaatagataaatagttgttagatgttttagttttaggattttttatatatttttaaattattgaggatttaaaaagttttttttatttaggttatttttattatagtttattattttagaaattaaaattgagagttttataaaaatatttttttattattatattttattttatttatttatttattttaaaatagagttttattttgtcgtttaggttggagtgtagtggcgcgattttagttcgttgtaagttttatttttcgagtttacgtttttttttcgttttagatttttgagtagttgggattataggcgttcgttattaaatttagttaattttgtttttgtatttttagtagagacgcggttttatcgtgttagttaggatggtttt

SEQ ID NO: 1367 - DNA, 5930 bp, Artificial Sequence
  chemically treated genomic DNA (Homo sapiens)
ttttgagatggaatatagttttattattaatagggatttggtaggttagggattataatagatgttatttttgtattaaaaattattttttttttagagggttgagtgtggtgagataattagggtgggtattaagggttttcgaagttataggttatatagtaaagaagtttatgttattttaagattaaatgggtattatagttattgaattgaattcgaatgatgtattatatttttttatttttagggtgaatacgatgatttgggagttgttttagtatttagtttaggaagataatattagattagtagaaagatggattatttttcgagattaaaatttatatattttagaaattgggaaattgagtttattttaagagaattttaagttagagttatatatttattagtttgtgatgtaggaaataaatgaggttatagtgatagtattaataaaggaggtatatttattattttaaagttagtttttaagaggtgaaattttaaaaaaaaaatttggagattgggtttcgttttgttttttaggttggagtgtagtggtaggaatagggtttattgtagttttaatttttttaggtcgagtaatttttttgtattagttttttaagtagtaggattataggtatgtgttattatatttagttttttttttttttttgtagagataagattttattatgttatttaggttgtttttgaatttttgagtttaagtgatttttttgttatagttttttaaagggttgagattataggtatgagttattatgattagtttgaaaaagattttttgattggttaagaatttttaaatttaaaaattaaatttttgaaagtttgaattatattagttatggagtaaaatgagaaaatagaggatttttatttttattttatttttatattttaaaaagtgtttaaaagcgtgtattatttttataataaatatatttgatataaggttttaaatgttatttttttaataaaattgtaatttaaggttttggggtttttttgtttgttttgttttttgtttttgagatagcgttttattttgttatttaggttagagtgtagtggtgtaattttagtttattgtaatttttattttttgggtttaagcgatttttttattttagttttcggaatagttgggattataggtgtgtgttattacgttcggttatttaggttttgtattttaaatgagattatgaaaagtagtaaatatttatattatagagtataggtttttaaaatgttttattttatgttttaaaaataaaatgggttaggtacggtggtttacgtttgtaattttaatattttgggaggtcgaggtaggcggattacgaggttaagagatcgatattatttttgttaatatggtgaaattttttttttattaaaaatataaaaattagttgggtgtggtgatgtgcgtttgtaagttttagttatttgggaagttgaggtaggagaattatttgaatttaggaggtcgaggttgtagtgagttaagatcgcgttattgtattttagtttggcgatagcgagattttgttttataaaataaaaatataataaaaaaaattaataagtggtaagataattttaggattaaggaggaagagatgtttttttattgtattttgtgttatatgattttaggatttaaaaatttattttaagttatttaatgttttataatatagtaggtatattttttttaatttatttaagttattagatagaataaatttatttggttagtatttaatgaaagatttttttaatattgagggaagtaggtttatgattaaacgaataaagttttatttgggagatgaaaataaagtagtattttagttttttttagagtttgtgtatagtaagaatgggtgaaagcggtataaagaaagtgttattaagttatatatagttattatttaaatgttatttggttgggcgtggtggtttacgtttgtaattttaatattttgggaggttaagatgggcggattacgaggttaggggattgagattattttggttgatatagtgaaatatcgtttttattaaaaatataaaaaattgtttggcgcggtggcgggcgtttgttgttttagttattcgggaggttgaggtaggagaatggcgtgaattcgggaggcggagtttgtagtgagtagagatcgtgttattttattttagtttgggcgatagagcgagatttcgttttaaaaaaaaaaatgttatttaaaatatttttaatatttaaaatatttatttttaaagtatttttaaacgtttaatattatatgagttgttgtgagatagattttaaaaagtgatgaattagttataaagaatagtatgttattaatagtaaaataaattggaaatgttatttaagaaattaaattattattaattatggataatataatgagttaggtatggtggtttatattggtaattttagtattttgggaggttgaggggggcggattatttgaggttaggagtttaaaattattttggttaatatggtgaaatttaatttttattaaaaatataaaaaaattagtcgggtttggtggtaagtgtttgtaattttagttatttggaaggttgaggcgggagaatcgtttgaatttgggaggtagagattgtagtgagttaagattatattattgtattttagtttgggtaatagagtgagattttattttatatatatatataaaaaaattataatatagaatagaaataggtattatgttaaatataatggtggttgttgaattaaaatgatatataaataagagtataggttttttatagaaaaaaaattgtgttatttattttttaatagaaaaaaagaaaaatatatataaaaaaagaaaattaagaaatatggatgatatttttttttttttattattttttttttattaaaaaataattaaatggattatttagtttattgttttttttaaaggttttatataaaacggtagattgattgtgattttttaaaaatgttttgagatttataaataaataagtaagaataattttgtttgggtgtagtggtttacgtttgtaattttagtattttgggaggtcgaggtgggtggattatttgaggttgggaatttgagattagtttgattaatatggtgaaattttgtttttatttaaaatataaaaattagttaggtatagtggtatatgtttgtaattttagttatttaggggattgaggtataagaatcgtttgaatttgttttaatttaatatgatgattcgtgatgtagaaatttatataatgtattatggaaatataagaaggggtgataaagagtttattttaaagaaggttaggtaaagttttatagataatggatttgaattagagtttgtagaggtattttttttaaacgtaggtattttaggtaaagggaagaattaagttagaataagttttttttgagtttattttttgtgttgggtatataatattggattttatttttttaagtgttagtggagttttgtatgaaataaaagtatcgtattttttttttaagggtttttttttttagggattagtgtgaggtcgtgtggatgaagggatttagttgaggttttggttatttttgttatttttttagattttgtttttgttaggggtgttacgttttatttatttaaagaggaagtagaggtatagagagggtgagagatttgtttaaggttatatatttaattttagtttgggttttaagtttttttgttttgtggtcgggtttggtttttagggatggaatttagtttcgttgttttttgttttgtttatttgtagttttgggttatttgtttagtgttttttcgttttttttttttttttttttttaggttggggttggggttgcgtttttttgtttagagttaagtaaattagatttaggggaggaagtgattggttgggtaggcggggttttgattaggtttgttttttttttttaattttcgagttaagtaattgatttttatagaggggttttgggttttgagagtagtggttttggagttggaggggttttagtatttagggcgggttggaggtggtttggtatttgtttttattttatatcggttttgagtaaggtttcgggttttttttcgttattttgtagttttatttttgttggttttaatatttggaaggttgcggttgttgtcgggcggttcgggttttaggggatagtttttttatagtagtgttttttggttagttttagggtattcggtggagatgttcgtttttattatttagtatatgtagttttatagcgagtagcgagggttttagttattttcggggtagttttgggtttaagtgtttgggttagtggggttttgtttagggtgacggtagttcgagaggagggaggttagagtgaaggtgggggtggagtcggtgttattgggagacgttggaggtaggggcgggggtttttatgggtagagtaagttaggagagagtttgaggtcggtttgagggtgggtttcggggttttttagttttattgtttattttttgcgtgattttagtatcgtattaagtttgtttaggttttagtttttatttttgttagatgggggtggtaatagtagtttttaggatttagtgagtgaaggtgtataggtgttcgtggttgggaattgtttgtggtttgtttttgattggtttttattcgtgtttatttataggattatgggttttatgtttcggagcgaggaggtggttttggtttagttttttttgtttatagcggttgtttatatttgcgtgagtcggttgggcgagttgggtttcgtggagtttagagacgtgagttgggtgggtaggcgtgggaagggggttattgttaaggttagttcggaggtcggtttaggatggggattgtttttttttcgttatagggttttggttttatttgaattttagcggtttttgttatgggtattgtttatgggaagttcgtagttgaggtatattgagttggtttttttttatatttttttggggtatggggtttggtttgtgttttgatttgcgttttgtggtttttagggtattttatatttttttggaggaggtagttaaggtttggggagagttaggtttgggttttagggtgaggagttttttgatttttttttcgggatatttattttttcgtgtggtatttatagtttaacgtttcggtgagcgttttttagagacgttttgtggttgatgttcggcgttgtgaggagttggagaagatttttagtgagttggttttaggtttatattttaggtaggttttttggaggaggtatgggttaagtttgatttgaaaggaagagtttgggtttgttaggtggaaggtagagaagggaggtatatgtagggttttgtagggttaagatagagtagttgggatttgtgaagtgtgtttgcgaaggtggttgttttgtgtgggttgagtagagggtttagggtagggttggttggggaggtttcgaatatagtataagagtttaggatttcgttttgtgggcgttaggaagttataggggtttttaagtagggaagaggtatagatagtttttttttttatagttgggttggggtgggtggggtttaggatttagggtagggtatttttaaggagtaggtaaaagggatttttgttttgggtaattttttttaggaggagtttgtgggggtattaaggtaggggtatggggtaggtagggttttgtgtttgttggtgtagtttatagttttttaatgattaggtagatataggatttacgttagtttcggttttaagttttgtagt

SEQ ID NO: 1368 - DNA, 5930 bp, Artificial Sequence
  chemically treated genomic DNA (Homo sapiens)
gttgtagggtttgggatcggagttggcgtgagttttgtgtttgtttgattattgaaaagttgtaaattgtattagtaaatataaaattttgtttgttttatgtttttgttttggtgtttttataggttttttttgagaggggttgtttagggtaggggttttttttgtttgttttttaggggtattttattttagattttgggttttatttattttagtttagttgtagaggagaaagttgtttgtgttttttttttgtttagaaatttttgtggttttttggcgtttataggacgaagttttgggtttttatgttgtattcgaggtttttttagttagttttgttttaggttttttgtttagtttatataaggtagttattttcgtaagtatattttatagattttagttgttttgttttggttttgtagggttttgtatatattttttttttttgttttttatttggtaaatttagatttttttttttagattaaatttggtttatgttttttttaggaagtttgtttggaatgtaggtttgggattaatttattgaaggttttttttagttttttatagcgtcgaatattaattataaagcgtttttggaaggcgtttatcgaggcgttgagttgtgggtgttatacggaggggtgagtgtttcgggaagggggttagggagttttttattttagagtttaggtttgattttttttaggttttagttgttttttttagaaaggtgtggagtgttttgggagttataagacgtagattagagtatagattagattttatgttttaggagggtatggggaggagttagtttagtgtgttttagttgcgggttttttatgagtagtgtttatggtaggggtcgttggggtttaaatggggttagggttttatggcggagggggggtagtttttattttggatcggttttcgggttaattttggtagtagttttttttttacgtttgtttatttaatttacgtttttgaattttacgaggtttagttcgtttagtcgatttacgtaggtgtaggtagtcgttgtgggtagaaagagttggattagggttattttttcgtttcggaatatggagtttatggttttgtgggtggatacggatgggggttagttaggggtagattatagatagtttttaattacgggtatttgtgtatttttatttattgaattttggaagttgttgttattatttttatttgatagaggtggaaattgaggtttgggtaggtttgatgcggtgttgaggttacgtagaaagtaagtagtgggattgggagatttcgaagtttatttttaggtcgattttaagtttttttttggtttgttttgtttatggggattttcgtttttatttttagcgttttttagtgatatcggttttatttttatttttattttggttttttttttttcgggttgtcgttattttagataggattttattggtttaggtatttaggtttagggttgtttcgggggtggttggagttttcgttgttcgttgtggagttgtatgtgttgagtggtaggagcgggtatttttatcgggtattttggggttagttaggaagtattgttgtgggggggttgttttttgaggttcgggtcgttcggtagtagtcgtagttttttaggtgttgaaattaataaaagtgaaattatagaatggcggggaagggttcggggttttgtttaaggtcgatgtggggtgggggtaggtgttaggttatttttaattcgttttggatgttggggtttttttagttttaaagttattgtttttagggtttagggtttttttgtgggaattagttgtttagttcgaaaattagggggaggggataggtttggttagggtttcgtttgtttagttagttatttttttttttgggtttggtttatttaattttaaatagggaaacgtagttttagttttagtttgggaaaggagagaaggagggaacgagggaatattgagtagatggtttaaggttgtaggtgggtagggtagggggtagcggggttgggttttatttttaaggattaggttcggttatagggtagagggatttggagtttaggttgagattgggtgtgtgattttgggtaagttttttattttttttgtgtttttattttttttttgggtgaatgggacgtggtatttttgatagagataggatttagggaggtgataaaaataattagagttttaattgaatttttttatttatacgattttatattaatttttggggggagaaatttttggggagggggtacggtgtttttgttttatataggattttattgatatttggagaggtaaagtttaatgttatgtgtttagtataaagggtgagtttagaggaggtttgttttgatttggtttttttttttgtttggaatgtttgcgtttgggaaagatgtttttgtaggttttggtttaggtttattgtttgtgaagttttgtttgattttttttagggtgagttttttattatttttttttgtgtttttatagtatattgtgtggatttttgtattacgaattattatattaaattagaataggtttaagcgatttttatgttttagttttttgagtagttgggattataggtatgtgttattatatttgattaatttttgtattttaagtagagatagggttttattatgttggttaggttggttttaaatttttaattttaggtgatttatttatttcggttttttaaagtgttgggattataggcgtgagttattgtatttagataggattatttttatttatttatttataggttttaaagtatttttaaaaggttataattaatttatcgttttatgtaaagtttttaaaagagatagtaagttgaatgatttatttagttattttttggtgaggaaggggtggtaggaagaagagaatgttatttatgttttttaattttttttttttgtgtgtatttttttttttttttattaaaaaatggatggtataattttttttttataaaaaatttgtatttttatttatatattattttagtttagtagttattattatatttaatatagtatttatttttattttatattatgatttttttgtgtgtgtgtgtgagatgaagttttattttattgtttaggttggagtgtagtggtgtgattttggtttattataatttttgttttttaggtttaagcgattttttcgttttagttttttaagtagttgagattataggtatttgttattagattcggttaatttttttgtatttttagtagagattgggttttattatgttggttaggatggttttgaatttttgattttaaatgattcgttttttttaattttttaaagtgttaaggttattaatgtgagttattatgtttggtttattatattatttataattgataatgatttggttttttaaatagtatttttaatttattttgttattgatgatatgttattttttgtagttgatttattattttttaaaatttgttttatagtagtttatgtagtattggacgtttaaagatattttgaagataaatgttttgggtgttaaagatgttttaaatgatatttttttttttgagacggagtttcgttttgtcgtttaggttggagtgaagtggtacgatttttgtttattgtaagtttcgtttttcgggtttacgttatttttttgttttagtttttcgagtagttgggataataggcgttcgttatcgcgttaggtaattttttgtatttttagtagagacggtgttttattgtgttagttaggatggttttaattttttgatttcgtgattcgtttattttggttttttaaagtgttgggattataggcgtgagttattacgtttagttaaatgatatttaaatgataattatatgtgatttaatgatattttttttatgtcgtttttatttatttttattatatatagattttagggaaaattgaggtgttgttttgtttttattttttaaatggggttttattcgtttagttataaatttattttttttagtattagagaagttttttattaagtattggttaaataagtttattttgtttgatggtttaaataggttaaaagaaatatatttgttatattgtggaatattaggtaatttaaagtaggtttttgaattttaaaattatataatataaaatataataaagggatatttttttttttttggttttggagttgttttattatttattgattttttttattgtatttttattttatgagatagagtttcgttgtcgttaggttggggtgtagtggcgcgattttggtttattgtaatttcggttttttgggtttaagtgatttttttgttttagttttttaagtagttgagatttataggcgtatattattatatttagttaatttttgtatttttagtagagaaggggttttattatgttggtaaggatggtgtcgattttttgatttcgtgattcgtttgtttcggttttttaaagtgttgggattataggcgtgagttatcgtgtttggtttattttatttttaaagtatgaagtagaatattttgaaaatttgtgttttgtaatatgaatatttattgttttttatagttttatttaaaatataaagtttaaatagtcgggcgtggtggtatatatttgtaattttaattatttcggaggttgaggtgggagaatcgtttgaatttaggaggtggaggttgtagtgagttgagattgtattattgtattttagtttgggtgatagagtgagacgttgttttaaaaataaaaaataaaataaataaaaaaattttaaagttttaaattgtaattttgttagaaaagtaatatttgaaattttgtattaaatgtatttattataaaaataatatacgtttttaagtattttttaaagtatagaaataaagtaaaaatgaaagttttttatttttttattttattttatagttaatataatttagatttttaggaatttagtttttaaatttaaaagtttttggttaattaaaaaattttttttaggttggttatggtggtttatgtttgtaattttagttttttgggagattgtggtaggaggattatttgagtttaggaatttaagagtagtttgggtaatatagtgagattttgtttttataagaaaaaaaaaaaggttaggtatggtggtatatgtttgtggttttgttatttgggaggttaatataggaggattgttcgatttggggaggttgaggttgtagtgagttttatttttgttattgtattttaatttgagagatagagcgagatttagtttttaaattttttttttaaagttttattttttaaaagttaattttaaaatagtaagtatgttttttttattaatgttgttattgtagttttatttgttttttatattataggttaatgaatatatgattttaatttaagatttttttgaaatagatttagttttttagtttttaggatatgtaaattttggtttcggaaaataatttatttttttattaatttggtattatttttttgagttgagtattgaaataatttttaggttatcgtatttattttgagaataggaggatatggtgtattattcggatttaatttagtagttgtgatgtttatttggttttggagtggtatgaatttttttattgtgtagtttgtggtttcggagatttttaatatttattttggttattttattatatttaattttttaggagagaaataatttttaatataggggtggtatttgttataatttttggtttgttaagtttttgttgatgatgaagttatgttttattttagga

SEQ ID NO: 1369 - DNA, 5641 bp, Artificial Sequence
  chemically treated genomic DNA (Homo sapiens)
ttggttgaagttgtattttttgtattgaggttttatttagtgaggaagagtgggttagggttaggtttgaagaggtgttttggttatagtcgattataggggtgtgttgggttgtggtggatatattttgggattaagttaattagttttttaggtttcggtaggggaaaagtgtgggttggagttatagagatggttgtcgttttttttttatttagggagtttagtgtgttaggtagttattagttttaatgttgggtgttgttttttttgtaaggagtttaaatagtttagatagtaggtagttgtagttatggtgttagtttttttttttttaaggaatttggtaggtttaagtagattttagttgagaggttgttgagaatttgtatagttttggggttggtattttaggtattagtggtatgggtttattagtggaattttttgatttgtgggttgtagagttttatggaaaaagtatgatttttttggttgggtagtatgtttatttattattttttttggtttgggggtggggattcgtatttagagtttttttagtatacgattatattattggtaaatagtattaatttgatttttttttaatttggatgttttttattttttttttttgttttattgttttggttaggatttttagtattatgttgaatagaagtaatgaaagtgggtatttttgttttgttttattttttagtaggaatgtttttaagtttttttaaagtttattgtaaaatggatattatagaaatagaaaagattattcgagattattgtgaatatttttacgtatataaattagaatatttaatagatatggataaatttttggaagaatttttttggaagtatattattttttataatatggaaatgaagtaatatatggaaatgaaatatgttttttaattttttttgttatttattgttaattttattttattgtagtgggaaaatatattttgtattttttttagttttttaatgttatttgggtttattttatggtttagaatatggtttattatagagaatgtttttatgatatttgaaaataattttttttttttgttgttgggtagagcgttatatagatatttgttaggcgtagttaatttatagtgtggattaaatttttttttttttgttgatttttttagttgttttatttattattgaaagtggtgtgttgaattttttaaatattgttgttgaattatatatttttgtttttatttttattagttttttttacgtatttgggtgtatatatgtttataattgttatattttttttatagattgatttatttgttattataaaatgttttattttatttttagttagattttttgatttaaattttttttaagagatggggttttgttatgttgtttaggttggttttgaatttttggttttaagttatttttttattttagttttttaaagtgatgagattaataggtatgggttattaggttagtataaattttattttaatttttaaagttattttatattttaaggttaaagtatagttatttcgttttttttgtggtttttgattgtatggtatttttttttatttttttatttttaattttgttgtatttgtgaattaagtaggttttttgtagaatgtatataaatgaattatgtttttatttattttgatagtttttgttttttgattgaattgttttatgtatttatatttaatgttatgattgatatagttagatttatgttttttattttattttgtgttttttatgtgttttatgttttttttttttttattttttttgtttatttttttttttattaagttaatatttttttatgttgtattttaatttttttaataatttttttattttatttttgaaggtaatttttagtggttgttttaaagtttattatatatattttattagaattagttgtagatttatattaatttaagtttaatgatatatagaaaatgatttttatataattttattatttttttttttttgtagtattattgttatagatgtaatatttattaattttgataatttattgttataattattattatattttttgtagttatttttttagtttaattttgtttttatttagtttttttatgttgtaatcgataaatatgttatatatatatttttatatgttatggttttaacgatatattatatatatattattttatataaatggtgtttaaataagttataagaaaaaataagaaaatatgaatttatattgttatatttaatagatatatgtaaaatattatatagatatatagattatattaatatatatttatatatttatatatatttataatattatatttttatattttattattgtttttttttttttgtgtatgtggatttaaattattatttgaggtaatttatttttaatttaaagaaatttttttagtagtttttataagataggtttgttagtaaaaattttttgtgtttttgtttatttgagataatttttatttggtttttatttttttaaagatagttttgttgaatattagatttttatttgatgggttttttttttaattattttgaatatgttatttaattgttttggagttttttttgtttttgttgagaagtttgttgtttatattattaggttttttttgtaagtaaaaaattttttttatttgttgattttaagattttttttttgtttttgttttttagtttttttattatgatgtgtttatttgtgaatttttttgtatttattttgtttaaagtttgtcgagttttttatatgtgtagttttttaaataaatttattacgtttttagttattttttttttggattttttttttgattttttttttttttgttttttagtatttgtattttatgtgtgttggtatgtttaatggtgttttatatttttttgagtttttgtttatttttttttattttttttttttttttattttttagtttgatattaatttattttaaagaatgttattttttttgttagtttaatattattatttagtttgattaataaaatttttattttagttattgtatattttgattgtaggatttttatttggtttttttttatttattttttttattgatattttttatttgttatgatatttttattgtatttttttttatttttttaattatgtttttttttagttttgtgaaaatatttttaatggttattttgaggtttttttaaagaaggttgatattatattgtgtttataggtagtttttgttgtttgattttttttttatatgtggattatattttgtttttttttatggtttataaattttgttggaatatggatattttagataatttattgtaataatttagggtattagttttttttaatggggttggttattggtatttatttatttgtttagtttttatagttattgagaattgttagtagtattggaagagattttattttttttttgatcgtatttagttgttttatatatattatatttttttatatttttatatatatatgtttttttttttttttttgattttttaaatattttattttatatatattaggttttcgaaggaaaaaaaggtatattatagtattttaatttttagtatgttttaaatgtgtttgataagatataaaatattgttcgaattagtttttcgaaattaattatatagttattttaatgtgttattttttgaataatgtaggttttatttgttaatatagagtgtatttatgtagaatttatcggttaatatatagtgtatttaaattaatttgttaaattttacgtttttgtgtttatttgtgaagtttttattgatttgtttattttaatattattattatattgttttagaatttttaatatttgatgtgtaagtattattttgttatttttttatttaatgtttttttagtttatttatatgtttatatttagatgaaatttagattagttttatttttttaaaattttgttataattttgatatttagtaaatttttaattaatttaaaagagtatatagtttggtgatatttttttttatattagaaattttgatatgtttattaatttatttaatttttattttattttttattggagaatttgaaggtttcgtttgatttttgttaatatttgagtgttatgatttatttgttgatagtggggatgagatagttttttattataatattttttttgattttcgttaaatataataataataggtaatatttttgagtgttaattgtttattaattttttgtgttaagtattttattatttaatttttttttattttataatttatgattcgtatgaagaaattgagttttaaggaattttggaattttatttgaggttttatagtaagtaagtggtagtgcgtattattttattagtagggaaagatttgattttaagtattttaaattttatttttagtagttttttagtggatagttttattttttttagatagattattatattaataaataataattgtttttattttttttaaatatttttatttttttttttttttgaattatttatattgtatgtatttatattaattattttaatatatatatatattataatatattaattattaaatattttaagaatagtgtaagatgataggattgaaaataagaattatatattatttttttaatattgagttttttagttttgaagtagttgaaataattatatcgtataaaaattttgttatattttttatttttttatttttaaaaattataaaattgggtgtaagatatttttaattttaagaaaatgttgattttgtttatttttatgtttttatttaattaaggatttttggtaaatatttgttggtgttaatgttaaaagagagttggggaaatggatggaggtaattagagtgaaggtttagagtttttttttttggggatgttagagagttttgagtagtagcggattttgttttggatgtttttgtttatgtatttggttacggtggtgggaaatgtgtttattattttggttattagttttgattttcgtttgtatattttcgtgtatttttttttggttaattttttttttattgattttttttttgttattaatataatttttaagatgttggtgaatttttagttttataataaagttattttttatgtagggtgtttgatatagttttattttttggtttttttggtggttttggataattttattttggttgtgatggtatatgatcgttatgtggttatttgttgttttttttattatattatagttatgagttttaagttttgtattttatttttttttttgtgttgggttttattcgttttttatggttttatatatattttttttatgattagagtgattttttgtgggttacgaaaaatttattatattttttgtgagatgtatgtattgttgaggatggtatgttttaatatttagattaattatatagtgttgattgttataggttgttttattttttttattttttttggattcgt

SEQ ID NO: 1370 - DNA, 5641 bp, Artificial Sequence
  chemically treated genomic DNA (Homo sapiens)
acgaatttaaagggaatgaggaagatgaagtagtttgtggtaattagtattgtgtgattaatttgaatgttggaatatgttatttttagtaatatatatattttatagaagatgtagtggatttttcgtgatttatagaaggttattttggttatgaggagggtgtgtatgaggttatagaggacggataggatttaatataaggaaaggagtaagatatagagtttagggtttatggttgtggtgtagtggagggggtagtagatggttatatagcggttatatgttattatagttaggatgaggttgtttagggttattaaggagattaggaagtagagttgtgttagatattttgtataggagatggttttgttatgggattggaggtttattagtattttggggattgtgttggtgataaagaagaggttagtgaaggagaggttggttaggaagaagtatacgggggtgtgtaggcgggaattagagttgatggttaggatgatgagtatattttttattatcgtgattaggtatatggataggaatatttaaaataggattcgttgttgtttaggattttttgatatttttaggagaaggaattttgaatttttattttggttgtttttatttatttttttaatttttttttaatattaatattagtaaatgtttattaaaagtttttaattgaataaaaatatgaagataagtaaaattaatatttttttagaattaagaatgttttatatttaattttataatttttgaaaataagaaagtgaaaaatataataaagtttttatgcgatataattattttagttattttaaagttgggaaatttaatgttaaaggaataatgtgtaatttttatttttaattttgttattttatattatttttgaagtgtttggtgattagtgtgttatgatatgtatatgtgttaaaataattaatatagatatatgtagtataagtagtttaaaaaaggaagaaaataaaagtatttgaaaggagtaggaataattattatttgttgatatgatgatttatttgaaaaaagtgggattatttattgaaagattattagaaatagagtttagaatatttgaaattaagtttttttttgttagtaagatagtacgtattgttatttatttgttgtgaaattttaggtagggttttagagttttttaagatttagtttttttatgcgaattatgagttatagggtgggggaaaattaagtagtaaagtgtttaatataaggagttggtaggtaattagtatttagaaatgttgtttattattgttatatttaacgagaattaggaaaaatgttataatgaaaaattattttatttttattgttaataaataaattatggtatttagatgttaataagaattaggcgaaatttttaaattttttagtgaggggtaaagtaaaaattaaataaattgataaatatattaaggtttttaatatgaagagaagtgttattaagttatatatttttttgaattaattgaaagtttattggatattaaaattataatagggttttggagaaatgaaattggtttaaattttatttaaatataagtatgtagataagttagaaaaatattgaataaaagaataatagggtgatgtttgtatattaaatattaagaattttaaagtaatatgatagtaatgttggaatgaatagattagtagaaattttatagatagatataaaaacgtggaatttggtagattaatttgggtgtattgtatattagtcggtaaattttgtatgggtatattttatattagtaagtaaagtttgtattatttaagaaatggtatattgagataattgtgtaattaatttcggaggattagttcgaataatattttgtattttattaaatatatttaaaatatattaaagattaaaatattatagtgtgtttttttttttttcgaaagtttaatgtgtatagaataaaatgtttaaaaaattaaaaaagaaaaaagaaatatgtatatgtaaaaatataaaaaaatgtagtatatataaaatagttgaatgcggttagggaaagagtaagattttttttaatattattgatagtttttagtgattgtgggaattaagtaaataggtaaatattaataattagttttattaggggagattagtattttgaattgttataataaattatttaaaatgtttatattttaataaaatttatgaattatgaaaagaaataaagtatgatttatatatgaggaaaaaattaggtaatagaaattatttgtgagtataatgtgatgttagttttttttgaaaagattttaaagtagttattgaaaatatttttataaaattaagagaaagtatgattagggaagtaaaggaaggtatagtgagaatgttatgataaatggggaatattaataaaaagaatggataaaagagagttaaatggaaattttgtagttaaaatgtatagtaattgaaatgaagattttattagttaggttgaatagtagtattgaattagtagaaaaaatagtattttttaagatagattgatattaagttgaaaaatagaggaagagaaaaaatgaagaaaaatgaatagagatttagaaaagtgtggagtattattaagtatattagtatatatggaatgtaagtgttgaaggataggagagagaaaaattagaaaaaaaatttaaagaaagaatggttgaaaacgtagtaaatttgtttaaaaaattatatatataggaaattcgataaattttaggtagaataaatataaagagatttataaatagatatattatagtaaaaaggttgaaaggtagagataaggagaaaattttgaaattagtaagtaaaaaagattttttatttataaaggaagtttaataatatgaataatagattttttaatagagataaaggaggttttaagatagttggataatatatttaaaatggttgaagaaaaaatttattaagtaagagtttaatatttagtaaaattatttttaaaagaatgaaggttaaataaagattattttaggtgaataaaaatatagaaaatttttgttagtagatttattttataaaaattattaaagaaatttttttaggttgaaagtaagttattttagatgataatttgaatttatatgtataaaaaggaaagaatagtgataaagtatgaaaatgtgatattataaatgtatgtaaatatgtaaatatatattgatataatttatatatttatgtaatattttatatatatttattaagtatgatagtataaatttatatttttttgtttttttttataatttatttaaatattatttatgtaagataatatgtatatgatgtatcgttgaggttatagtatatagaaatatatgtataatatgtttgtcgattatagtataaaggagttgggtggaggtaaagttggattaaggaaatgattatagaaggtatagtagtaattataataatggattattaggattaatagatgttatatttgtaataataatattataaaaggaagaaaataatagaattatatagaaattattttttatatattattggatttaagttggtataaatttgtagttgattttgataagatgtatgtggtagattttagagtaattattaaaaattatttttaaaaatagagtgaaaaaattattaaagaaattaaaatgtaatatgagaaaatattaatttaatggaaaaggaagtggataaggaaaatagaggaaaaaaggatatgggatatatagaaaatataaagtaaaatgggagatataaatttaattatattaattataatattaagtgtgaatgtatagaataatttaattaaaaggtagagattgttagagtggataaaaatatgatttatttatatgtattttatagaaaatttatttgatttatagatatagtaaggttgaaagtaagaggatgggaaaagatattatgtaattaggaattataagaaaaacggaatggttgtattttagttttaaaatataaaatggttttaaagattaaaatagagtttatgttgatttggtggtttatgtttgttaattttattattttgggaggttgaggtaggagaatggtttgaggttaagagtttaagattagtttgagtaatatagtaagattttattttttaaagagagtttaagttaaaaagtttgattagagataaagtgagatattttataatgataagtgggttaatttatgaagaagatataataattgtaaatatatatgtatttaaatacgtgaagggaattgatagaaatgaagatagaaatgtgtaatttaataatagtatttggaaaatttaatatattatttttaataatggatagaataattagaaagattaataaggaaaaaaagatttgatttatattgtaaattaattgcgtttaatagatgtttatgtaacgttttgtttaataataaaagaagaaagttatttttaagtgttatgggaatattttttatgatagattatattttaggttataaaataaatttaaatgatattaaaaggttagaaaaaatataaagtatgtttttttattgtagtagaataaaattagtaatgaatagtagaaaaaattgaaaaatatgttttatttttatatgttattttatttttatattgtggaggataatatatttttaagaaggtttttttaggaatttatttatgtttgttaaatgttttagtttgtgtgcgtagaggtgtttatagtagtttcgaatgattttttttatttttgtggtgtttattttataatggattttaaaaaaatttgaaagtatttttattgagaaatggaataagataaagatgtttatttttattatttttatttaatatagtattagaagttttagttagagtaataagataagagaaagaaataaagggtatttaaattggaaaagagttaaattagtgttgtttgttaatggtatgatcgtatgttgagaaagttttaaatacgagtttttatttttaagttaagggaggtggtgagtgagtatgttatttagttagggaaattatgttttttttatggaattttgtaatttataaattagaagattttattggtgaatttatgttattggtgtttagggtattaattttagagttgtgtagatttttaatagttttttagttagaatttgtttaagtttgttaagttttttgagggagagaaaattagtattatagttgtagttgtttgttgtttaagttgtttgagttttttgtaggaggggtagtatttaatattgggattgataattgtttagtatattaagttttttgggtgggggaagggcggtagttatttttatagttttagtttatattttttttttgtcggagtttgggagattggttgatttggttttaaaatgtgtttattatagtttaatatatttttatggtcgattgtggttaaagtatttttttaggtttgattttgatttatttttttttattgggtggggttttaatgtaggaagtataattttagttag

SEQ ID NO: 1371 - DNA, 5508 bp, Artificial Sequence
  chemically treated genomic DNA (Homo sapiens)
ttttgtaataatttaataatagtgatatttattagttatttgttaggttttagattttgtgttaaatgttatttatataatcgtttatggtagtaggtattattgtttttattttgtaaatgaggaaattgaggttttgggaagttaagtaatttgttcgagattttataggtagtaatattattgttagaggtaagattgatattgaggtttgttgggtttttaatgtttgtttcgagggttgaaaatttttcgattttttgagttttggtttgtttttaatagagtatagattggttgttaggttttggtcgaggtgttgggaatagggtatgggttttgtttttaagatatttcgtttaggggtagttacgtatataaatacgttatattgagttgtttagtttagtttagggtttatagtttttttatttttagttgtatttttagtgtttagtatatgagaggaggaagaaaattttcggtagtagataatggttttttatttgtaggtaatgtgaggattaggttagttttttttttaaaattgggaattcggattttgtttgtgcggtgttcgttgtgggtaataatgttgtttttttttatgttcgttttgttagttttagaggagttagttatgttcgtagttttttaagttgttttttcgttgatttgtttggatttttgggtttggtttttttggattagttttaagaataggtttgttaggatgttttgggatagtatttcgggggggttttaggggtgcgggtcgggggatggggtatttgttgtatggtttttatttattaggattttgtttggttttttgttagaggtttatgattcgtttgttttttaggatttaatattttataaatttaaagtagttatgaaatttttgtttttttgggttagttaggtaggggttttttaatagagtagtttttattttttttattcggtattttttaaatgtttgattgtttttttgtgggaagtttaggtttttgttttatttttgtgtttttgtaaaataaattaagaggggatgggaaagagcgaatatgtatgaagtatttttacgtatcgtgtattatttttcgtattcggaatagtgttaggaagtagggaggtatttttattgttttttattttgtagatgaggtttagagagattgatttgtttagaatttatatatttgaagattgaatgatagttatatagataaagtgttaggtatagggtttggtatataggaagtgtttaatacgttgaagtcgttgttataatattgttattatttagaaaatgttttaattaatttttaaaaataagttgttgtaaaaattaagtatttggttattttttgtgaaatgttagttgtgattttatatttagtgttttattttttttattttatattttagaaagttttttgaatttagggaattaggggtaggtgtaggatttattatgcgtagtgttagcgtggtgttgggatgtacgggagattcgggttttgtttatagttatatgttttggaggttttgggttggaggggaaggtgcgtggtttttggagttatataattagagcggatattttaggttgtagtagtaagatacgtgtggttttcgttgaagtgattattttaaaattgtttttagataagaaagtgtggattttagaggtaatttttttatggtagttaattgatagttgggtcggttttattgattgagtatataaattttggtttatttttggtttaaggttttattttattttggttagggtttgggggatagggagcggattttatggataaaatttatttatttttttattttttttaatttatttagaattttttggttgtaaatttgggtttttttaaagttatttttgtatttttgaattatataaggttttttcggtttagtttttattttttttagtagggaagaaggtggggtttgaataagaaattgatgggtttttttaggtgatttttttaggttgtttattttcgttgcgcgtgtgcgtgtttgtttgtttagggagacggtaaggattggggttatttagaagaattttttggaatttagaggtaagttgttatttagcggagtttagtagagtagtaggagttgtagcgtgtgtttgtgtgtgtatttttttagaaaaaggtaaggaggttttttagaagatagtaaagaggttttcgttttttcgattttaattagtttttttggcggaggttgttacggtatttttgttttagttagcgggtttgttttattttttgaaatagttttagagtttcgaaagatgggtatagatggtttttttttagtttagtttaagttatttttcgtttaattttagttttttaaacgtggtagttttttagtttgtttttggcgcgggaagaatgtgtggcgtttttagggatgttggtagcggtttcgttgtttggttttaaaattagaattatttggtggagtgagggaagttagaacggtgtttagagagaggtagcgtttttttcggtataattttatgttggttgggtgattaggtacgggtgggagatatttgggagatgagttttaggggaaggagcgggagggttgggttttcggatttacgttgttttttttgttttcgggaatgtgttttatagggatttatgggatttattggtttggtcggggagttaggaatcgtgggagaaaaggtaagtggtgttgaggggaaaagataaataattagagtttgtgttttgaaattgtaaaaaggtgaagaggttttttgatttggggattttagaatatttttttttagttttttttttgatttggtattttgagtttgttaagagatattgtttttttttttggtattttttggggttttatttttgttttattgttattagttttaagtatagttagagttttgtgtgataattagtagatgtatgtgatttgggttttttatagttgtttattggttttgtataggggtcggcgagagtagggaggaaaagatttatttttataaagaggaaagatgaggttgttttgttaagtttttgttttagatgatataatagaggtttaaataggggaggtgatttattttaggttatttagataataagcggtagtgttgagatttgaattaggtttattgttaaaggttagttatattttgtttattaagatattttgttttatgttggtttttagtttttattaagggttttggaggtatttgtttttttttgtatgggtttattcgatttttagagtaggttttttgggagaattaatattatttttattgaatagatggaggaattgaggtttagagggaggaagtatttttcgtaagtttggtttcgtttaattttttaggatttttttgtgttatattttattattttatgtggtttagattttcgggtttttgtttttttttttttttttttttttcgtttttttttttttttttttttttttttgttttttttttttttaaatttagttttttatgttggggattataggcgtgagttatcgtggtttggtcgatttggttaatttttaaatatttttgtgtaaagatagggttttattatgttgtttaggttagttttgaattttaggatttaggtgatttttttattttgggtttattaagtttttaattataaattatattgaaatatgaaagttatttagaatgaaatgaataagaatgtaaaattataattatattgtaagaatattttttgagtaattttagtattttgggaggtcgagacgggtgagttatttgaggtcgggagttttaggttagtttggttaatatggagaaattttatttttattgaaaataataataataaaaaaaattagttgggcgttgtggagggtattagtaattttagcgatttaggaggttgaggtaggagaatcgtttgaatttaggaggtataggttgtagtgagtcgagattgagttattgtattttagtttgggggacgggagtgaaatttcgtattaaaaaaaaaaaaaaatgaatattttttgaaagtatttatttatataaataaagatttgattcgtgaggtaggaatataaatgggttacggaattatttattttatagaatatatcgagtgtttttgaagtgttgggtattgttttaggattgggggcgtattggtgaaagagaagtaagttgtttgtttagatggtagggaatgggggaaaatagggagatagttttttgtttgagatgttgggagatgtttcgagtagtatatttattggaaatagatatttaatttggatgtttttttttggaaatgtgtttgcgtttagggttgggttggggttttattgaattttggttttgatatagttgttgttatatttagtggaattgaatttatgtttgtttttttcggtattttttattttaatttttttcgttataatatatattttatgttagtttggggatttttaaaggtggttttattattaggtttgtggttgggttttattgaagtaagttttggtatttagagggataggaattgaatgaagatatgagatttttttgcgggaggtttttttaggaaatttgtggatttatacgtttattaatgttgttgtagtttcgtatttattttggttttgggtagttatattttagggtttttgtaatttttttatgtgaggaatttaaattagatttgggtttggaggcggtgtttcgagttggtttttgggggaggttttgtgcgaggtattttttaagtgttggtaggattgtgttatagatatagagtaaatttttgttgggttttaagtgatcgtttatagtttattataaaggtgattgtattttgtagttattagtattgtttggttttacgtgttttttggttttagtatggcgttgttttgggtttttatagttttgagttttttatttttgttggaagtttagattttattgtgtgttaatttagtatcggtgtttattattaacgttattttggatcgggtgagtgtttgggttagttttgttttgagtatatgggtagttgttttttttttttgggtttttttttttttgttggttgtggtcgtatttttatttttagttttgttttttttttttttgggtttttagggtgaaatttttattagtttaggggattttggaggtattttttgtttttaaatatagaagttttattgtagagttttttacggaggacggttttgtgttgggtttggaggggttgtttggggggtaatgattgatttttagggtgagtttttgtatgcgtattgtttattaggggttttatttttttatttgtaaaattagggagagatttgtttgagtttttttttagttgatagttaaagatttagtattaagtttttattattagtttttattttttttttaga

SEQ ID NO: 1372 - DNA, 5508 bp, Artificial Sequence
  chemically treated genomic DNA (Homo sapiens)
tttggggagaaggtgggagttggtgatgggggtttgatgttgaatttttgattgttagttgggaggagatttaggtagatttttttttgattttgtagatggggagatgaggtttttggtgggtagtgcgtatgtaggagtttattttgaggattagttattgttttttaggtagtttttttaggtttagtatagaatcgtttttcgtgaaggattttgtagtgaggtttttgtgtttggaggtagggggtgtttttagagttttttgggttggtgagaattttattttggggatttagaagagaaaaaggtagagttgggagtgggggtgcgattatagttagtagggaaagggaagtttagagaagggaggtagttgtttatgtgtttaggatagggttagtttaggtatttattcggtttagggtggcgttggtgatgggtatcggtattaggttggtatataatgggatttgggtttttagtagaggtaggaggtttaggattgtaagaatttaggatagcgttatattgagattaggaggtacgtggagttaggtagtgttggtggttgtagggtgtagttatttttataataaattatgggcggttatttggagtttagtaaaagtttattttgtgtttgtgatataattttgttagtatttgggaaatgtttcgtataaaattttttttaaaggttagttcggagtatcgtttttaaatttaggtttaatttgagttttttatatggagaggttataaaagttttagagtatggttgtttaaggttaaggtgggtgcggggttgtagtaatattagtaaacgtgtgagtttatagattttttagagaggtttttcgtagaggaattttatgtttttatttaatttttatttttttgagtgttaagatttattttagtgggatttagttataaatttaatgatgaagttatttttgagggtttttaggttggtatgggatgtatgttgtggcggggagagttggggtgaaggatgtcggggaagataaatatagatttagttttattgagtgtggtaatagttgtgttagagttaaagtttaatggggttttaatttagttttggacgtaggtatatttttaaaaagggatatttaagttgaatgtttatttttagtaaatatattattcgaagtattttttaatattttaaataggaaattgtttttttgtttttttttattttttgttatttgagtaggtagtttgttttttttttattaatacgtttttaattttggagtagtgtttagtattttaagggtattcggtatattttgtggaatgagtgatttcgtggtttatttgtgtttttattttacgggttaagtttttatttgtatgaataaatatttttagaaagtatttatttttttttttttttgatacggagttttattttcgttttttaggttggagtgtaatggtttaatttcggtttattgtaatttgtgttttttgggtttaagcgatttttttgttttagttttttgagtcgttgggattattggtgttttttataacgtttagttaattttttttgttgttgttatttttagtagagatggggtttttttatgttggttaggttggtttggaattttcgattttaggtgatttattcgtttcggttttttaaagtgttgggattatttagaaagtatttttatagtatgattataattttgtatttttatttattttattttgaataatttttatattttagtgtagtttgtagttaaaagtttaatggatttaagatgggagagttatttgagttttggagtttaagattagtttgggtaatatagtgagattttatttttatataaaaatatttaaaaattagttaggtcggttaggttacggtggtttacgtttgtaatttttaatataaaaagttgaatttaaaaggaggaggagtagaaggggaaggaggaggagggggaagcgagggaggaggaggaggaggaaggtagaggttcgagggtttgggttatatagagtgatagagtgtggtataagaggattttggagagttaggcggggttagatttgcgggggatattttttttttttggattttagtttttttatttatttaatgggaataatattggtttttttagagggtttgttttggggatcggataaatttatataaaggaagataagtgtttttaaggtttttggtgggagttgggagttaatatgaggtagagtgttttagtgagtaaagtgtagttaatttttggtaatgaatttggtttaaattttagtattgtcgtttattatttgggtgatttggagtaagttattttttttatttgagtttttgttatgttatttaaaatagaggtttagtaaggtaattttattttttttttttgtaaagatgagtttttttttttttgttttcgtcgatttttgtgtagggttagtaggtagttgtgaggagtttaggttatatgtatttgttggttgttatataaaattttaattgtgtttgaggttgatgatagtagggtagggatagaattttaagggatgttaggaaagggaataatgttttttggtagatttagaatgttaggttaggagagaggttaggggagggtattttgaaatttttaggttaaagggtttttttatttttttataattttaaaatataagttttaattgtttattttttttttttaatattatttatttttttttttacgatttttggtttttcgattagattaatgaattttataaatttttatgagatatattttcgaaagtaagagaaataacgtgaattcggggatttagttttttcgtttttttttttgaagtttattttttaggtgttttttattcgtgtttggttatttagttagtatggggttgtgtcggggagagcgttgtttttttttgggtatcgttttgattttttttattttattagatggttttgattttgaagttaagtagcggggtcgttgttaatatttttgggagcgttatatatttttttcgcgttagaagtaggttgggaggttgttacgtttggagagttggggttgggcggggggtggtttaagttgagttgggaagaggttatttgtgtttatttttcggggttttggggttgttttaaagagtgaaataaattcgttggttgggatagaaatatcgtaatagttttcgttaagagaattgattggaatcggggaggcggaggtttttttattgttttttgaaaggtttttttgtttttttttgaaagggtgtatatatagatatacgttgtagtttttgttgttttgttgaatttcgttgggtgataatttgtttttgggttttagggggtttttttaggtggttttagtttttgtcgtttttttgagtaagtaaatacgtatacgcgtagcgagggtggatagtttagaggggttatttaggaaggtttattaattttttatttaggttttatttttttttttgttaaggaaaatagaaattgagtcgggagggttttgtgtggtttaggagtgtagaagtggttttggaagaatttagatttgtagttaagaggttttgggtgaattaggaaagatggagggatgagtggattttgtttataaaattcgttttttgttttttaaattttggttagagtaaaatgagattttgggttaggaataggttagagtttgtgtatttagttaataaggtcggtttagttgttagttaattattatgagagggttatttttgggatttatatttttttatttaaagatagttttaaagtggttattttagcgagggttatacgtgttttgttgttgtagtttgggatgttcgttttggttgtgtggttttaaagattacgtatttttttttttagtttaaggtttttaaagtatgtggttgtgaatagggttcggatttttcgtatattttagtattacgttggtattacgtatggtggattttgtatttgtttttggttttttgggtttagagaattttttgaagtataaggtaagagggatgaggtattaggtataagattatagttaatattttatagaaaataattaaatatttgatttttgtaataatttatttttaaaaattaattagagtattttttaagtgatagtaatattataataacggttttaacgtattgagtattttttgtgtgttaagttttgtatttggtattttatttatgtaattgttatttagtttttaggtgtgtgggttttgggtaaattagtttttttgagttttatttgtagaatgggagataataaaggtatttttttattttttggtattgtttcgaatacgggagatggtgtacgatgcgtagaggtattttatatatgttcgtttttttttatttttttttaatttattttataagggtataggggtaagatagaggtttgggttttttataagggagtagttagatatttagaggatgtcgaatgaagggaataaaaattgttttgttaaaaggtttttgtttgattggtttagagaaatagaaattttatagttattttaaatttatgagatgttgggttttggaaggtaagcgggttataaatttttaataagaaattaaataagattttaatgaataagagttatatagtaagtgttttatttttcgattcgtatttttgggattttttcggggtattgttttagaatattttggtaggtttgtttttgaggttggtttagagaggttaggtttagaagtttaggtaggttaacggagaagtagtttggaaagttgcgggtatggttggtttttttagggttggtaaggcgggtatgggaggaggtagtattgttatttatagcgggtatcgtataggtaggattcgagtttttagttttggggaggaggttagtttggtttttatattgtttatagataaagggttattgtttgttatcggaagttttttttttttttttatatgttaggtattggggatgtaattgagaatgaaagggttatggattttgagttggattagatagtttagtgtgacgtgtttatatgcgtggttgtttttggacggggtgttttgaaggtaagatttatgttttgtttttagtatttcggttagggtttggtagttagtttgtgttttgttagagataggttagggtttaggaggtcggagagtttttagttttcgaggtaggtattgggaatttagtagattttagtgttaattttgtttttgatagtgatgttattgtttgtgagatttcggataagttatttaattttttagagttttagtttttttatttgtaaaatgaggatagtaatatttattgttatagacgattgtgtagatagtatttggtatagagtttggaatttaataggtgattaataaatgttattgttattgggttgttgtaaaa

SEQ ID NO: 1373 - DNA, 6656 bp, Artificial Sequence
  chemically treated genomic DNA (Homo sapiens)
gttgggattataggcgtgagttattgtttttggtttttgtgtttaattatttgcggaattgttaaattgttttttaatttggtggtattatttattgtagatttttattagtaatgttttagggtttttatttttttattttttcgttagtatttgtaattgtttatttttgattatagttattttagtgaatgtggaatggttttttatggtggttttgatttgtatttttttggtgtttagtatttttttacgtgttttttggttatttgtatatttttttttttttggagaaatgtttattaaaattttttgtttatttttaaattggattgtttgttttttttattgttgtttagttgttattgtagtttaaaaagaggaaattgaggtttagaagggggatatgattggtttagggatattgggtttataggtagattgagatggaatttgggttggtttttattttttatttagtagattgggggttattttttttttttttattagagtatttttttttagtttttagtttcgatttggttttgttaggttattttaggttttatttttgtatttaaaggcgtagggttttatagtagagggtaagtcggaaagcgaggaagtagtagttttgaggaattaagttggttttttttttttttttaaattacgcgggtttggttgacgtggttcgggaagaggggatagttcgggttttgtggtcggggagtttatttatattggttgggttatgttgtaagttttttttgttggtgagagggacgttattgattgttgattttattagaaacgttgacgtatttttttttacgtttggttgggatggttagcggttaggtttttttattttcgagttattttttgtttttttgtgtattattttattttggatgtttcgatagtggttttagtttttgtgttttttagttatgttttttttttgtaggttgtatggattgaatggtgttttttttgaatttatgtgttgaagttttaattatcgtgtgttagaacgtgattgtatttggaagttgagtttttaaagaagtaattaagggtcgggtgcggtagtttacgtttgtaattttagtattttgggaggttatggtaggtagattatttgaggttaggagttcgagattagtttggtttatatggtgaaatttcgtttttattaaaaaaatataaaaattagttaggtatggtggtgggtatttgtagttttagttattcgggaggttgaggtagagaattgtttgaatttgggaggtagaggttgtagtgagttaagttggcgttattgtattttagcgtgggtgatagagtgagattttattttaaaaaaaaaaaaaaaagaaaagaaaaaaaaaaagaagtaattaaggtaaaattggttaggtgtggtagtatatatttgtaattttagttattttggaggttgaggtaggaggttcgtttaaggtcgggagtttaaggttgtagtgagttatgaaagtattattgtatatttaagtttgggtaatatagtaagattttgtttcgaaaaagaaaaaaaaaaggaataattaaggtaaaatgtgagtgggttttaatttaatgtgaatggtgtttttataagaagagataaggttaagcgcggtggttcgtttttgtaattttagtattttgggaggttgaggtaggtggattatttgaggttaggagttcgagattagtttggataatatggcgaaattttgtttttattaaaaatataaaaattagtttggcgtggtggtatacgtttgtaattttagttatttaggaggttaaggtaggagaagcgtttgaatttaggtggtagaggttgtagtgagttgagatcgtgttattgtattttagtttgggtgacggagttagattttgttttaaaaaaaaaaaaaaatcgattaggttacggataagtagaaggaatatgatgtggagatacggggagagatagttatttataagttaaggagagaggttttgggaattagtttttgattttagattttagtttttagaattgtgagaaaataaatttttgttacgtaagttttttagtttgtggtattttgttatgggagttttagtaatgtaatttatttgttttttttatttttagtgattttgagttttgggttttgtgtttgatatttttattaattatgtgtaaagagtatggtttttgggtttcgtttgaatgttttttttttttggtgggttttttgttttttgttttttttaaatagggttttgttttgttatttaggttggagttttgtggtatgataatggtttattgtagttttaattttcggggttcgagcgatttttttgttttaatttttttagtagttgggattttaggtatgtattacgatgtttggataatttatttttatattttttgtaaagatatagtttcgaagttttgggtttaaatgatttttttgtttcggttttttaaagtgttgggattataggcgtgagttattatgtttggttaaatgtttttttttttttaattatttataggtgattttagataaagtaattttttttttttgttatgaggagatagtacggtttttttggattataggatagatagaataagataaaggtatgtggttgttttttattaagcgtggtggtcggttagttatagttgaaaatggtttagatttttttgtttagatttggcgttttttttttgagttagtttttaaattttttagagtttcgagttttttattgaagtgagttgaggtgttattgtttagcggttttttttttttggttgttgtaggatgagatcggtggttgggtgttgtggtttacgtttgtaattttagtattttgggaggttaaggtaggaggattatttgaatttaggagtttgttattagtttgggtaatatagtgatatttcgtttttataaaaaataaaaaaattagttgggtatagtgatgtatgtttgtggttttagttatttaggagattaaggcggggagttttgttttagtttaggagttggaggttatagtgagttatttataatggcgttattgtattttagtttgggtgatagagtaagattttgtatttaaaaaaagagaaaaaaagacgagattagggatgtgaaatggagaaggatttttttttggtatggttttaggaaatagtattgtgggggtgggtatagagatgaggattttagcggaagcgatatttttaggatgagaatttagaattggtttttgggggtggtgagggggaggtatgaggtttggtgtggtgagttttagtttgggtgtcggggagtgggtaggggttgaagagtagttttttgggcgtggggtcgtttatttttgtttattacgtgatttttagatttgggagtggttggtgtagtatggagttaaataaaggtttgtcgaatgaataaatgagtgatggggagaatgggtggtaattgttttggtggttatagtgggtatcgggagtaggtatggataggggtgtatttaatttttttttttttggttgttttagttttttttgtttaggcgttttagattttatgttttttttagttggagtagtttaggtttttttggtagtttttaggagttttattttgattttttagatttttgagggtttttttttattcgggttttttagggtgtaggttaaggatttttttttgggtttgggagatgtgttgattaggtagggtttataggtttgggttagttttttggtttttttgtttgtttttatttaggttttagtttattttatagtaaagtagtagtttgattagggaggcgttgtttttagggttttttcgtagaggattaatttaagatcgttattttttagagaaagtgaaatttggtttttaattgttaaggcggtaatttttttttttcggttttttttttgagtttatagtttttttatttttttttttttttatttcgttttttcgatagttaatatttggaattagatttttatttttgtttttttttttagaggttttttttttttatgtttatgttggtagtaattttgtgaggtgggttgggaaaggttttttttttttttattttatagttgtgggtttttgaggtttagagaggttaagtgatttgttttaggttatatagtattttagtaggtttgaattttggttttttgttttttttgttttaagtgtttagttttttttagtggagtttgtttataaagataaggtttggttttggggagtgggtttggtagagggtgtacgatgggggaaaggagatcgtcgggagtcgggttgggggatgttggttttggggtttgaattataatttcggggttgttagtttgcgtttggttttgtgtttagagttcggtggttttcgtttatagatgttttaatagtttcggcgagagggtaggaagggtatttaagaaggaagatgtttcgttttttttagtttttaattatcgtgttttgtgaggttaatggtttttgggttaagattggtttggggtttttagaggtttagttcgaagttttttttgtttatttttggtttagttttttgaagatggtatggattttttttttttttatttattttaggaaggttgaggttgcggttttatattatttttgggcgtagggttgatttcgaagaacgaattcgaagaaaataggaggaggagcgggtatatatcgcgttttgcgtttattggtcgttcgtggaaattttggtttttggggttatgtttttagaaggtttgtttttttttttttttatttttatttattttatgaggtgttggttaatcgttttagcgggtataaagtggttgttagtttgtagggtttttagtcgagaggtgttatttttagcgggcgcgggtcggagtacgggtatttagtatgggggtattgtttatatagaggacgttgtttagtaagtatttttttttttttcgttagaattcgtttgttgggtttgtttacgggtgtcggtggggagtagaggtattttttgtttttcgggaattggggaggttaggcgttaggtagaaggatgttgagaaggggagagagttaggaggttaggtagagagagtggtttattgagaatttggtatttttataggtagagaaggggtatttttggaaggtttttagggggaggtgatgttaagatgtagaggtaattttgggaattagggggtgagagaataggatgggtaaagaggttgggtaggagagggaggtttagaagttgggtagggaagtggtgtgaggtgtggaggggttgtggggtttttagtttgttcgggatgaatagaaagttagttaggtttgggggttttagggtttatataattatatagtatgtatagttatatttatatggttatatgcgtatatagttatatgacgttatttatagttttggattttattagtttaggaatttttatatgtagattagagtttttatggtgaacggaataggttttttttacgtcgtatatagatttagatgtatagttatatagaaattttagttttacgtgcgttgttataggtataggtttttgttagagttcggtagtagatatttggggaggcggcgagggtgtcgtggggtcgttaagtttgggtgtttggttttttggttttttttaatagttagttttttttaaagggtcggatggtttttaggacgggaacgatggtgttattgtttttcgggttattgcgttataggtttttttcgattacgtggttgtcggtgtttcgttgggggtggtggtgagcggtaattgtattcgtttttaatattttttgataggtttatagtatttttggtgggtttgatagaaggagttatttatggagagaggagggaggtaagagaggttaggggagagttttggttttgtgtgatttgagtaggatttttttttgagatttggtttatttgttaggaaagtggggatatggattggaaggttttttatatttgttttaggttgtatttttggttgaaaaggtagttttttttggttttagatagagttgaggatataagttgttttcgggttgtttgttttgaagtttttttaggtttatttatttggatggttagagtagttgataaggtaggttttagggtagtggtcggtttttagtttagtggttttgtagggagttagttttattttgtagagagttagttttcgaggttagaatcgtgttgtaggtaggattgggattcggttaggtattgtagtttttgtttaaagatttatttggtaaatcgtagttattgttttagttttttttattgtttgttgtgttaggttttgggtagtgatttattggggagatgatggtggttttggtgggtatatttgggtatatatcgtgttatatagtgtttagttttcgttttttattatataaagtttgggatgaaggaggtattttttaaggtttttttgaatttttttttcgaggtttttatttgtggttttttttattaagttaggtgatattttttttttttgttttagg

SEQ ID NO: 1374 - DNA, 6656 bp, Artificial Sequence
  chemically treated genomic DNA (Homo sapiens)
tttaaggtagagaagaggggtgttatttgatttggtgaggaaagttatagatgggagtttcggggagggggtttaagagggttttgaaaggtgttttttttattttagattttgtgtagtggagggcgggggttgggtattgtgtggtacggtgtgtgtttaggtgtgtttattaaggttattattatttttttagtaagttattgtttagggtttgatatagtaagtagtgggagggattgagatagtggttgcgatttattaagtaggtttttgagtaaaggttgtagtgtttggtcggattttagttttgtttatagtacggttttaatttcgggagttgattttttgtaaggtgggattggttttttgtaagattattgggttaaagatcggttattgttttaggatttgttttgttagttgttttggttatttaggtagatgggtttgagagggttttagggtaggtagttcgggagtagtttgtgtttttagttttgtttagaattaggagaggttgtttttttaattagaggtgtagtttggaatagatgtggaagattttttagtttatgtttttatttttttgataggtaaattaagttttaggagaaggttttatttaggttatataaggttagggtttttttttgattttttttgttttttttttttttttataagtggttttttttgttaggtttattagggatgttgtgagtttgttagaaggtgttgggggcgggtatagttatcgtttattattatttttaacggggtatcggtagttacgtggtcggaaggggtttatggcgtaatggttcggaaggtagtgatattatcgttttcgttttaagaattattcggttttttggggaagattggttgttggggagggttaaggggttaggtatttaggtttagcgattttacggtattttcgtcgtttttttaggtatttgttgtcgggttttggtaggggtttgtgtttgtggtagcgtacgtgggattggggtttttgtgtggttgtgtatttgggtttgtgtgcggcgtgagggagatttgtttcgtttattatggggattttggtttgtatgtgggggtttttgggttggtgagatttagggttgtagatgacgttatatggttgtgtgcgtatgtggttatgtgggtgtggttgtgtatgttgtgtgattgtgtgggttttggggtttttaggtttggttgattttttatttatttcgggtaagttggaggttttataatttttttatattttatattatttttttgtttagtttttgagttttttttttttgtttagtttttttgtttattttatttttttattttttggtttttagagttgtttttatattttgatattatttttttttggaagttttttagggatgttttttttttatttgtggagatgttaggtttttagtggattattttttttgtttgattttttggtttttttttttttttagtatttttttgtttggcgtttggtttttttagttttcggagggtagagggtgtttttgttttttatcggtattcgtgggtagatttagtaggcgggttttggcggggaggaaggaagtatttattgagtagcgttttttgtgtgagtagtatttttatgttgggtgttcgtgtttcggttcgcgttcgttgggggtgatatttttcggttgggagttttgtaggttggtagttattttatgttcgttggggcgattggttaatattttatgaggtgggtggggatggggaggggggagggtaggttttttgggaatatgattttaaaaattaaaatttttacgggcggttaatgggcgtagggcgcggtgtatgttcgtttttttttttgtttttttcgaattcgtttttcgaggttagttttacgtttaaggatgatgtaaaatcgtagttttagtttttttagggtgagtggggaggaaaagggtttatgttatttttagggaattgggttagggatgggtaggagggatttcgagttgggtttttggaggttttaggttagttttggtttaggagttattggttttataggatacggtggttgggggttgaggggagcgagatatttttttttttgagtgttttttttgttttttcgtcggggttgttgggatatttgtgagcggaaattatcgggttttgggtatagagttagacgtaggttggtagtttcgagattgtggtttaggttttaggattagtattttttagttcggttttcgacggtttttttttttttatcgtgtattttttgttaggtttattttttaaagttaggttttgtttttgtaggtaggttttattggggagaattggatatttggagtaagagaaataggaggttagggtttaagtttgttgaggtgttgtgtgatttgaggtaagttatttaatttttttgggttttagagatttataattataaaatgaggaggagaaaagttttttttagtttattttatagggttgttgttagtatggatataaaaggaaaagatttttgaaggaaaaagtaaagatgaaggtttgattttaagtattagttgtcgagggggcgggatgggggaaggaggagatggggaagttgtgagtttagaggggaagtcggggagggggagttgtcgttttgatagttggggattaggttttattttttttgaaagatagcgattttaggttggttttttgcgaaagggttttgggaatagcgtttttttagttaaattgttattttattgtggggtaaattgaggtttgggtgaaggtagatagggaggttaagaggttggtttaggtttatagattttgtttggttagtatattttttaggtttagaggagggtttttggtttgtattttaagaagttcgggtgggaggaggtttttaggagtttggggagttagggtgggatttttggaggttgttagggaggtttgagttgttttagttggagggagtatggggtttggggcgtttgagtaaggagagttggggtagttagaaaggaggaggttggatgtatttttgtttatgtttgttttcgatgtttattgtggttattaaggtagttgttatttattttttttattatttatttatttattcgataaatttttatttggttttatgttgtattagttatttttaggtttgaggattacgtagtaggtaaaaataggcgattttacgtttaggaggttgttttttagtttttatttatttttcggtatttaggttgggatttattatattaggttttatattttttttttattatttttaggggttagttttggatttttattttgagaatgtcgttttcgttgaagtttttatttttgtgtttatttttataatgttgttttttggggttatgttaagaggggatttttttttattttatatttttgatttcgtttttttttttttttttttaaatgtaggattttgttttgttatttaggttggagtgtagtggcgttattgtaggtagtttattgtggtttttagtttttaagttgaagtaaggtttttcgttttagttttttgagtagttgagattataggtatgtattattatgtttagttaatttttttattttttgtagagacggggtgttattatgttgtttaggttgataataaatttttgggtttaaatgatttttttgttttggttttttaaagtgttgggattgtaagcgtgagttatagtatttagttatcgattttattttgtaatagttaggggagagaagtcgttgggtagtgatattttagtttattttagtgaggagttcgaagttttgggaagtttaggggttggtttaaggaaggagcgttagatttgagtagaggggtttaggttatttttagttgtggttgatcgattattacgtttggtgagaaatagttatatgtttttattttattttatttattttgtggtttagggaggtcgtgttgtttttttatggtagagagaggaggttgttttgtttgaggttatttatgaatagttaagaggagaggggtatttggttaggtatggtggtttacgtttgtaattttagtattttgggaggtcgaggtaggagggttatttgagtttaggatttcgagattgtgtttttatagaaaatgtaaaaataaattatttagatatcgtagtgtatatttgaagttttagttattagggaggttgaggtaggaggatcgttcgagtttcgaaggttgaggttgtagtgagttattattatgttataggattttagtttgggtgatagagtaaggttttgtttaaaaaaaataaaaaataaaaaatttattaagaaaagaaggtatttaaacgaggtttaaagattatattttttgtatatagttaatgagggtgttaggtatagggtttagggtttagagttattgaaggtaaggagagtaggtagattatattgttaggatttttataataaagtattatagattggggggtttacgtaatagagatttatttttttatagttttagaggttgaagtttgaaattaagggttggtttttaaggtttttttttttgatttgtagatgattgttttttttcgtatttttatattatgttttttttgtttgttcgtggtttaatcgatttttttttttttttgagatagagtttagtttcgttatttaggttggagtgtagtggtacgattttagtttattataatttttgttatttgggtttaagcgttttttttgttttagttttttgagtagttgggattataggcgtgtgttattacgttaggttaatttttgtatttttagtagagatagggtttcgttatgttgtttaggttgatttcgaatttttaattttaggtgatttatttgttttagttttttaaagtgttgggattataggagcgagttatcgcgtttggttttatttttttttatgaggatattatttatattggattagggtttatttatattttattttaattattttttttttttttttttttcgagataaagttttgttgtgttgtttaggtttaagtgtatagtggtgtttttatagtttattgtagttttgaattttcggttttaagcgagttttttgttttagtttttagagtagttgggattataggtatgtgttattatatttggttaattttattttaattatttttttttttttttttttttttttttttttttttttgagatggaattttattttgttatttacgttggagtgtagtggcgttagtttggtttattgtaatttttgttttttaggtttaagtaattttttgttttagtttttcgagtagttgggattataagtgtttattattatgtttggttaatttttgtatttttttagtagagacggggttttattatgtaggttaggttggtttcgaatttttggttttaagtgatttgtttgttatggttttttaaagtgttgggattataggcgtgagttatcgtattcggtttttaattatttttttaaaggtttaatttttaaatatagttacgttttgatatacgatggttaggattttaatatatgagtttagggaagatattatttagtttatgtagtttgtaagaggaaggtatagttggagggtataggggttggggttattgtcggagtatttagagtgaagtgatatataggaggatagggagtggttcggaggtgaggaggtttggtcgttgattattttagttaagcgtgaggaaagatgcgttagcgtttttggtgaggttagtaattagtgacgttttttttattagtaggaaaagtttgtaatatggtttagttagtataaataggtttttcgattataggattcgggttgtttttttttttcgggttacgttagttaggttcgcgtgatttggagaggaagagaggattagtttggttttttagaattgttgttttttcgtttttcggtttattttttgttgtggggttttacgtttttaaatgtaaggataggatttgagatggtttggtagggttaggtcgaaattggaggttggggagaggtgttttggtggggggagagaaggtggtttttaatttgttgggtgggaggtggagattaatttaagttttattttaatttgtttgtgagtttagtgtttttggattagttatgttttttttttgagttttagttttttttttttaaattgtaatgataattgaataataatgaaaaagataagtaatttaatttaaaaatgggtaaaggattttaatagatatttttttaaaaaaaagaagatatataaatggttaagaagtacgtgaaaagatgttaaatattagggaaatgtaaattaaaattattatgagaagttattttatatttattagggtggttataattaaaggtagataattataagtgttaacgaggagatggagagatgagaattttggggtattgttggtgggaatttataatgaatggtgttattaaattggaaaatagtttggtagtttcgtaaatggttaaatatagaggttagaggtagtggtttacgtttgtaattttagt

SEQ ID NO: 1375 - DNA, 5439 bp, Artificial Sequence
  chemically treated genomic DNA (Homo sapiens)
gagttattttattcggtttagattagaaatattgaagttattttcgattttttttttttttttttatttatatttaatttattagtaaattgtagttggtattttttttaaaatgtattaagaattaggttatttttcgatatatatattgtatttttattatttatagggattgttgtatagttttttttttagtttttttatagttttttttttttttttttggaaggagtttcgttttgtcgtttaggttggagtgtagtggtacgattttggtttattgtaatttttatttttcgggtttaagcgatttttttgttttagtttttagagtagttgggattataggcgttagttattatgtttagttaatttttttgtatttttagtagagacggagttttattatgttagttaggatggttttgattttttgattttatgatttatttattttagttttttaaagtgcggggataataggtgtgagttatcgcgtttggttttttatagttttgttatagtattatatttaaagttatcgtaagttggtttagaatttttttttatttttttattttatttggaggaaaagtttaagttttgtgaggtgtagttttacgttattttttcgatttcgggagtttagttattttgttttaggattattggtttttttgttttttgaatatgttaggtatatttttgttttaggattttagtatttgttatttttttttttttattataggtagaatgttaaagtggatttttgaaatttttagtttttggtatttttttgtggattatataatgattatttttgtgtaattttttttggttttatgtgggtagaatttatagttttttttttttttttttgagacggatagagttttattttgttatttaggttgaagtgtagtggcgtgatttcggtttattgttatttttattttttgggtttttttatttttcgagtagatgggattaaaggtttttattattgcgttcggttaaatttgtttgtattttttttagtagagacggggttttattatattggttagattggtttcgaatttttgattttaagtgatttatttatcgttggttttttaaagtgttgggagttagcgcgtttagttaattacgttttagtttgggttacggagcgtgatttagttttaaaataaaaataaaaataggcgtggtttattgtgtttagttaatttttttttaaatattagaagaagatgataaaggtgataattacgattatattacgttatatggtaaaggtgaggggattttgtagatgtaatgaagatatttgattaattcgagttaaaagggtggtgattcgtgtgggtttgatttaattaggttaggtgttttttagaaaaggattttttgtgtgtttagatttgaagtagtagagattttttttgtttttgattttgaagaagtaggttattacgagtttgatagttgtaaggaaatgaattttgttaataattattcgggttttggaaatgaatgtagtttggttgatattttgatcgtagttttagagtaaaagatttagttaagttatgtttggtttaatgtaataagtaaatgttgttttaagttgttaaattgtggtagtttttgtgtttttgttttcgttttgagatagagttacgtttcgtcgtttaggttggagtgtagtggtattattttagtttattgtagtttcgaatttttgggtttaagtgatttttttgttttagttttttaagtagttgggattgtaggtgtatgttaataaatttagttaattttttaaaaatattttatagagtttgggtttttttatgttgtttaggttggtttttaatttttgggtttaagtgattttttcgttttagatttttaaagtgttgggattataggtataagttatcgtgtttggtttgtggtaatttgttatatagtaatagaaaattaatgtttttttagatatttgtatggtttatttttttttttttataaagaagtttatattgattattttcggtgaaatcgtaataggttttttttttatttttgtagtatttattaatttattgtaatatgtatgttgttattgaagtatgtttattgtttatatttgttttttaattaattgaaatgtgtttattgtttaatatttttttttttttattagaatataagttttatgagggtagaggtttttgtgttttgttgttgttgtttttaggtatttgtaatgggattcggagtatttttagaagaggggttgttgaataggtgaagggatgtagtttatttgggggatataatattatggtaatttatgtatatgtgttagtttaagtgaggttatcgtgtttatagagtaggtgagagatttttttgggttattgttgggttaggtttttggatttttaggttttgaatgttaataagttaatttgggtgagagaggattggttgttgatttgtaatgtaggttagtttgatcggtttttgggtgttggatagtttatgttagtgatttatgttagtgattagggttagatgagttttgtgatttgtttggttttattagtttttttattttttttaataagagggtaggagagtttggagttgtttcgttttttttttttaggggtcggggattggtttattagtgaggttggttttttatagtgttttttattttttttattttgttttaggttgggttttttataggttgggttttttagagagtagacggagatggttttataaagggggtttttattatagaaggttttggggatttatatttttgggagggaggggttaaaaataggagtgagtagagggagaattgttatgtagattatagttgattttatagggagttttggagttaaaatgtttttttagagttattttgtatttgggttaaaatggattagttattggatgcgggttatttgggaagggtgtgattttgagttaggtagttttttgtagttgaagtaggttttcgaggagttatttttgagggttatttgtagagggtatttttagtagttgggtggtaggtgtttttataaagggagagttgagtagcgtttttttttttttgtttatgatatttattaatattttttttattggggtaatttatttttttttttaattattttttttttgagatatattaaaaatgtaaaaaaaaaaatttttatttttttgagacggagtttcgttttattatttaggttggagtgtagtggtatgattttggtttattgtaattttcgttttttgggtttaattgatttttttgttttagttttttgaatagttgtgattataggtgtttattttacgtttagttaatttttgtatttttatatttttagtagagatggggttttattatgttggttaggttggttaattattacgtttagttaaaaaaaattttaatgtcgaaaatgagagaaatagaattataaaagaaattaattatagggttaggtatagtagtttaagtttgtaattttagtattttgggaggttgaggcgggtggattatttgaggttaggagttcgagattagtttggttaatatggtgaaattttcgtttttattgaaaatatataaattagttaggcgtggtggtgtatgtttgtaatttaagttatttgggaggttgagataggagaatcgtttgaaattaggaggtggaggttgtagtgagttaagatggcgttcgttattgtattttagtttgggcgatagagcgagatttcgttttaagaaaaaaatatatatatttatatttagatattaaaatgttaaaatattttttttttttttgagatagggtttcgttttcgttttgttattttggttggagtgtagtggtacgattatagtttattgtagttttgaatttttaggtttaagcggtatttttgttttagttttttaagtagttgagattataggagtatattaatacgtttagttaatttttgtattttttgtagagttgggggttttcgttatgttgtttaggttggttttgaatttttggttttaagtgatttgtttattttagatttttaaagtattgggattgtaggcgtgagttatagcgtttagttaaaatatattttgatggtgttataaacgtgtttttttaattattagatagtaagatttggtcgtggtttaataattgtgataattttgaagatataatgaatttaaatagtatatagaggtatttgtgatagttgtgataggaagttattttttattttgatttgtgataaagttataggtattgttaattttgttgtggtttgttgtttaatttatagtgaaaggaaaggtggaatattagttatagattagagatagatgtgatttttttttatttaagttttaggtgtagggaagtgggtgttgttgtgtggtgagggtgaagaggttttttggaaatttgggtttaggaagaggaaatgtttttaaaagaggggataatgatttatatgcgtggtgggttaagagggtgggcggattttgttagagtttttttttatttggaggggttttagcgtttattttttttgttttagttttttttttcgaggtattgggaggttggataaagttttcggttgggttatattttattttaaattttttttgttttattttagtggtttaggttatttcggtttgttttttttcgtaaggtattttattttttgtgtttagattattagttaacgcggtgattttgatttcggtttaggttttgttaatgaagaggaaagttcgtacgtattcggtttgatttacggcgattttttgtgattaattatattattaattttttaaatagagttttatcgacgtaatgtttaggtataaaaaggttaggtcggagagatcgttattagttacggattttggatttagcgtattcgtattatggtcggttttagtttcgtttgttgtttgttcggttttttggcgttgattttcgtttgttatatttagaattgttttttgggaggtaagagggtcgcgtcggatttcgacgtgcgtaaggtgagtttttagttttggtttcgcggcgtttcggggagggagggattcgtagttataggggcgcgtttcgtttcggtttcgtttgagaattttaggagttgagcggattttgacgtttcgtttttgatcgcggtcgaggtttttacggcgttttagcgcgttttagtttcgttgtttcgttcgaatttcgaatttcggattttagtatttttgttcggcgtatttcggtcggtttcgtagggtttttcgagcgagtttttagcgtcgtttcggttttcgtttatttcgttcgttttcgtagt

SEQ ID NO: 1376 - DNA, 5439 bp, Artificial Sequence
  chemically treated genomic DNA (Homo sapiens)
attgcggggacgggcggggtgagcgggagtcggggcggcgttggggattcgttcggaggattttgcgaggtcggtcggggtgcgtcgggtaaggatgttggggttcggggttcggagttcgggcgggatagcggggttgagacgcgttggggcgtcgtgggggtttcgatcgcggttaagggcggggcgttaaaattcgtttagtttttggagtttttaggcgaggtcggagcggggcgcgtttttgtggttgcgggttttttttttttcggagcgtcgcgggattagggttggggatttattttgcgtacgtcgaggttcggcgcggtttttttgttttttagggggtagttttggatgtagtaggcggaggttagcgttaggaggtcgagtagatagtaagcgaggttggggtcggttatggtgcgggtgcgttgggtttagggttcgtgattggtggcggttttttcggtttggtttttttatgtttgggtattgcgtcggtggagttttgtttaagaggttggtagtatgattggttatagagggtcgtcgtgggttaggtcgagtgcgtacgggtttttttttttattagtagggtttgggtcggggttaaggttatcgcgttggttaatggtttgggtatagaaggtgaggtgttttgcggaagggagtaggtcggggtggtttgggttattagggtgggatagggagaatttggggtggggtgtggtttagtcgaagattttatttagttttttagtatttcgaggaggggggttggggtagggaaggtggacgttgggatttttttaggtgggaggaggttttggtaggattcgtttatttttttggtttattacgtatgtggattattgtttttttttttaggaatattttttttttttaaatttaaatttttagaaaatttttttatttttattatatagtaatatttatttttttgtatttgaaatttggataggaagagattatatttgtttttaatttgtaattgatattttatttttttttttattataaattaggtaataaattatagtagaattagtaatatttgtggttttgttataaattaaaatagaagataattttttattatagttgttataaatgtttttatatattgtttagatttattatatttttaaaattattatagttattgggttacgattagattttgttatttaatggttaaagaagtacgtttatgatattattaaaatgtgttttggttgggcgttgtggtttacgtttgtaattttaatattttgggagtttgaggtgggtagattatttgagattagaagtttaagattagtttaggtaatatagcgagaatttttaattttataaaaaatataaaaattagttgggcgtgttggtgtgtttttgtagttttagttgtttgggaggttgaggtaggagtatcgtttaagtttgggaatttaagattgtagtgagttgtgatcgtattattgtattttagttagagtgatagagcgagagcgagattttgttttaaaaaaaaaaaaagtgttttaatattttgatatttgaatataaatatatatattttttttttgagacggagtttcgttttgtcgtttaggttggagtgtaatggcgggcgttattttggtttattgtaatttttattttttggttttaagcgatttttttgttttagttttttaagtagtttggattatagatatgtattattacgtttggttaatttgtgtatttttagtaaagacgggggttttattatgttgattaggttggtttcgaatttttgattttaggtgatttattcgttttagttttttaaagtgttaggattataggtttgagttgttgtgtttggttttgtaattggttttttttgtaattttattttttttattttcgatattaaaattttttttggttgggcgtggtggttgattaatttggttaatatggtgaaattttatttttattaaaaatataaaaatataaaaattagttgggcgtgaggtaggtatttgtaattatagttatttaggaggttgaggtaggagaattagttgaatttaggaggcggaggttgtagtgagttaagattatgttattgtattttagtttaggtgatagagcgagatttcgttttaaaaaaataaaaatttttttttttgtatttttaatatattttaaaaggaaaataattaaaagaaaagatggattattttagtgggagaggtattggtagatattatgaataagaaaggaaaggcgttgtttaattttttttttgtgaaagtatttgttatttagttgttgggagtgttttttgtaggtggtttttaggggtagtttttcgagagtttgttttagttgtagagagttgtttggtttagggttatattttttttaggtggttcgtatttaatgattggtttattttggtttaaatgtaggataattttgaaggagtattttggttttagagttttttatggggttagttgtggtttgtatagtagttttttttttgtttatttttatttttgattttttttttttaaaggtgtgggtttttagggttttttgtaataaaaattttttttgtgaaattattttcgtttgttttttagggaatttaatttgtagggaatttaatttgaggtagaatggaagaaatgagaagtattgtgagagattagttttattggtgggttagttttcgatttttgggagaagagaacgggatagttttagatttttttgtttttttgttgaggaaggtgaagaggttgatggggttaagtaggttatagagtttatttgattttagttattggtatgagttattggtatgagttgtttagtatttaggagtcggttaggttgatttgtattataaattagtagttagtttttttttatttagattagtttattggtatttagggtttagaagtttaagggtttgatttagtagtggtttagagaggttttttatttgttttgtgggtacgatgattttatttaagttaatatatgtgtataaattattatagtattatgttttttagatgggttgtatttttttatttgtttaataattttttttttgaagatgtttcgggttttattataaatgtttggaaatagtagtaataaaatataaaaatttttgtttttatggggtttatattttagtggaggaagagagatgttaaataataaatatattttagttagttaggaaataagtataaataataaatatattttagtaataatatatatattgtagtagattagtaagtgttatagagataaaagggaggtttgttgcgattttatcgagggtggttagtgtagatttttttgtgaagaagagaaaataaattatgtagatatttgaggggatattggttttttgttgttgtgtaataaattattataggttaggtacggtggtttgtgtttgtaattttagtattttgggagtttgaagcgagaggattatttaagtttaggaattagagattagtttgggtaatatagggagatttaggttttataaaatgtttttaaaaaattagttgggtttgttggtatgtatttgtagttttagttatttgggaggttgagataggaagattatttgagtttaggagttcgaggttgtagtgaattaggatgatgttattgtattttagtttaggcgacggagcgtgattttgttttaaaacgaaaataaaaatataaaagttattataatttggtagtttaaaataatatttgtttattatattgggttaggtatggtttagttgggttttttgttttggggttacgattagggtgttagttaggttgtatttatttttagagttcgggtgattgttagtagaatttatttttttgtagttgttaaattcgtggtggtttgtttttttaaggttaggaatagagagagtttttgttgttttaagtttaagtatatagggagtttttttttgaggggtatttgatttgattaggttagatttatacggattattatttttttaattcggattgattaggtgtttttattatatttgtagaatttttttatttttgttatataacgtagtatagtcgtggttattatttttgttatttttttttaatgtttagaagaaagttggttgggtatagtgggttacgtttgtttttgtttttgttttgagattgagttacgtttcgtggtttaggttggagcgtggttggttgggcgcgttggtttttagtattttgggaggttagcggtgggtggattatttgaggttaggagttcgagattagtttggttaatatggtgaaatttcgtttttattaaaaaaaatataaataaatttagtcgggcgtagtggtggaagtttttagttttatttattcgggaggtggaggaatttaggaggtggaggtggtagtgagtcgagattacgttattgtattttagtttgggtgatagagtgagattttgttcgttttaaaaaaaaaaaaaaaaagttatgggttttatttatatgaagttagaaaagattatataaaggtaattattgtgtaatttatagaaagatattaggggttgagaattttagggatttattttagtattttgtttgtaatggaggggaggaaatgataagtgttgaggttttgaggtaggaatgtgtttggtatgtttaaggagtaaggaggttagtggttttggagtagagtgattgaattttcgagatcggaaaggtaacgtgggattgtattttatagggtttgggttttttttttaaatgaaatgggggaatgagagggagttttgagttagtttacgataattttggatatagtgttgtgataagattgtggggaattaggcgcggtggtttatatttgttattttcgtattttgggaggttgaggtgggtggattatgaggttaggagattaagattattttggttaatatggtgaaatttcgtttttattaaaaatataaaaaaattagttgggtatggtggttggcgtttgtagttttagttattttggaggttgaggtaggagaatcgtttgaattcgggaggtggaggttgtagtgagttaagatcgtgttattgtattttagtttgggcgatagagcgagattttttttaaaaaaaaaaaaaaaagattgtggggaaattagggaggaggttatgtagtaatttttgtgagtaatgggagtgtaatgtgtgtgtcgagaagtgatttgatttttggtgtattttaaaggagatattaattgtagtttgttgatggattggatgtgagtgggagagaaaaagaggagtcgaagatgattttaatatttttggtttgggtcgggtgggatggttt

SEQ ID NO: 1377 - DNA, 16033 bp, Artificial Sequence
  chemically treated genomic DNA (Homo sapiens)
tttttatagtggtgggagggatttcggtggggttgtgttaggagaaatggaggtataaaattatagtagggaggagaagggaagttggatatgcgtataaaggttttcgagtgtttatagcggttttatttagtataggttttagatatttatgaatagatgaaggataagtaagttgtagtacgtttacgtaatcgagaggaattaattattgatgtacgtaattgttattcgaagtttaaatcgttgggttgagtaaaggcggttagacgcgaaggagttttttttgtttgattttatttttttaacgttttggacgagattgtataaatttgtagtgatagagcgggttagtgattgtttgggtttgggggtgttgaggaaagatggattataaacgggaggcgggagtgttttaggttgatggatttggagggggttggtgtatttgttaaaatttattaaattatgtgtttaaaatgggtgcgttttattgtatgcgaattatattttaagatagttggatttaaagaaaaaaaaaaaaaaaggttgggtattgtggtttacgtttgtaattttagtattttgggaggtcgaggcgggcggattacgaggttaggagttcgagattagtttggttaatatggtgaaatttggtttttattaaaaatataaaaattagttaggtgtggtggcgggtgtttgtaattttagttatttcggaggttgaggtaggagaattatttgaatttaggaggtagaggttgtagtgagttaagattatgttattgtattttagtttggatgataagagtgagattttattttaaaaaaaaaaaaaaaaaaaaagaaagaaagaaaagaaaagaaaaaaagaaaaagaaatagaaaaaaagaggtgagtgttagagaggaggtggatgtggttattatgttggtgtagaggtgttagtaggattgggagttggcggtgggcgggggtaggttttttatttgagtgtttagtattgggtgtttgaggggtagggtttagtttagtttttaggagttttttttatttttatttaattaatgtattattttgagataggttttcgttgtgttatttaggttggagtgtagtagtatgattacggtttgttgtagtttttattttttaggtttaggagatttttttattttagttttttaagtagttgggattatgggtatatattattatgtttagttaattttttttttgttttgttttgttttgttttttgagattgagttttattttattttttacgttggaatgtagtggttcgatttcggtttattataatttttttgttttgggtttaagtaatttttttgttttagtttttttaatagttgggattataggttttcgttattatttttagttaatttttgtttttttagtagagatggggttttattatgttggttaggttagttttgaatttttgattttaggtggtttgttcgtttcggttttttaggtagttatgggttataagtatgttttattatgttcgtttaatttttttttttgtatattttgtagagataggatttttttatgttgtttaggttggtttcgaatttttgggtttaagtaatttttttgttttagtttttcgaagtgcggagattatagatacgagttattagttttggttttttaggagtttttttaatttagggtagagagaggtcgaggatgaagggaaatggtttagagggatggaggaggattaggagggtgggatattttaaatatacgggaggggggtttcggttaggttatatttagagttgggggatagaagaggtttgagaagtagttcgggtttaggtaatgggagacgttaaatatgggggtttacgttgtattttttaggttttttcgtagttgtcggtttttttttaatttttttttgatagtttttgttaggttggtttagggttttgttttagttagggtttaaggggttatgtggtattagaggaatttttggtttagatggtattacggtttgattggggtatggttgcggtattttcgggtttttgagtgattaaggagatttgttggaattcgtgtttgttttttcgagggttttagtcggtttttagtttttacgttgtatagagtcgttaaatttagttaggtcggggaggttgtttcggggtcgagtgtttggtagtagggttgtttttttataaggttcggtttagtattcgagtcggttattcggtttttgggtttataaggtaggattggcggtttttaagtgttggaggtttcgagtgggttcggggttaagtttttagattttggggagttttttttttagttattagtagatatgggaattatttattgtgtgattatgggttagggatttaatttttatagttttagttttttgatttgttagatgtgggttttaggatttgttttatgggtttgttgtgaggaaaattttgttagattttagagggtggagttttggtttttgttttgtttattttagttttaaatatttagaataaaggtaggtgtttgtttttgaggacgttggggtagggtttaagggtgagaaattatagtttttggattagaaagatgtattttagagttagtgaaagagatattgatttcgatagttggttgttttgtttttgtggagttattagtagtaggaaaataaatgtaggtttttggggtatattgtggatatgataagatttttaaatgagacggtgttttaggttagtttatttttttagggttagggttagggtttaggttgtaattgaattacgtgtgtgtgttttgttagtttattaatttgtttaagtaagtttgttagtttattcgttaatttttttgttagtaagtgtggttttttggaggaggaggaggaggaggaggaggaggaggaggaggaggaggaagaagatatggtggtgatgtgagaggaagaattttttgatttttttttttttttttttttttttttttttttttttttttttttttttttttttttttttttttttttttttttttttttttttttttttttttttttttttttttttttttttttttttttttttttttttttttttttttttttttttttttttttttttttttttttttttttttttttattttttttttttttttttttttttttttttttttttttttttttttttttttttttttttttttttttttttttttttttttttttttttttttttttttttttttttttttttttttttttttttttttttttttttttttttttttttttttttttttttttttttttttttttttttttttttttttttttttttttttcgtttttttttattttatttattttttagaacgtatattagggagaagggtggttgaaaagggatttagaatggtttatatagttttagtatttattttattttttattataagtagttgtgttttggtgttttttattttaatggttataggggtagttgggaaaggaattgtttagggttaaggttaggttaaggggagacgtggttattatagttttggtttttagtatttttggattttttttagaaaagtttatgatatttattggattagtagaaatttcgcgaggggtgaggttgatttatttgataaggagagattgatttgggtgttggaaggggttatgggtagttttttgtgggtgatttttatttagataggttgtcgggatttttagttttagggtttggttttttgtttagagtatttttagtttatggttcgttagtaagaagattttttattagttttaagggtggggcggtttcgacgatagggtcgtgggggttcgttagggaggtttttgtttttagtttgaatttttagtattatttcgggtgagtttgggtaatttattttttttttttgagtttggtttttttatttttaaaacgaggggtggggttggggaggtttttagttttgaggagttaacgtgggattttttgtttattttaaatttttgtgtttagggttcgagttgggggtgggaagggaaggtagggattgtagaggtgttgtgttttagatttaatggtggtttttagttttttgtttcgtgttgttgagatttattttttgtgagtttcgatttagaaggaatagtttttattattttaatttatagatgaggaagtaggttcggagaggtaaggtgatatttagtttttatagttaagaagtggtagagttagggattttcgaggttaggttttttcggttggttttgggttttttatggtattggtgacggatgtggtgttggttttggttgggtatttgttatttttttttttttgatggtggtttcggtaggatagatagtgggagaggagagttgggggatagagatgttagtttagtatcgaggttgatcgggtataggttaggttggaatttagagttttttttttttttgttttgttcgttgtagatttttagggacgaagtagttaattttggtgggggagggtggagggtggtggatggggttggggatggaggttttattttggtagtggaggggagtcgcggggagttttttaatttgaggagattttagttttttttaggttttggttagagttttattttgttaggttttggggggaggataatttgaggagtcgattgagagttttatttttgtttttgtgacgggtggtttgtggttttttgttaataatttttgttttcggaggtttaataaggtttacgtagagttaggaggggtagtggggttgggtttgggtggttttattagtttcgttttatttatttttgggaatttatttgtttatgggcgaggttggtttgtagtttgttgttttttaggggttaagagttgttttgattatttagggattttttttttaatttaagtgtttttagttgatttttggtttttgttttttggttttatttgtatcgttttgttttttttaaggggttaggaagtttttagaagttttattatcgacgtgggtggtggtattcggtttattttgagagtagaggtcgtgtagggggtttagttttgagttttagtcggtttattatggtacggcggttttaggaggagttggtcgttttttttttcgagtatgatatttttcgtatggtgttggtgcgtaataagaaggtgggcgttatttttcgattgatttagttggtggttttggtttacgttatcgggtgagttcgggcgtttttcgttgtttgtattagtttttatttcgggtttgttttttagattttgatattttttgcgtgatattagcgagtttttttttttttttatttaggggaaggtttttttggtaagttattgtgcgagaatagaaaattttgttaattcgttgttgagatggggacgaggtcggaggggaagttttgttcgggggttttcggtgaataggaggtagagtttttgggttttgaggagtcggtttagtgttatggtttttttgagtggttagtggtgtttagggttagggtattattaattatagttattgagttttcgatttttgatcgtttgttaaattaggtcgttattgatatatagaggttatattttatattcgttattttatatgataagttagagagagatagattttgttgttagtttttttgtttgagtaagggatatttagggacgtttgaggttttcggagtagagaaatttttatattttgaatatttggtgtttttatgttggtatgttaggcggaggatagagattggttttggttttagggatgatagtttttttttgggtattttcggatttgttttatcgggttgggagtgtagaattagaggtagcgtgggacgtttttgtagtatggttgtttcgggagttaagataggtttggtagaggttggtatatttgtgagtgtgtatatggagttttgtgtttatatgtgtttgggtgtgtgtttttggtgttgagtgtttatatgtgggtatttttatgtgtatatatggttgtgtttatgtttgttttgtggttaagtgtttgggtggttagtgtgtgttttttgtgtgtggtgtattttgtttatttatagtgattttgtagaggttttttggaggttttagggttattggagggggtttagtttttgttggggttttaggggtgtttagtagtttttgtttgtttttgtcgtgtgattttgagagttttattttttttatttttattatggtttcgaattagaattgttaaatggagtttagggtaggttgatttagggtttaaataaggattatgaagttttagtttttcggaaatttttggcgtttaaaagagttttttttttgttttattagtttttagaattttagagtcggttaggtggatttagggttagattttagttttgatttttttttttttttgtttagaaattaatttgatatttgtgatgtttgagtttgtgagggaaattgaggtttagagaggggtagtggggtttttaggtttatagtaagttagtagtaaatttagggttgtagttgagtttttttgatttttaggtttttgttgtgttttttttttttttattattataaggggttgtggattttttttattgggtattgatggtgggatgttaggtataggacgggtcggaagtttatttttagtattatttttgatcgtttttgggagaggttgtttgcgtaggtttagtttatttttgttggaagaggttgggggaaggttgttttttttttgtttttgcggttttttagttttgtttttagatttgtaggtgtgaggggtattaggttttttttttgtgtgtgttataggttgttagcgttggagggatttatttatttttagtcgtagtttatgttttaagttgttgtttagtcgggaatttatatttttagtgacggggattttattatcgtttttttgtttgtttttttttttaagattgtttaattagtttttaaatggatgtggtttttttcggtgtttgtggggtttaggattatagggattagttaggattttatagtttagtaagagattaattaggatttgaatttatttgtatggttttaaagttagttttgatattttggaaaggtaatttttttagagagagggtattggtttgtttacgttatatagtagagggtggaaggaaggtagagttcgttattattagtaatttttagggttgtaggtttaggtttttagtttttgtttaggttgtggtgtttgttgttttttgcgttttcgtttggttattgtttagtattgtattgattttttagttaggaatttatagcggtaaatcgaatttttgatttagtttggatttggttttggtattttcggatttagttttttaatcggttcgtggggtacgggttgtaggggattattttttttaagagtgtatttagtttagtattttgttgttttttgaggagggttttgtttttatgtttgattttgtgggtattgttaggggatggaaaggagtatgagagaagagttaggttttcgtgttttagatatagggtaaagtttgggtgggggatgggtggatatagagatagatttggatagagggataaacgttagagtataatttagacgaagggtgggaggtttcgagatttagagatggatagagttattgaggttgagtagggaggttgagaagttaagaatatagatttaggaggaaaatcgaggttatggttttcgttagttatgtttttttaggagattttgggtaagtgtaggtagtgagtgggtttgagattagaaggttgagttgagttgatttttttagatttagttaagatggttttagttaaggttgggtatagtggtttatgtttgttattttaatattttgggaggttgaggtgggaggattatttgaggttaggagtttgagattagtttggttaatatggtgaaatttcgtttttattaaaaatagaaaaaattagttgggtgtggtggtgtacgtttgtaattttagttatttgggaggttgaggtagtagaattatttgaattttggaggtagagtggagttgagattgttttattgtattttagtttgagtgatagagtgagattttattttaaaaaaaaaaaaaaaaagatggttttagttagagtttttttcgaagagttgatgagttttttgtttttggtggtgtataggtagtggggaggaagttagggaggtttttttggaggaggtgatatattgatggaattagttataagtaaagatttgggggttgtgggttgggttggtttgtttttagttttttttttagtttttttgggtttttttttaattaagtttttatttattttttgcgtttttatatagattttttgaaattatatgttttgagatttttaagtggagattagagtgtattaattagggagaaggatggatagaaattattggggggagaaatatatttagggatcgtttttgtagtattttttttatgtttggtgttgtgtcggggaatagaggtgggatatggaatggagagagggagagggaggaattgagggtgaattagttagatttttttggtttttgtgagaaaagtttaattaaatagatttaaaaggaagggtgggtcgggtgcgttggtttacgtttgtaattttagtattttgggaggttaaggcgggtggattatttgaggttaggagtttgagattagtttagttaatatggtgaaaatttatttttattaaaaatataaaaattagttgggtgtggtggcgtacgtttgtaattttagttattcgggaggttgaagtaggagaatcgattgaatttggggggcggagatggtagtgagtcgagatcgtattattgtattttagtttgggtaatagggtgagatttcgttttaaaaaaaaaaataaaaaaataaataaataaatgaatatataaataaaaggaaaggtgggggtattcggtggtttatgtaattgaaaaattagtgtgggttttaggttcggttggattttttaggatgaagatataggaggagtaaggtttagaggggagaggggatgaggaatttttgcgggtttagttttggtttttaaaagaagttgtttatgatttattttttttttttggttttttttttttttgtggaggttttatttttaggtaagttttttgtttttatagtggtgaaacggttattagtagttttaagttaatattttattagtttagttattttcgaggtataagagtggttttttttttagagttttagtaaaagttttaggtttaatttttattggtcggggtcgggtttcgtgtttattttagaattaattaattattgtagttaaggaaacggaatgttttgattggaggagtttggttgcgtgtttatttttttaggtttttttgtcgggatatagtgtgaattaaggttttggggtcggagaggaatagagaaggtgttattgggattaggttgaaggggttataaaaggagtttaagggagaggttgtgaaagggagagtaggggcgatggcgaaggtttttgaatattaggttgaggcgttcggattttttttgtaggtagaagggagttaagataggatgtttagtaggggagggtttggagtaggtaggggtgggcgtggggatcggaggtaggatagttgtgaagaggtcgtagggatgggaaggggggacggggcgggatttaaggtagaggtagtgagtacgggtgatagatgtcgttatttcggtaggttttacgtttggggcggtttttgtttagtttttgtttattgttgtcgtagtacgtaatatttggtatagttagagttttcgacgttttaagagaagtgggaagtgagatttatgtatgaaagaaatcgtttggtttttagagattggtgacgtatttaaaaaaaaagaaagaaagaaagaaagaaaaatagatcgggtgttatggtgtacgtttgtaaatttagtattttgggaggttaaagtgagcggattattttagtttaggggtttaagattagtttggttaatatagtgaggttttgtatttaaaaaaaaaaaaaaaaattatttaggtgtggtggcgcgtgtttgtagttagttttagttatttaggaggttgaggtgggaggattatttgagtttggaaagttgaggttgtagtgagttacgattgtattagtgtattttagtttggaggatagagtgatattttgttttaaaaataaataaagaataataaaaataaaataattaaaaatataaatggttggtttgagatttaattttatatttagttagttatttaatatatagtgtttgttgagtttttattatgtgttaagtattattttagatattaaaaatatagaagtgaataaaataaattaagattttgtatttaaggaatttaatttagatgtttttcgatttgtttgcgggttgtatgggggttttagggtgggttttagttttgagtatatttttttttaggtttggagtttgtttatgtttttttttaaggttgttgttttttgatagtatacgttttatttggttaatttttgtttgtggtttatggttatattttgtgttttattagttatttggtcggtttttttaatttatgttagagttgttttcgtatttgttttagtttttttagtgttttagtttttttaaaattagtttttttgggtttttagatgaaagtcgagggaggattagaaggattgggggatttaatgaatgtgggggtatgatggggagggtggttgtgaggatgttgtttgggtgttgagtttgggtgatagggtgaggatagtattattttttatgacgaggatataggggaataagttttaaagggagatgaagagtttaggttgatttaattgaatttttgtttgtatagtggttagtgtttggtacgaaatagatttcgtaggtcgggtatagtggtttatgtttgtaattttagtattttgggaggtagaggtgggtggattatttgaggttaggagtttaagattagtttggttaatatggtgaagtttcgtttatattaaaaatataaaaattagttaggcgtgttggtgtgcgtttgtaattttagttttttaggaggttgaggtaggaaaatcgtttgaattcgggaggtagaggttgtagtgagtttagatcgttttattgtattttagtttgggggatagagcgagatttcgttttaaaaaaaaaaaaaaaaaaaaaagaatttattaggatattattatattgtaaattgaggagtatttggatttagcgtggtttgatttaggattttttgattttatggtgggtttattgggggtattaagagttttttgatttaggatgggtttattaggttatagttttatcgttatttgaggagtatttgtgtaagatttttgggtgcgagatttttgtttgttttgtttatttttgtgtttgttttgtttaatagtgtttggcgtatgaataggggttggataaatacgtgtttgtttttgttttttagtagagatagcgtgttattatgttgtttaggttggtttttaatttttggttttaggtgattttttttttttagttttttaaagtgttagaattgtaggtttgagttattatattcggtttatgtttgttgaatgattgaatgtgtggaattgaattttaggggagagtgtagtttggagatagaattttggggatatagcgtgtttgaggtagtttatttagggaatgggggcggattaatattgaaagaggaatttgtgaaggaggaacggagaatagtgaaaatgggaggtttttattatatgtgtttattgagtgttaggtattgtgttaatttttttaagaatttatagaggtcgggcgcggtggttttcgtttgtaattttagtattttgggaggtcgaggcgggcggattacgaggttaggagttttagattagtttgattaatatggcgaaattttttttttattaaaaataaaaaaaattagtcgggcgtggtggggcgcgttcgtagttttagttattcgggaggttgaggtgggagaattgtttgaattcgggaggtggaggttgtagtgagttaagatcgtgttatcgtattttagtttgggtaatagattgagattttattttaaaaaaaaaagaatttatagaagttttttttaaatatttatttagatgtttttgttttttggggtttaggttgagtttgtagtagagttttattaaatatttaatgaataagtagcgtttttgaggtaggtggcgttatttttgttttattgagaaaattagggtttagagaggtgtagtttttagtttgaagttatatagttggggagtagtagggttggtatttgatttttagttattttattttgtggttttttttttgagaaggttattggagagttttaggatgggggattgttgatgacgaggtagaaagtatggtgagggttatttttggaaggggagaggtttttgaagatgtttgtgtttgatattaggtttttttggttgtttttttagggtggtgataataaggttagattaaggtatggttttggaggagtaggtttggtattatagttattttattattattttttgtttttttgagacggagttttatttttgtcgtttaggttggggtgtagagtgtaattttggtttattgtaattttcgtttttgaggtttaagtgagtttttgttttagttttttaagtagcgggattataggtgttcgttattattatgttcggttagtttttgtatttttagtagagttggggttttattatgttggttaagttggttttgaatttttgattttaggtgatttatttgttttggttttttaaagtgttgagattataggtatgagttatcgcgtttagtttatagttattttattattattagagttgaggttatgaatgttagatttgatcgattttttttttcgattttaagatcggtagttttaaggtgtattagtttcggtttgtgggttttaggtggttttgttttttttttgtgttttgttttttgggagatacgtcgaagttagtgttgtttagtggaggtgggttgagttttgggttgggtgttttaagtatggggatatttgagatcgttatttttgtaggttttagtttttttgttttttgggaaaaggtagaaagttcgttttgggtaaagatagaaacgttgttaagttgttggggttgaaggtgtcgagagggaggttagtggtttgttttgtagaggggtttaggataaggagaaatttttttttttttttgtattagttttttttggtttggatatagaattagaggtttttttggaggaaggggtttaaggaggttagtggggggatgggtaatgtttttgttttttttgatggggttggaggtagcgtgatagatttaggatattgaggattagaggtttttgttatgtttttatttgttgttatttgggatttgtaggggatagtagtgattaagtttaggtttcgggagtatgtgatttggttttagtgttaaggtgagagggggtttagagaagaggtgggtgggttatgagaagaaagaagaggatattggtgggtggtttttttggggtttgtagtagggagagaggtgattttgggattaagaggtttggagagttttgttattagatttgagttttgggggaaggagtagggagtttattgttttgagttttttttggataggtgagttcggggtagggtaaggagtggagggggatgatatatttggttataggtgtatttatagatttgttttgtaggtatatagttatatattttatattttaatatatatatatatatatatatatatatatatatatacgttattttgaatttttaaaaagagttttttttcgaggaaggggttatagtttggagaggagtgttatttaggattattttatttgtaagtaatagaaattaaattcgaattggtttaaataaaggaaggatatttattggtttacgtaattgaaaagtttagaagtagattttttaattgtgttttaggtatggttgaatttaggtgtttaaataatattgttaggattttgtttttttttattttttggtttggtttttttttaggagagttttattgttaggattgttttttttagaaggtggtaaagatgattattatagttttcgttttgtagttattttgtttagttatttaatagataggatgttttttttttggtaatttttagaaaagttttggttttattgttgaaattttttaggttatgtgcgtgtttttagattcgttattgttattagggggatggaatattgattggtaagttttggttatttgtttaatttttggggttaagagggaggttagttttatggaattttttagattgaaagtggagaatttaaaggaacgggatagtttaatgttgggaaggtaaggttagaattttttaagaaaattggaagatttttcgattgagttatttttatagtgtttcgatcgaggggttggacgttgtaagttttttagaggattatttttttgttttgtttttttcgttgttttttagggggttttagtatggttggattataataataattaatgtttatattgtatttattttgtgttatttttattttgagtgtttttatatgtatgaatttatttatttgattattataagaagtattattgttggtcgggtgcggtggtttatgtttataattttagtattttgggaggtcgaggcgggcggattattaggttaagagatcgagaatattttggttaatacggtgaaattttatttttattaaaaatataaaaaattagttgggcgtggtggtgtatgtttgtaattttagttatttaggaggttgagataggagaatcgtttgaattcgggtgtaggaggttgtagtgagtcgagatggcgtcgttgtattttagtttgggtgataaagcgagatttcgttttaaaaaaaaaagaagtatcgttattatttttattttatagatgaggaaattgaggtataggggattgaatagtttattttaaattttatagtaagtatggagttgggatttagatttaggttgttaggtattgaagattatatttttagttttcgtgttttgttgggatttttggaaggaggagtattttggaaggaggaggtttggtttttaggttttagtaaattttgtttttggaaaaggattggaaagagtatttgaattagtagttttttttttttttttttttttttttttttttttgagatagaattttgtttttgtcgtttaggttggagtgtaatagcgcgatttcggtttattgtaattttcggtttttgggtttaagagatttttttgttttagttttttaggtagttgggattataggtatttattattatgttaagttaatttttgtatttttagtagagatagattttattatgttggttaagttggttttaaatttttgattttaggtgatttattcgtttcggttttttaaaatgttgggatggtacgttcgttttgaattagtatttttatagtgaaaagtatcgtggaattttaggtttaggttagtagcgggaggtaggggaggttgttttgtttttagtttaagataggagttttaggagtagatggtggtttagaggtatatttggggagggcgtgggaaagcgtgtgataggtttagttggtgttataattataattttttttttgtttttattcgtatagg

SEQ ID NO: 1378 - DNA, 16033 bp, Artificial Sequence
  chemically treated genomic DNA (Homo sapiens)
tttgtgcgggtggggatagagggggagttgtggttgtggtattagttggatttgttatacgtttttttacgttttttttagatgtgtttttgagttattatttgtttttaaagtttttgttttgggttagaggtaggatagttttttttgtttttcgttgttggtttgggtttgaagttttacggtgttttttattatgaaaatgttaatttaggacgggcgtgttattttagtattttgggaggtcgaggcgggtggattatttgaggttaggaatttgagattagtttggttaatatgatgaaatttgtttttattaaaaatataaaaattagtttggtatggtggtgggtgtttgtaattttagttatttgggaggttgaggtaggagaattttttgaatttaggagtcggaggttgtagtgagtcgagatcgcgttattgtattttagtttgggcgataagagtaaaattttgttttaaaaaaaaaaaaaaaaaaaaaggaaagaaagaaattgttaatttaaatattttttttaatttttttttaagaatagagtttgttggggtttggaggttaagttttttttttttagggtgtttttttttttagaggttttaatagagtacgaaggttgagaatatggtttttaatgtttaatagtttgggtttaaattttagttttatatttattgtgggatttggggtaagttatttaattttttgtgttttagtttttttatttataaaataggaataataacggtattttttttttttttgagacggagtttcgttttgttatttagattggagtatagcggcgttatttcggtttattgtaattttttatattcgggtttaagcgatttttttgttttagttttttgagtagttgggattataggtatgtattattacgtttagttaattttttgtatttttagtagagatggggttttatcgtgttggttaggatgttttcgattttttgatttagtgattcgttcgtttcggttttttaaagtgttgggattataggtatgagttatcgtattcggttaataatggtattttttgtagtgattaagtgagtgagtttatatatgtagaaatatttagaatggggatggtatagaataaatgtagtatagatattagttgttattatgatttagttatgttgggattttttgggagatagcgaggaaaatagagtagggaggtggttttttggagggtttgtagcgtttagtttttcggtcgaggtattgtgggagtggtttagtcgggaggttttttagtttttttgggaaattttggttttgtttttttagtattgagttgtttcgtttttttggattttttatttttagtttggaaggttttatgaggttaattttttttttagttttaggagttgggtagataattaaggtttgttaattaatgttttatttttttagtaatagtgacgggtttaaggatacgtatatgatttgaggagttttagtaatgaggttaggatttttttgggaattgttaggaaagaaatattttgtttattgagtggttaagtagggtggttgtaagacgaaaattatggtagttatttttgttattttttggagagagtaattttgataatgaagtttttttagaggaaagttaggttaggagatagagaggggtagaattttgataatgttgtttgagtatttggatttagttatatttgaagtatagttgaaaaatttatttttggattttttagttacgtaaattaataaatgttttttttttgtttaagttagttcggatttggtttttgttgtttgtaaatgaaatagttttggataatatttttttttaggttgtggtttttttttcgaggaaagattttttttggagatttagggtaacgtgtgtgtgtgtgtgtgtgtgtgtgtgtgtgtgtgtgttggggtatggggtgtgtggttgtatatttgtagggtaaatttgtgagtgtatttgtggttagatgtattatttttttttattttttattttatttcgagtttatttgtttaaggggagtttaaagtaatggattttttgtttttttttttagggtttagatttggtaatagaattttttaggttttttagttttagagttatttttttttttgttgtaggttttagggaggttatttattaatgtttttttttttttttttatggtttatttattttttttttaagtttttttttattttggtattggggttaagttatatgttttcgaagtttaagtttggttattgttgttttttgtaggttttagatagtaataggtggaggtatgataaaggtttttgatttttagtgttttgagtttgttacgttgtttttagttttattagggagagtaagagtattgtttatttttttattggtttttttgggtttttttttttaggagggtttttggttttgtgtttaagttagaaggagttgatgtaggggggaggaggagtttttttttgttttgggtttttttgtaggataggttattgatttttttttcggtatttttagttttaatagtttagtaacgtttttatttttgtttaaaacgaattttttatttttttttaagagatagggaagttgaggtttgtaggagtggcggttttaagtgtttttatgtttgaggtatttagtttaggatttagtttatttttattgagtaatattggtttcgacgtgttttttaggaggtagagtatagaggggaaatagagttatttggagtttataagtcggggttgatgtattttggagttgtcggttttgaggtcgaagggaaaggtcggttagatttggtatttatgattttaattttggtgataatagaatgattatgggttgggcgcggtggtttatgtttgtaattttagtattttgggaggttaaggtaggtggattatttgaggttaggagtttaagattagtttggttaatatggtgaaattttaattttattaaaaatataaaaattagtcgggtatggtggtggcgggtatttgtaatttcgttatttgggaggttgaggtagagatttatttgaattttagaggcggaggttgtagtgagttaagattgtattttgtattttagtttaggcgataagagtgagatttcgttttaaaaaaataaaaaataataatagaatgattatggtgttaggtttgtttttttaaagttatgttttgatttggttttattgttattattttgggaagataattaagagggtttgatgttagatataggtatttttagaagtttttttttttttagaaataatttttattatgttttttatttcgttattagtaattttttattttggggttttttaatggtttttttaaggaagaggttatagggtggagtggttgagggttaggtgttagttttgttgttttttagttgtgtggttttaggttagagattatatttttttgagttttggtttttttaataaaatagaggtgacgttatttattttaaaggcgttgtttatttattaagtgtttagtgaggttttgttataaatttagtttgggttttaggagatagaagtatttaggtaagtgtttgggggaagtttttatgagtttttttttttttgagatggagttttagtttgttgtttaggttggagtgcggtggtacgattttggtttattgtaatttttatttttcgggtttaagtaatttttttattttaatttttcgagtagttgggattacgggcgcgttttattacgttcggttaattttttttatttttagtagagagagggtttcgttatgttggttaggttggtttggaatttttgatttcgtgattcgttcgtttcggttttttaaggtgttgggattataggcgggagttatcgcgttcggtttttatgagtttttaaggaaattagtatagtgtttggtatttagtgggtatatataatgaaaattttttatttttattgtttttcgttttttttttataaattttttttttaatgttgattcgtttttattttttgagtgagttgttttagatacgttgtgtttttagaattttatttttagattgtatttttttttgagatttaattttatatatttaattatttaataaatatgagtcgggtgtggtggtttaggtttgtaattttagtattttgggaggttgagaggggaggattatttgaggttaggagttagagattagtttgggtaatatagtaatacgttgtttttattaaaaaataaaaataaatacgtatttatttagtttttatttatgcgttaaatattgttgaataaaataaatataaaagtgaataaaataaataaaaatttcgtatttaagggttttatatagatgttttttaaatgacgatggggttataatttgataaatttattttgagttaaaaggtttttaatatttttaataaatttattataaagttaaaaaattttaagttaaattacgttaagtttagatgttttttaatttataatgtggtgatgttttgataaatttttttttttttttttttttttttgagacggagtttcgttttgttttttagattggagtgtaatgaggcgatttaggtttattgtaatttttgtttttcggatttaagcgatttttttgttttagttttttgaggagttgggattataggcgtatattaatacgtttggttaatttttgtatttttagtatagacggggttttattatgttggttaggttggttttgaatttttgattttaggtgatttatttatttttgttttttaaagtgttgggattataggtatgagttattgtgttcggtttacgaaatttatttcgtgttaagtattaattattatatagatagaaatttaattggattaatttgaattttttatttttttttagaatttgtttttttgtgttttcgttatggagaatggtgttgtttttattttattatttaggtttaatatttaggtagtatttttatagttattttttttattatgtttttatatttattggattttttagtttttttggttttttttcggtttttatttaaggatttagaagggttggttttgggaaggttgagatattggaggagttgggataggtgcgggggtagttttggtatgggttgggaggatcggttaggtggttggtgggatatagggtatggttatgggttataggtaggagttgattagatggggcgtgtgttgttagggagtagtagttttggggaggggtatgagtagattttaggtttgggagggaatgtgtttagaattggggtttattttgaggtttttatgtaattcgtagataagtcgaggggtatttgggttaagttttttgagtgtaggattttggtttgttttgtttatttttgtatttttagtgtttagaatagtgtttggtatataataggaatttaataaatattgtgtgttgaatgattaattgaatgtggaattgaattttaggttaattatttgtgtttttaattattttatttttattgttttttatttatttttgagatagggtgttattttgttttttaggttggagtgtattggtgtagtcgtggtttattgtagttttaattttttaggtttaggtgatttttttattttagttttttgagtagttgggattgattataggtacgcgttattatatttgggtaatttttttttttttttttagatatagggttttattgtgttggttaggttggttttggatttttgagttgaagtgattcgtttattttggttttttaaagtgttgggtttataggcgtgtattatggtattcggtttgtttttttttttttttttttttttttttttttgaatacgttattaatttttaaaaattaagcggttttttttatgtataaattttattttttattttttttgagacgtcggaagttttggttgtgttaggtgttacgtgttgcggtaataatgggtagaagttgagtaggggtcgttttaggcgtgaggtttgtcggggtgacgatatttgttattcgtgtttattgtttttgttttgggtttcgtttcgttttttttttttatttttgcggtttttttatagttgttttgttttcggtttttacgtttatttttgtttgttttaggtttttttttgttagatattttgttttggtttttttttgtttgtagaagaaattcgggcgttttagtttggtgtttaaaggttttcgttatcgtttttgtttttttttttatagttttttttttgggttttttttatggtttttttagtttagttttagtgatattttttttattttttttcggttttaagattttggtttatattgtgtttcgataggagagtttggaagggtgggtacgtaattaggtttttttaattagggtatttcgtttttttgattgtaatgattgattggttttggggtgggtacgggattcgatttcggttaataagaattgaatttgagatttttgttggagttttggagaaggagttatttttgtgtttcgggagtggttaaattggtgagatgttagtttggagttgttggtggtcgttttattattgtgaagatagagaatttgtttgagaatgaagtttttatagaggaaagaagagttaggaaagggagataggttatgggtagttttttttgagaattaagattggattcgtaggaattttttatttttttttttttttaaattttattttttttgtgtttttattttggaggatttagtcgggtttgaaatttatattgattttttagttatataaattatcggatatttttatttttttttttatttatatatttatttatttgtttgtttttttatttttttttttgagacggagttttattttgttgtttaggttggagtgtagtggtgcgatttcggtttattgttattttcgttttttaagtttaatcgatttttttgttttagtttttcgagtagttgggattataggcgtgcgttattatatttagttaatttttgtatttttagtagagatgggtttttattatgttggttaggttggttttaaatttttgattttaagtgatttattcgttttagttttttagagtgttgggattataggcgtgagttaacgtattcggtttatttttttttttaaatttgtttgattagattttttttataggaattaaaggagtttggttaatttatttttagtttttttttttttttttttttattttatgttttatttttgtttttcggtatagtattaggtatggagaagatgttgtagaaacggtttttggatgtgtttttttttttaataatttttatttatttttttttttgattggtgtattttgatttttatttggagattttagaatatgtgattttaagaggtttgtgtggaggcgtaggggatgagtgaggatttagttgagaagagatttagagggattggagagaaagttgagagtaggttagtttagtttatagtttttaggtttttgtttatggttggttttattagtgtgttattttttttaggaaggtttttttggttttttttttattgtttgtatattattagggatagagagtttattagtttttcggggagagttttaattgagattatttttttttttttttttttgagatggagttttattttgttatttaggttggagtgtaatggggtaattttagttttattttgtttttagggtttaagtgattttgttgttttagttttttaagtagttgggattataggcgtgtattattatatttagttaattttttttatttttagtagagacggggttttattatgttggttaggttgattttaaatttttgattttaggtgatttttttattttagttttttaaagtgttgggatgataggtatgagttattgtgtttagttttaattgagattattttaattggatttgagagggttagtttagtttagttttttggttttaggtttatttattgtttgtatttgtttaggattttttggaggagtatgattggcggagattatggtttcggttttttttttgagtttgtgtttttggttttttagtttttttgtttagttttagtaattttgtttatttttgagtttcgggattttttatttttcgtttgagttgtgttttggcgtttgtttttttgtttaggtttgtttttgtgtttatttattttttatttaggttttgttttgtgtttgggatacgggggtttggttttttttttatgtttttttttattttttggtagtgtttataggattagatatgaaagtaaagttttttttaggaaatagtaaagtgttgagttgagtgtatttttggggggggtggttttttgtaattcgtgttttacgggtcggttaggaagttgagttcggagatgttaagattaagtttaggttgggttaggggttcggtttgtcgttgtgggtttttggttgagaggttagtgtagtattgagtagtggttagacgagggcgtaagagatagtaggtattatagtttgagtaggagttggaagtttgggtttgtagttttgggggttgttggtgatgacggattttgttttttttttattttttgttgtgtgacgtgggtaggttagtgttttttttttgaggaggttgtttttttagaatattaaggttgattttggagttatgtaggtgggtttaaattttggttagttttttattaagttgtgagattttggttaatttttgtggttttgagttttatagatatcgagaagggttatatttatttggaaattgattagatagttttgggagggaagataggtaggaggacggtagtgaggttttcgttattggaggtataggttttcggttgggtagtagtttggggtataggttacggttgggaatgggtgggtttttttaacgttgatagtttgtgatatatatagaggagggatttggtgttttttatatttgtagatttgaaagtagaattagggagtcgtaggggtagagagaggatagtttttttttagttttttttagtaagggtaggttgggtttgcgtagatagttttttttagggacggttaggagtgatattaagggtggattttcggttcgttttgtatttggtattttattattagtgtttagtagaaaggatttatagttttttgtgatggtgaggaaggagaaggtatagtagaggtttgggggttaggagggtttagttgtaattttgggtttgttgttgatttgttgtggatttggaaattttattgtttttttttgggttttagttttttttataagtttagatattatagatgttaaattagtttttgaataagagagaggagaggttaaggttggggtttggttttgggtttatttggtcggttttgaggttttggggattggtgggatagaaggagggtttttttggacgttagaagttttcgggggattaggattttatggtttttgtttgggttttgggttagtttgttttggattttatttagtagttttggttcggaattatggtaaaaatggggagggtagagtttttagaattatacggtaaaggtaggtaggggttattgggtatttttaggattttagtaggggttgagttttttttagtggttttggggtttttaggagatttttgtagagttattgtgagtggataagatgtattatatataggggatatatattggttatttagatatttggttatagggtagatatgggtatagttatatgtatatataagggtatttatatgtgggtatttagtattagggatatatatttagatatatataggtatagagttttatatgtatatttataagtgtgttagtttttgttaggtttgttttggttttcgagataattatattgtaggagcgttttacgttgtttttgattttgtatttttagttcggtgggataggttcggagatgtttagaaaggaattattatttttgggattagaattaatttttgtttttcgtttgatatgttaatatgaaggtattaggtatttagaatgtgagagtttttttgtttcgggggttttaaacgtttttggatgttttttgtttaggtagggaagttggtagtagagtttgtttttttttaatttgttatatggggtgacgggtgtggggtatggtttttgtgtgttagtggcggtttggtttggtaggcggttagaggtcgaggatttagtggttgtggttggtggtgttttggttttgaatattattaattatttaaaggaattataatattgagtcggttttttagaatttagagattttgttttttgtttatcgaaggttttcgggtagggtttttttttcggtttcgtttttattttaatagcgagttggtaggattttttattttcgtatagtggtttgttaggaaggtttttttttggatggagaggaagaggggttcgttggtgttacgtaagggatgttagagtttggaggataggttcggggtaggggttggtgtaggtagcgggaggcgttcggatttattcgatgacgtagattaggattattagttggattagtcggaagataacgtttatttttttattacgtattagtattatgcggggggtgttatattcgaagaggaaggcggttagttttttttggaatcgtcgtgttatggtgggtcggttggggtttagaattgagttttttgtacggtttttgtttttagggtgagtcgggtgttattatttacgtcgatggtagagtttttgggggttttttggttttttaggaagagtagggcggtgtaggtggagttagaggataggagttagaggttagttggaggtatttgggttggagagagaatttttgggtgattagagtagtttttggtttttggaaggtaatagattgtaggttagtttcgtttatggataaataaatttttaaagatagatggggcggggttggtggggttatttaggtttagttttattgttttttttggttttgcgtgggttttgttgggttttcggaaataggagttgttggtaggaaattataggttattcgttataggggtaaagataaagtttttagtcgattttttaagttattttttttttaaaatttggtaagatggagttttggttagggtttgggggaagttggagtttttttagattaggggatttttcgcgatttttttttattgttaaaatgagatttttatttttagttttatttattattttttatttttttttattagggttggttgtttcgtttttgggggtttgtagcgagtaaggtagagaggaaggaggttttgagttttagtttggtttgtgttcggttaatttcggtgttgagttggtatttttattttttagttttttttttttattgtttgttttgtcggggttattattagagggagagaggtggtaggtgtttagttaagattagtattatattcgttattagtgttatggggggtttaagattagtcgagagagtttgatttcggagatttttggttttgttattttttggttgtgggggttgggtgttattttgttttttcgagtttgtttttttatttgtaaattggggtaataagggttgttttttttaggtcgaggtttataggggatgggttttagtaatacgggatagagaattggaggttattattgagtttggggtatagtatttttgtagtttttgttttttttttttatttttagttcgggttttgaatataggggtttggggtgggtagagggttttacgttggttttttagagttggaggtttttttagttttatttttcgttttgaagatgagaaaattaagtttagagaagagaaatgagttgtttaagtttattcggggtggtattggaggtttaagttggaagtaggggtttttttggcgagtttttacggttttgtcgtcggagtcgttttatttttaaggttgataaggagtttttttgttggcgagttatgagttggaagtgttttgggtagggagttaggttttggggttgggaatttcggtagtttgtttgaatgggggttatttatagagggttgtttatggttttttttagtatttaggttagtttttttttgttaagtagattagttttatttttcgcggagtttttgttaatttagtgggtgttatgggtttttttaaagaaaatttagagatgttgggagttagaattgtggtggttacgtttttttttggtttgattttgattttagatagttttttttttagttgtttttgtggttattggaatgggaggtattaggatatagttgtttgtgatggggagtggggtgggtgttgagattgtgtgggttattttgggtttttttttagttatttttttttttgatatgcgttttagagagtgggtggggtgggagggaacggagggaggaagggagggagggagggaaaaggaagggaagggaagggagggagagagggaggaggaaagggaagggaagggaggaaggagggaggaagggagggagggagaaggaagggaaggaagggagggaagggaagagagggaggggagggagggaggggagggagggagggaagggagggagggagggagggaaggagtaaaggaaagaaggaagggagggagggaggagaaaggaagggaaggggagggagggagggagggaaggaaaaaaggaaggagggagggaaggagggaggaaagaagaaggagggagggaaaaaagggagggaggaaggaagagggagggagggaggagagagggagggagggaaggaaggaagattaggaagtttttttttttatattattattatgtttttttttttttttttttttttttttttttttttttttttttttttttttaaggagttatatttgttgatagagagattgacggatggattgatagatttgtttggatagattgatggattgatagagtatatatacgtgatttagttatagtttaggttttggttttggttttgagaaagtggattggtttggagtatcgttttatttggggattttattatatttatagtgtattttagggatttatatttatttttttgttgttgataattttataagagtaagatagttagttgtcggggttaatgttttttttattggttttaaaatgtatttttttgatttaaaggttgtgattttttatttttgggttttgttttagcgtttttagggatagatatttgtttttgttttgggtgtttggggttgaggtgggtaggatagaggttagagttttattttttggagtttggtagggttttttttataataggtttatgaggtaggttttagagtttatatttgatagattaggagattgaggttgtggggattgagtttttggtttatggttatatagtgagtagtttttatgtttgttggtggttgagaaggaggttttttaaagtttgagggtttggtttcgggtttattcgaagtttttagtatttgagagtcgttagttttgttttataagtttaaagatcgggtggtcgattcgggtattgggtcgggttttgtagggagatagttttgttgttaagtattcggtttcgggatagttttttcggtttggttaaatttagcggttttgtgtagcgtggaggttggaggtcggttggagttttcgagggagtagatacgggttttaataggtttttttagttatttaggggttcgaggatgtcgtaattatattttagttaaatcgtgatgttatttgggttagagatttttttaatgttatatagttttttagattttgattggagtagggttttgggttagtttggtagaggttgttaaggggaggttgggggagggtcgatagttacggggaggtttggggagtatagcgtgggtttttatgtttggcgttttttattgtttggattcgggttgttttttaggttttttttattttttaattttgggtgtgatttggtcgaagtttttttttcgtgtgtttaaaatgttttatttttttggtttttttttatttttttgggttatttttttttattttcggtttttttttgttttggattaagagaatttttgggaggttagggttggtggttcgtgtttgtaattttcgtatttcgggaggttgaggtaggaggattgtttgagtttaggagttcgagattagtttgggtaatatagggaaattttgtttttataaaatatatagaaaaaaaaattaggcgggtatggtggagtatgtttatagtttatagttgtttgggaggtcgaggcgggtagattatttgaggttaggagtttaagattggtttggttaatatggtgaaattttatttttattaaaaagataaaaattagttgggagtggtggcgggagtttgtaattttagttattagggaggttgaggtaggagaattatttgaatttaggatagggagattgtagtgagtcgaaatcgagttattgtattttagcgtgggggataaagtgaaatttagttttaaaaaataaaataaaataaaatagaaaaaaaattagttgagtatggtggtgtatgtttatagttttagttatttgggaggttgaggtgggaggattttttgagtttgaaaggtggaggttgtagtaagtcgtgattatgttattgtattttagtttgggtgatatagcgagagtttgttttaaaataatatattaattaaataaaaataaagaggatttttgggggttgggttgggttttgttttttaaatatttagtgttgagtatttaggtgggagatttgttttcgtttatcgttagtttttaattttgttgatatttttatattagtatggtggttatatttattttttttttggtatttatttttttttttttgtttttttttttttttttttttttttttttttttttttttttttttttttttttttttgaggtggagttttatttttgttatttaggttggaatgtagtgatatgattttggtttattgtaatttttgttttttgggtttaagtgatttttttgttttagttttcggagtagttgggattataggtattcgttattatatttggttaatttttgtatttttagtagagattaggttttattatgttggttaagttggtttcgaatttttgatttcgtgattcgttcgtttcggttttttaaagtgttgggattataggcgtgagttataatgtttagtttttttttttttttttttttaaatttaattgttttggggtgtaattcgtatataataaaacgtatttattttaagtatatggtttgatgagttttgataaatgtattagttttttttaaatttattagtttagaatattttcgtttttcgtttgtggtttatttttttttagtatttttaggtttaggtaattattgattcgttttgttattgtagatttgtgtagtttcgtttagagcgttagggaggtggaattaggtaggaggagttttttcgcgtttggtcgtttttgtttagtttagcggtttaggtttcgggtggtagttgcgtgtattagtggttggtttttttcggttgcgtggacgtattgtagtttgtttattttttatttgtttatggatatttgaggtttgtgttgggtgaagtcgttgtggatattcgggggtttttgtgcgtatgtttagtttttttttttttttttgttgtgattttgtgtttttattttttttaatatagttttatcggggttttttttattattgtgagga

SEQ ID NO: 1379 - DNA, 8423 bp, Artificial Sequence
  chemically treated genomic DNA (Homo sapiens)
  unsure 1765: n is a or g or c or t
tttttttttttttttattgtttgttttttattattattattattattattattattattattttttttttttttttaacgttggttttttgttttttgtttttttgtttttttttttttttttttttatttaattttagattaattttttgttgggtatattttgtgttttatatttttgttgtgatttttaatgaaataaattttaggaagtttattgattggattttatgataagtgtataatttataggagtagttgggttttttttggtataggataattttaattttttttttgtatattttttttttaattttgttttattttagtttttttttttttttattttattggtggatattagttgggaattttttatattttttttattttttttttttattttttttttggggaaggaaagggtttttttttttttttaaagtgaattttagaagtttaatttagaaggatattttaatgatatttttttaaaggatatgagatgaatttttattttataaattagggttttatcgtttttttttcgtaaattttaatagttgttttatttattagtttttaattttttttatattgttattagaattaggtttagtatttgtggtatgatatttatttagttaaatttgatggttttttggtttttatttagatgggagattttatattttatgtttatgagaagttttttttttttttttttgtttgtggtttttaattggaatttttttaatgatttttttatttttaatgattgttggattttttgtggtttaaagaaaaagaaaatagagattttttaaatatggtgataaaaatttttgtaaatataataagggtaatttttttgtttatgagtttaaaatttaatagatttgatgttttagtgatttttttttttagattataggtaaatcgttggttgtttttaagaagtttatgtagagaagtggaatatttagaagtttttgaaatattttttgattattaataattttaatatttggtttagaatttttttttttgagggaaggtttttgggagtaacgttttttaaacgtaatttgtgttggttattaaaagttaacgttttttttagtgtttcgtatttgtttttttttattatgggatagtggttgaatgtatagattttagtgataaatagtttatatttaaattttagtatttattgtgtgattatgggtgaattatttaatttttttgtattttagttttattatttataaaatgggaatataatggttaaatattattatgtatattttaagggtgaaaagagataattttttttatatgtatatagtatttgagtgtatagtaaaggtttatttttattgttattgttatatttattattatggttagttatatatattatttgtatttttaattaaattgtaaattttttgaagttaggtttttatattgttatttaaatataagggtataagaagggtaatttttttgtttatgagtttaagattgttattaaaagtaatggtaggtcgggcgcggtggtttatgtatgtttgtaattttaggattttgggaggttcgaggcgggcggattatgaggttaggagattaagattattttggttaattaatattgtgaaaatttcgtttttattgaaaatataaaaaaattagtcgggtatgatggcgggcgtttgtagttttacgttaggtaggagaatggtatgaattcgggggggggnaattggtggaagtttgtagtgattcgagattgcgttattgtattttagtttgggcgatagagtgagatttcgttttaaaaaaaaaaaaaaaaaaattaatatggaatgtttagggatgttatttaaatatgtaagaattttttattatgtttttaagttatttataattgatgtttaaatgtgaataatgatttttagattttttttttattaataatagttgaatgttttataaatagaaagttatagtaattattgaatatatgtaatttatttttataaggtaaaattttgatttaaagtataattgaaatataattgtgtagttaaatatgttgaatgtaaaagtaatgtttataaagtttgtttatttatttatttatttatttatttattttgagacggagttttattttgtcgtttaggttggagtgtagtggttcgattttagtttattgtaagtttcgttttttgtgtttatattatttttttgttttagtttttcgagtagttgggattataggtgttcgttattatattcggttaattttttgtatttttagtatagagggggttttatcgtgttagttaggatggtttttattttttgatttcgtgatttgtttatttcggttttttaaagtgttgggattataggcgtgagttatagcgtttagtttaaaatttattttttaatattattttttaaaaagtttgtggtgtatttaaaataattattttttaatttttagtaaggtgttagttttttgtaagtatttaatggtatttggattaagtgtatattttaaaatatttatattatgagttaatgtatttgtaataaatttttgagtgaagttagatattgtttaggttgtaaataaaaaatgtaaaggagtgaggatttaagatttattgagtatttttggaatttttaatggttttttttgttttttttttttttttaatagataattattttatttaggattatattaattaaataatatataaatgttttatgttaaggtttagaattatagatttatataattaggagattggaaggaaatataaaaagtaagattttttaagataattttatttatattgtttatttgaattatttatttttgttttattattaatttttatgttgtttaattgattataatttaaaatttagtgtatttatattatgtgttaagatatgtttttttttatatgtgtttttttaaagaattatttggattttgtgggggatatttttttttgtggtattaaagttaggagttcgtggtttttttttattttttaagggaatattattatgtagtatttgggattagaaagaaattttgatgttatatattttatagatattttttttttggatttttttttttttaagagaaaagtttttgttaatgtgttatgtaaaaatatattaattagtaatttgttaagaagtgttagattttatttttgtgcgggtttatttatatatgtttttgaatagttaatattttatttagtttttaattaaatttgtttaaatatatttttgaagtgtattgtttaaaatttatatttaaggtaagaaaacgagtttgttagtaaatgtagtaattaaggaagttttaagtttgtatttttaagatattagaggtaattgtaattaattattttaatttaaagaaatagaattggaaatattttttttttttcgttattttttattaaaattatattttagttattttggaattataatcgttttttacgtttattaatataaatgtattgtatttggtatttaaattatttttaaagggataaatttcgaattttttttttttattgtagtttttgatttttaaatgtattgaataggaggatttggggagtttgttttgtttgataggtgttaagtatttatgacgataaatttgagttgaagtaatgtgtaatatggattagtaatatttttataagattattttggaaatttttacgttgatgttattaatgacgtgggtttattagtatttgggtaattaataaaaaatagtattagaatttaaaaaaaagaaaaaaaaaggtaagaagggcgaaatagagttttttattttttttttaatttttatttttttggaggttcgcgtttttttggaatagtaggtttttgtatgtgttagaaattcggtttcggtaaagttagacgttttgtaatgataggcgtttttagttagggatttttggttgtttggagtttgaaaatatttggcgtggttttcgagggttttagaggtttttgttacggattggtcggttttggggttgtaggtagaaggttttaagcggtcggaagggttttttgtgtgttagtaattttattttgtcgagatagttggcggaagagggaaggagcgttcgcgggttaatcgtttgttagtagttattttggagcgtatttttttttttcgtcgtcgatttcggtagtagcgtgtcggtagaggttgaatatattcggtttcggcggagatttgttttttagaagacgttttttgttttttattgcgttttggaggacgcgggttggttgttgggcgagttcggcggaggtacgtttttcgttttttcgcggagtgcggattcgtttcggtgtttaaatttcgtttattttttagggagtttcgttttttcgtttaatttcggtatttcggatagagttgggtttggggaaggggtttttgaattacgcggacgttcgaacgggacgcgttgtagaagcgtacgagtttgcggttacgcgcgtttcgatggttgttaggagttgagtttagggtgggcggaggaagcggttagacgtttcgaaattgagttgtacgtttttaaggtagggaggaggaagatgtttttaattaagttgatttttgagttaaggaggttggggagtagtttttttaagttagagttttgtagagcgagttttttttgatttcgttgcgtttttggcgcgttttgtagcgcggattcgcggtttttcgggaaagcgtagtcggaaagttattcgcggcggttttttgcgcgttttgttgtgtaagttcggcgttgttagcggacggagaagttgttggtttgttcgatagtttagttcggtggcggttcggggcggattttatggttcgcggcgaacgcggggttagagttggcgtgggcgagtttttgcgcgttttttttcgcggggatttagttcgtttgttttttttcgttcgttggttttttcgatgtttgttgcgtttttggtcgtcgttgttttttcgtcgttttttatttttcggagtcgtcgtttaagtcgaggaggagagaatgatcgaggtgttgtggtcggttgtttttaacgggacggacgttgtttttttggtcggttcgggttcgttttgggggaatagtacggtcgtttttattgtcgtcgttttttcgtcgtttaaatgcgttttgattaagacgggtttttagttttattatttgtcggttgtttatattttggtatttattatcggttttttgggtaatagcgtggttatttggatgttcgttttttatatgaagttttggagcggtattttcgtgtatatgtttaatttggttttggtcgattttttgtacgtgttgattttgttagttttgattttttattattttaataaaatagattggattttcggggatgttatgtgtaaattgtagaggtttattttttatgtgaatttttatggtagtattttgtttttgatatgtattagtgtttatcggtatagcggtgtggtgtatttttttaagtttttgggtcggtttaaaaagaagaatgcgatttgtattagcgtgttggtgtggtttattgtggtggtggcgattttttttatttttttttatttaggtatcggggttcgtaaaaataaaattattatttgttacgatattattttagacgagtatttgcgaagttattttatttatagtatgtgtacgatcgtggttatgttttgtgtttttttggtgttgattttgggttgttacggattaattgtgagagttttgatttataaagatttggataatttttttttgaggagaaaatcgatttatttggtaattattgtattgattgtttttgttgtgttttatatttttttttatgtgatgaaaacgatgaatttgagggttcggtttgatttttagattttagtaatgtgtgtttttaatgatagggtttatgttacgtattaggtgataagaggtttagtaagttttaatagttgtgtggattttattttttattttttggcgggagatatttttagaaggagattttttcgagttataaggaaagtttttagaagaagtgaggtaaatttgtaatttaagagtgaagatatgatttttaatattttatttgagtttaagtagaatggagatataagtttgtgaaggtataagaatttttaaatatttttttgttgtaatatggtaggatgtttaatagaattaagtattttttttttttttaattttttagtttagaaaaaaattaaattaagaaaatagtgagttaaaaaaataatagaagtagaaatgtttatatttatatttagtttgtttgggtttgtttttatagttttttttttttttgattagaagtatgtataataaaataatattatttagttaaatatttatttttttttttgtttttaaaatgtgtaggtttttttgtttaaagtgtgtgtgtatatgagtattggggttgtttttgatattagtaatttttttaagaaaattagttttttgtaatttgagtttgtggtttatttagtttttattgtttttttaaaatttatagtaggaataaaaaatttatatttttagaaatatttagtatggtatataataaaatattaaatttattagtttattcggtattagattaatggatttttgagcggggtgttttttttagtgttttataagtatagatgatagttgattgagtttttttagggtattgaatagataagtaaagttaatgaatttaaaagtttgaaaagtgattgttttttagttatttttggaaaaggttttattatatattgggtgttaaatgtttgatggggaaagtttgtatatattatcgtattggtaaaatgtatttaaaataattaaagtgtatgtattttttttgtaaatattatgagtttttttagatattttgtgataaagagtatttatttgttttattgttgtgtaatgttttaggattttgtttgtgttttaggataagtgtttatttatatttgtaaaaataattttaagaattgtaaataaattatagattaaagattgagtaaagttaaataattgttagtaagttgaaggatattggataggaggatagtattttagaaaaggagaggttgatagttatttataaggtatagtttttaagtatatttttaaatgtatgaagtaattggggtgggtagaagatattttagaatgagggttttagtttaaattaaagttatggtggagaagatttttgttttttttaagtgtttgaaaatataaaatgcgatatgaaaagaagaaatagaatttgtataggttgtattgatagaatgggaagttataatttttgaataaattttatattttaatatttaaagaaaaaatatatatatggagggaaatatagagaattaaagtatttagatgttatagtattgaaaagtaaagtattatttaaattattaatagaagattattggttagtgttttttattatatttgttttttgttaggtgttaatgaaaaatttgtaaaatgttttaatagtgttaataattttaatgaatattgaattgttgtatgtttagtttttgaaatggttaaattttatataatgagaataataaggtgagataatgtaattgataattttaaataaatttagtgttaaaggaatttttagttttggaagttattttttataaagttaatattagagtttgtaattgatggtggtataatttgtttgaaagtattttataagtagagtaatatggggttgtatgttaaggtaagaaagaattttagtgtttcgtggattataatgataggaaatttttaggttttgattttagtttttgtaatgtttatgtagattgaggatttgtgagatttttagagtagttttattttatttaatttttggttattaagattaatgaagaaaagttgtatttaattttttaaagtagtgattttttttatatgtttagttttaatgtataggattatagaaattaaattaagaagaaatttattatatttttttattttgaggaaagagagggttagtaaagtttttattttattaggtttaaataatattcgttttagatttttataagataaaatttaaaatatgttattattttattgattttgttaaataagattaatattattaaattgattaagatggaaattataggatttgtattagatttgaatttgtagtttaatgatatatatttttataatatttttttattatttagtttttttttttttaggttttaggatgtttagt

SEQ ID NO: 1380 - DNA, 8423 bp, Artificial Sequence
  chemically treated genomic DNA (Homo sapiens)
  unsure 6659: n is a or g or c or t
gttgagtattttgagatttaaaagaaagaaaattaaatggtgaagaaatattgtaaaaatgtgtattattaggttataagtttaagtttggtataagttttgtaatttttattttggttagtttaatgatattgattttgtttaataaggttaataaagtaatgatatattttagattttgttttgtaggaatttaaaacggatgttatttgagtttgatgaagtgagaattttgttaattttttttttttttaaaataaggaggtgtagtaggtttttttttgatttggtttttataattttatgtattaaaattgaatatgtaaaaagaattattgttttggaaggttaaatatagtttttttttattgattttagtggttagagattgggtaaagtgaagttattttgaaggttttataaatttttaatttatataggtattgtaagaattgaaattaagatttgaaaattttttgttattatggtttacggggtattaaggtttttttttgttttaatatatagttttatgttgttttatttgtaaagtgtttttaaataagttatgttattattagttgtaaattttgatgttgattttatgagggatagtttttaaaattaaaaatttttttgatattggatttgtttgggattgttaattgtattattttattttgttatttttattatatagaatttgattattttaaggattagatatgtagtaatttaatatttattaaaattattaatattgttgaagtattttataaattttttattaatatttggtagagaataaatataatagaaaatattgattaatagttttttattagtagtttgagtagtattttattttttagtgttatggtatttaggtattttaattttttatatttttttttatatatatgttttttttttaaatattgagatgtaaggtttatttaaagattatagttttttattttattaatgtaatttatataaattttattttttttttttatatcgtattttgtgtttttaaatatttggaggaagtaagagttttttttattatgattttaatttaaattaaagtttttattttaaaatgttttttgtttattttagttgttttatatatttgagagtatatttggaggttatgttttgtggatgattgttaatttttttttttttgaaatattgtttttttgtttaatattttttaatttattaatagttatttgattttatttaatttttggtttgtaatttatttgtaatttttaaaattgtttttatagatgtgagtgaatatttgttttggaatataaataaagttttaaggtattgtatagtagtggggtaagtaaatgttttttattataagatgtttaagagagtttatggtgtttataaggaaaatatatgtattttaattattttgaatgtattttattagtacgataatatatgtaggttttttttattaaatatttagtatttaatatataatgagattttttttagaaataattggaaaataattattttttaggtttttaaatttattagttttatttgtttatttaatgttttaaagaaatttagttaattattatttatgtttataagatattgaaaaaaatatttcgtttagagatttattgatttgatgtcggatgaattgatgagtttagtgttttgttatatattatgttagatatttttgagaatatagattttttatttttattgtggattttaaaaaaataataaaggttagataaattataaatttaagttgtagggggttagtttttttagagaaattattaatattaaaaatagttttagtatttatgtgtatatatattttaaatagaaaagtttgtatattttaaaggtaaaagagaaagtaaatgtttaattaggtagtattgttttattatatatatttttagttagaaggaagagagattgtgaaagtaaatttaaataagttaagtgtggatgtgggtatttttatttttattatttttttaatttattatttttttggtttgatttttttttaaattagaaagttaaagaggggaaaagtatttgattttgttaagtattttattatattataatagagaggtgtttggagatttttgtgtttttataggtttgtatttttattttgtttgaatttaggtaaaatattgagggttatgtttttatttttggattgtaaatttgttttattttttttagaagttttttttgtggttcgggagagtttttttttgaaagtatttttcgttaagaaatagagaatggggtttatataattgttgagatttgttagattttttgttatttgatacgtggtataaattttgttattgaaagtatatattgttggggtttgaaaattaagtcgggtttttaagtttatcgtttttattatatggaaagggatgtaagatatagtaaaaatagttagtataatgattattaggtaaatcgattttttttttagaggagagttgtttagatttttgtaaattaaagtttttataattaattcgtaatagtttagaattagtattaaggggatatagaatatggttacggtcgtgtatatgttgtagatgaaataatttcgtaggtattcgtttgaggtggtgtcgtaataggtgatggttttgtttttgcggatttcggtatttgagtagaagaggatgggggagatcgttattattataatgagttatattagtacgttgatatagatcgtatttttttttttgagtcggtttagggatttgagggggtatattatatcgttgtatcggtgggtattgatgtatgttagaaataagatgttgttatagaggtttatatgaaagatgaatttttgtagtttatatatggtattttcgaagatttagtttgttttattgaagtagtagaagattagggttggtagagttagtacgtataagaagtcggttagagttaaattgaatatgtatacggagatgtcgttttagggttttatgtggaagacgaatatttagatggttacgttgttgtttaggaagtcgatgatgaatattaagatgtagatagtcggtaggtagtaaaattggaagttcgttttggttaaggcgtatttgaacgacgaggagacggcggtagtggaggcgatcgtgttgtttttttaggacgaattcggatcggttaggaaggtagcgttcgtttcgttggggatagtcggttatagtatttcggttattttttttttttcgatttaggcggcggtttcgaggggtaggaggcggcgagagggtagcggcggttaggggcgtagtaagtatcggaaaagttagcgagcggaagggagtaggcgaattggattttcgcgggagggggcgcgtaggggttcgtttacgttagttttggtttcgcgttcgtcgcgggttatgaaattcgtttcgggtcgttatcgaattgggttatcgggtaagttagtaattttttcgttcgttggtaacgtcgagtttatataatagggcgcgtagggaatcgtcgcggataatttttcgattgcgttttttcgaggggtcgcgggttcgcgttgtagagcgcgttagaggcgtagcgaggttaagggaaattcgttttgtagggttttagtttggggaggttgttttttagtttttttggtttaaagattaatttaattgggggtattttttttttttttattttagaaacgtgtagtttagtttcggggcgtttaatcgtttttttcgtttattttgagtttagtttttggtagttatcggagcgcgcgtggtcgtagattcgtgcgtttttgtagcgcgtttcgttcgggcgttcgcgtagtttaggaattttttttttaggtttagttttgttcggagtgtcggggttaggcgggagagcggagttttttagagggtgggcggagtttgggtatcggggcgagttcgtatttcgcggggaggcgaggggcgtgttttcgtcgagttcgtttagtagttagttcgcgttttttagggcgtagtgggaagtaggaggcgttttttggggagtaggttttcgtcgaggtcgagtgtgtttagtttttgtcggtacgttgttatcggagtcggcggcgagggagaggggtgcgttttaaggtggttgttggtaggcgattggttcgcgagcgttttttttttttttcgttagttatttcggtaaagtgaagttgttgatatataggaaattttttcgatcgtttagagttttttgtttataattttagagtcgattagttcgtagtaggagtttttagggttttcgagaattacgttaggtgtttttaagttttaagtagttaggagtttttagttgggaacgtttgttattgtagagcgtttagttttgtcgggatcggatttttggtatatgtaggaatttgttattttaagagggcgcgagtttttaaaggaatgagggttgggagaggagtggagaattttgtttcgttttttttattttttttttttttttttttaaattttagtattgttttttattaattatttaaatgttaataaatttacgttattaataatattaacgtgagaatttttaaaatagttttgtgaagatattattagtttatattgtatattgttttagtttaaatttgtcgttatagatatttaatatttattagataagataagttttttaaatttttttgtttagtatatttaaagattagaagttataatgaaaaaaaaaaattcgaaatttatttttttgaaagtaatttgaatgttaaatgtaatatatttatattgatagacgtaaaagacggttataattttaaagtgattaaggtatggttttggtagggggtggcggggggaggggggtatttttaattttatttttttaagttaaagtgattagttataattatttttagtattttaaaaatatagatttgggatttttttaattattatatttattgataaattcgtttttttgttttgaatgtaaattttaagtaatgtattttaaaaatgtatttgagtaagtttaattggaaattaaatgaaatattagttgtttaggaatatatataaatggattcgtataagaatggaatttagtattttttgataagttattagttaatgtatttttatatgatatattaataaaagttttttttttagaggaaaaaaaatttaaaaagaaaatatttgtaaaatatataatattaagatttttttttggttttagatgttatatgatagtgtttttttaaaaaataaaggaaaattacgagtttttggttttgatattataaaggaaaatattttttataagatttagatggttttttagaggaatatatataggaaggagtatattttagtatatggtatgaatatattgggttttgaattgtagttaattgaatagtataaaaattaataataaaataagagtaaataatttaagtaaatagtgtgaatgaggttgttttgaaaagttttattttttgtgtttttttttaattttttgattatatgagtttatgattttgagttttaatatgaaatatttgtgtattgtttgattagtatggttttaggtgggatgattgtttattaagagagaaaaggaagtaaagaaaattattaagggttttaggggtatttaataggttttaagtttttatttttttgtattttttatttgtaatttaggtaatatttgattttatttagaagtttgttgtaaatgtattaatttataatgtgagtgttttgaaatgtatatttagtttagatattattaagtatttgtagaaaattgatattttattaggaattgggggatagttgttttaagtgtattatagattttttaaaaaatgatgttaaaaaataaattttgggttgggcgttgtggtttacgtttgtaattttaatattttaggaggtcgaggtgggtagattacgaggttaggagatggagattattttggttaatacggtgaaattttttttgtattaaaaatataaaaaattagtcgggtgtggtggcgggtatttgtagttttagttattcgggaggttgaggtagaagaatggtgtgaatatagaaggcggagtttgtagtgagttgagatcgagttattgtattttagtttgggcgatagagtgagatttcgttttaaaataaataaataaataaataaataaataaataaattttgtaagtattgtttttgtatttaatatatttaattatatagttatgttttagttatgttttaaattaaaattttgttttgtgggaataagttatatatatttagtaattattataattttttatttgtaaaatatttaattattattaatgaagaaaaaatttaagaattattatttatatttgaatattaattatagatggtttaaagatatgataaaaaatttttatatatttaagtgatatttttaagtattttatgttaatttttttttttttttttttgagacggggttttattttgtcgtttaggttggagtgtagtggcgtaatttcgggttattgtaagtttttattaattnttttttttcgagtttatgttatttttttgtttggcgtgggattataggcgttcgttattatgttcgattaatttttttgtatttttagtagagacggggtttttatagtgttagttagttaggatggttttgattttttgattttatgattcgttcgtttcgagttttttaaagttttgggattataggtatgtatgagttatcgcgttcggtttgttattatttttaatggtagttttggatttataaataaaaaggttgttttttttatgtttttatatttaagtagtagtgtaagaatttgattttaagagatttataatttagttggaaatgtaaataatatatatagttaattataatagtaaatataataatagtaataaaaataggtttttgttgtatatttaagtattgtgtatatgtaaaaaggattatttttttttatttttaaaatatgtatgatgatatttggttattgtatttttattttataagtgatgaaattaaggtatagggaggttaagtaatttatttatagttatatagtagatattgggatttaaatgtaggttgtttgttattgaagtttatgtatttagttattattttatgatgaaaaaaagtaaatacggggtattgagagaaacgttaatttttagtggttagtatagattgcgtttagaaagcgttatttttagaagtttttttttaggagagaaaattttaagttagatattgaagttattgatagttaaagagtattttagaagtttttaaatattttatttttttatataggttttttaaaaatagttagcgatttatttataatttgagagagaaaattattgggatattagatttgttgagttttagatttataaataaaaaggttgtttttattatgtttataaagatttttattattatatttagaaaatttttattttttttttttttaagttatagaaaatttaataattattaagaatgggaaaattattggaaaaattttaattgagggttataggtagaaaagggaaaaagaaattttttataaatataaaatatgaaattttttatttgagtagagattaaaaaattattagatttgattaaataaatattatattataaatgttaaatttaattttggtagtaatatgaaggaagttgggagttgataggtaagatagttgttaggatttacggaggagagacgatgagattttgatttatgagataaaggtttattttatattttttagaaggatattattaggatatttttttaaattgaatttttgagatttattttaggaaagggaggagattttttttttttttaagaagaaaataagagaaagaaataggagaagtgtaaggaatttttagttgatgtttattaatgaagtaggagaaggagaaggttaagatggagtagaattggaaagagagtatatagagaaaaaattaggattgttttgtgttaaggagggtttagttgtttttataaattatatatttgttatgggatttaattagtaggttttttgaaatttattttattaagaattatagtaggggtataggatatagaatatatttagtagggaattgatttgaagttgagtgaggaaaaagggagaagagagtaagagagtaagaaataggaggttagcgttgagaggggagaggaaataataataataataataataataataataataaaaagtagatagtgaaaggaagaagaag

SEQ ID NO: 1381 - DNA, 6948 bp, Artificial Sequence
  chemically treated genomic DNA (Homo sapiens)
tttttaggttggatgattgatgagaatattcgtttaatttttaaagaattagttaatgagtttattaggatggttcgagatttattacggtatttggttataaaggtgagtagggagtaggaggtgttaaggaaatttagaaaaaggaggagttggttggaattaggattttttttaataattatttatcgatatagagagagagtgggtttggaatagtttttgggttagagttttatggtttgataaataagaagttagaggaagtagagttggagttagaattagatttagatttagatttggaagtagaggaggataatttggtaattattatattgggtttcgtttttagtttattagttggaatatttaatcggttacgtggggtaagataatttttaattatttaatattttgtattttgagtttttataaattttatagatatttagattaattatttaaaggtttttatggtgaatgtagatttttttttttattttaattttttttttatttttttattttagagttagagttttttaagtttattatttggatatatgtttatgaattagggtaattttggggagttttgttaggtaagttttgttgttgagaggttgggttttaggattagattgatacgagtagtatggaagatattagaaatttttgaggtttaattagtgttttgtaaaaaagaaggtagtgagggtcgggcgagttggtttatatttgtaattttagtattttgggaggttagagagagtggattatttgaggttaggagtttgagattagtttggttaatatggtgaaatttcgtttttatttaaaatataaaaattagttgggtgtggtggtgtatatttgtaattatagttatttaggaggttgagataggagaatcgtttgaattcgggaggtagaggttgtagtgagttgagattgtattattgtattttagtttgggtgatagagtaagattttgttttttaaaaaaaaaaaaaaaaggttaggtgcggtggtttacgtttgtaattttagtattttgggaggtcgaggtgggcggattatgaggttaggagttcgagattagtttgattaatatggtaaaattttgtttgtattaaaaatataaaaattagttgtatatgatggtaggtgtttgtaattttagttattcgggaggttgaggtaggagaattatttgaatagggaagtagaggttgtagtgagttaagataatgttattgtattttagtttgggcgataagaataagattttattttaaaaaaaaaaaaaaaaaaaaaaaaaggtagtgaataatttaatatttttttaaataaattttttttttttttttattatgtaaatttttttgtattattttttgtttatttttttttttaggagtttgtagtttttgggagtagtgaacggtgttttcgtttagtttttttatatttaatgttacggggatgtttggtattagagttattagaggggtatgtaataggttttgaggttgagttttaggagaaagtgttaatgtgtaggagtcggagtaggagtcggagtttacggttacgcggagatagcgtttattatttttagcgttatagtttgttgatttttgttattttattttttttattcgggttagaggaagaggatgttaacggttatgttatgttagatatatattttaaaggtgtttgattttttttagggttttttttaattttttttcgaatttttttttcgggtttttttttttttttttttgattatatgtttttttgttttattaatttttttaaatttttttttatttttatgaagttttttatatatttagtttttttttttaatttttaggtatttttttttttcgggaaggtattttttttttagtgggttttagttttgttttgggtattgaagaagaagatgaagatgaggagtatgaatatatgaatcggaggagaaggtatagtttattttatttttttaggttaagtttttttgaggagttgggttatgagtatatggatgtggggttagattttagtgtttttttgggtagtatatagagttgtttattttattttgtatttattatgtttattgtaggtataattttagatgaagattatgaatatatgaatcggtaacgagatggaggtggttttgggggtgattatgtagttatgggggtttgtttagtatttgagtaagggtatgaagagatgagagttttttaggggtttggatattaggttttttatgtttattatgttcgtttaaaaattttacgtagtttagaggttatagattttgtttttgataattttgattattggtatagtaggtttttttttaaggttaatgtttagagaacgtaatttttgttttttgtggtatttagggagtatttaatggtagttagtgtttttagagggtatcgttttttttttatttttttttttttttaggttttagttttttttttttagttttagataattttatttaatttttggaggtttttaaatattttgatataaaatttttatggtatgtagttagttgtgtattttttttttttttttaattttaggaaaggttttttttattttgtgtgtttttttagttttattttttagtttttttataggtatttttggagatatgaaggattattttttatattttttttttttaggtttttgattatttggaattaggtttttatgtgtgtttttgttttttattagattgttaagaagaggaaagggaggaaatttagtagaggaaagtgtaattttggtttatgatttttaattttttagaaagatagaagtttaaaatttgtgaagaaagaggttaggagtagatattgattattattataatttagtatttaattatgagttaggtattatattaaattttatttatattattttatttagttttttattatttttaaaataattttgtgatatatatattattttattttatataaagggaagtcgggtatggtggtttatgtttgtaattttagtattttgggaggttgaggtagaaggattatttgaggtaaggagtttgagattagtttagttaatatagtaagatttttatttttttaaaaaaaaaaaaaaaaaaaaaaaaaaaattttagaattgggtgtagtggtttatgtttgtaattttagttagtattttgggaggttgagatgggaagattatttgagtttagaattagagataagtttatggaaatatagtaagatattgtttttataggggaaaaaaaaaaaagaaattgagttttaaagagatgaaataaattaagtagtagatttaggatgtaaaatttttttaatttttgtgtatgtgtttttattgtaaggtgttaagaaaaattgatttaagttatagtttttgtttaaggggtattgttttttgtttttgtattgaattaagtttaattttaatagttatatttttttatatttagatattttattttaggaagtggtggtgggggtagttagaaggaaaaataattggatatttttgtgtaaattataatttatatgtgtcgtaaatgatttttattttttattcgagggtaaatttataaggatttttaagatttatttttagaagttatttttatttagtagtgagaagtttttaggtaggatagaaaaaagatttagttttagttgtatatttttgtttttttggatggggaattaagggaaaacgtttgttgtattattgaagttttttgttttgtttttatacgtgtttgaataaaaatgttaaagtttttttttagttttttgtttgttaaatgaagatatttcgtatgttagataagagatttgttttttagtagtggatatttatttttttgtgttttgatagtgttattttgttttatgtagttttttttagttttattattatttttatttttttagaataattatagcgtatagttttttttattaagggttttagtaggaatttataaggtaattaattgggaataataaaaagaatttacgtgttttaggatttataaaaagttttataagtttttttttagaggttaaatattgaaatttttagatgtttttgaatttattattttagaaaagttattaaatttttttatttttttacggtaagaatttttaataaatatgtttttttgaatattttttttaggtgttttatttaggtgtttgttattggaataataaagttatgttattttattaggagttcggtttttagattgcgaggtttttaaatggatgattttttcggtgtttggttgtttagttagttttcgttattagtatttttggtttttttttatttgtttgtttttttttgtttttttagtttcggaggacgattggatcggttgggcgggtttcgttagtcgatttagggattcgaagaagggcgtatttagttttttcgatttaggtgtagatattgtttattcgttgcggttttattttattttatttttgttcgttcgattttaaatttattttttcgtcgtagtttcgtttttttttttttagttcgtttttttttgttattggttttcgtttagcgttttcggtggaagtggttttttcgggagagattacgtttttttttaagttttttaacggtttcgttttttcgtcggagtttgattttttttagagtgttcggcgatttcggcgtgcgaggtttttggagggtaaggttttagggtttggtttaggagcgcgagaggtaggttgggaattgtagttcgaaggttttcgagagcggttagagtttggcggtcgagaggattagttgttttagcgtgttttgcgttttagttcgcgcgttcgtagtttttcgttttcgtttgtttgttcgtttttttgtttgttcgcgttttcgttcgtttttttttcgaggatcgaggggattttgattatagtttgtggttgggaagggagatagaggcggcggcggtttaggggaaacgaggttgtagtggtggtagtaggaagatgtcgggcgaggacgagtaataggagtaaattatcgttgaggatttggtcgtgattaagtataagatggggggcgatatcgttaatagtgagtgcggtttcgggggtcggggaattaaggttgatagggaaaggtaataggttggttcggaaggggttggagcggaggggttatgcggattgagttattgaggggttcgtatcggttcgttgggtacggcgtggtgggaagattcggtgtcgcgtttgggatttgagcgggtaggtttaggttgaagtttatggaggtgcgggtcggcgattaggatgagcgtagagaggggattttggtaggtttcgattcgaggtcgtttgttaggaggtaagacgtgtttttttttgtttttattttttattttcgattattgttttttttgattttggtagcggcgaggttatttcgaaaaggaagcgtttagttattggcgatagaagtgtttttttgtttttgtagcgttttcggggcgttaggagttaagtcggtacgtgttgttgggttttattgcggatggttggttttttttttatttcgttagtgtttttgatattagtttttttattattagtttttttattacgtgttttgttggagtttttttttttttattttagtttttattttggtgggggtttttttttattttgggttagttaaggagatcgttggagagtatttttggagtttttaatgtaagttttggagatatatatggttttttttgaagttatttattattattatttttttaatttgtgtagatagttttagttagtatttatatttgttgtttttagtgatttgataatttaaatgttttggggttttcgttttattttaattaggtaagtttgtgaatattattggaaaagggaggattgattttaggatttttataagttatttttattttaggtgtgttttgacgattttagtagttgtttgttattttaggtagatgttatttttttttttttttttttttagttagtttttttattttattttagttagggagatataaattgtttgttattgtgtttttaaatggttttaatagtaaagatggtggggaataggtatttaggatgtttttcgttttgtgggtgaaaatttgagttttattagtttttaaagaattattaaaattgagatattaaaagttaaatttgtgttttatattatagtggatatttagtatcgtattttggtttttggtgttttttagtatttgagatattagtggtttgaattagaaaattttttatagtttataattttggttttatattttttttagataagttatgatttttcgaaatgaaatttagggattttagattaagtttttttggtttatgtatttgtttatgaggaaataagtttatatagattgagatttttaatatttaattagagtgtttgagaaaggaatgcggtaatatttaatagtgtatcggtttcgagttagtaattttgtttatttttttgtttttgatgtttataaattttatttagtttttgcgtgtatgtggggatattatggtaagaattttttgaagtttataattttgttttgttatattaaaggtagtatttttggaaagtttgaggttttgtttagggagatggattgtatatatttagttgttatataatgtaaggaagagaagggaatgttgattttttagttttagggtaatggtattagggagtattatggaaatttttaaatttaatttttaggtattttttgggtggtaattagataatgaatatatataaggttgatatgatgggattttgtttttagg

SEQ ID NO: 1382 - DNA, 6948 bp, Artificial Sequence
  chemically treated genomic DNA (Homo sapiens)
tttgaggatagaattttattatgttagttttgtatgtatttattgtttagttattatttaaggaatatttggaagttgaatttaagagtttttataatattttttggtgttattgttttgaggttgaaaggttaatattttttttttttttttatattatgtgataattgggtatatataatttatttttttaggtaaggttttagattttttaaagatgttatttttggtgtgataggatagagttatgaattttagagggtttttgttatggtatttttatatatacgtaaagattagatgaaatttataggtattagggataagaaggtagatagaattgttgattcgaagtcgatgtattgttaaatgttatcgtattttttttttagatattttaattaggtgttaggaattttaatttatatagatttatttttttataaataagtgtataagttaaggaaatttaatttaaggtttttgggttttatttcgggggattatggtttatttaaaagaaatatgaggttaaagttataaattgtaagagattttttgatttaaattattagtattttaaatattaaaaggtattaaaaattagggtacgatattaaatgtttattgtgatataaagtataggtttgatttttggtattttagttttggtgattttttgaaagttggtaaaatttagatttttatttataggacgggaggtattttaaatatttgttttttattatttttgttgttaaaattatttaaaagtataatgataagtagtttgtatttttttaattggaataaaatggaaaggttaattggaaagagagaaaagagaaagtggtatttgtttagagtgataggtaattgttgagatcgttagagtatatttggagtaaggatgatttgtgaaaattttaaaattagtttttttttttttagtaatgtttataagtttgtttagttgggataagacggagattttaaaatatttgagttgttaagttattgagaataataaatgtgaatgttaattaagattatttgtatagattggaaaggtggtagtaatgagtaattttaagaaaagttatatatatttttaagatttgtattagaagttttaggagtgttttttaacggtttttttagttggtttaaggtagaagggggtttttattagggtaagagttgaagtaaagaaggaaaggttttagtaaagtacgtggtggggaagttggtggtggggaagttggtgttagggatattagcggagtaagaagggggttagttattcgtaatgggatttagtaatacgtgtcggtttggtttttgacgtttcggagacgttataaaaatagaggggtatttttgtcgttaatagttgggcgtttttttttcgaggtggtttcgtcgttgttagaattagaggaagtaataatcgggaatgaaggataggaataagagaaaatacgttttgttttttaataaacggtttcgggtcggagtttgttagggttttttttttgcgtttattttggtcgtcgattcgtatttttatagattttagtttgggtttgttcgtttaggttttaggcgcgatatcgggtttttttattacgtcgtgtttagcggatcggtgcgggttttttagtagtttagttcgtatgattttttcgttttagtttttttcgggttagtttgttatttttttttattagttttgatttttcgattttcgaggtcgtatttattgttggcgatgtcgttttttattttatatttggttacgattaggtttttagcgatagtttgtttttgttgttcgttttcgttcgatatttttttattattattattgtagtttcgttttttttgagtcgtcgtcgtttttgtttttttttttagttataggttgtggttagagttttttcgattttcgaggagagggcgagcgaaagcgcgagtaagtaagggagcgggtaggtaggcgagagcgagaagttgcgagcgcgcgggttgaggcgtagggtacgttgggataattagttttttcggtcgttagattttagtcgttttcgagggttttcgaattataatttttagtttgtttttcgcgtttttaagttaggttttggggttttgttttttaagggtttcgtacgtcggaatcgtcgggtattttgggaagggttaggtttcggcgggaaggcggagtcgttggggagtttgaggggaagcgtggtttttttcggaaaaattatttttatcgagaacgttgagcgagagttagtaatagagaggggcgggttgaggggagaggggcggagttacggcggggaaataggtttaaagtcgagcgggtaggggtggagtagagtggagtcgtagcgggtgggtagtgtttatatttaggtcggggaggttgggtgcgttttttttcggatttttgggtcggttggcgaaattcgtttagtcggtttagtcgtttttcgaagttgggagaatagggaggggtagataggtggaagaagattaagggtgttggtaacgggggttaattgggtagttagatatcggagggattatttatttaaaggtttcgtaatttagaggtcggatttttaatgaagtaatatgattttattgttttaataataggtatttggatggagtatttaagggaagtgtttagaaagatatgtttgttgagagtttttatcgtgaaaaaataaaaagatttgatgatttttttaagataatgaatttagaagtatttggaggttttagtgtttggtttttgaaggagggtttatagggttttttataagttttaaagtacgtaggttttttttgttatttttaattggttgttttgtagatttttattaaaatttttaatgaaaaggattatgcgttatggttgttttaaagaaatagaagtaatagtaggattagagaaagttgtatgggatagagtagtattgttagaatatagaaaggtgagtatttattgttgaggagtagattttttatttaatatacgaaatgtttttatttgatagataggaagttgaaaaaaaattttggtatttttatttagatacgtataaaaataaaataaaaaattttagtgatataatagacgtttttttttagttttttatttaaggggatagaggtgtgtagttgaagttggattttttttttgttttatttggaagttttttattgttggatgagaatggtttttaaaagtggattttggggatttttgtgaatttgttttcggataaggagtgaagattatttacggtatatgtggattatggtttatataaagatgtttagttatttttttttttgattatttttattattattttttgagatgagatgtttaggtataggaggatgtggttgttggggttagatttgatttagtgtaaaaataagaaatagtgttttttaaataagggttgtaatttaaattagttttttttggtattttataataagagtatatgtataggaattgggaggattttgtattttggatttattgtttaatttattttatttttttaaggtttagtttttttttttttttttttttgtagagatagtgttttgttatgtttttataggtttatttttaattttgggtttaagtgatttttttattttagttttttaaagtgttggttgggattataggtatgagttattgtatttagttttaaagttttttttttttttttttttttttttttaaagagatgggggttttattatgttggttaagttggttttaaattttttgttttaggtaatttttttgttttagttttttaaagtgttgagattataggtatgagttattatgttcgatttttttttgtgtaaaatgagataatatgtatgttatagaattgttttaaggatgataaaggattaagtgagataatgtaggtgaagtttagtatgatgtttggtttatagttaagtgttgaattatgatagtaattaatatttatttttaatttttttttttatagattttaagtttttgtttttttagggggttaagagttataaattaaaattatatttttttttgttaggtttttttttttttttttttttgatagtttgatgggaaataaaggtatatataagagtttagttttaagtagttaagagtttgagaggaagggatatggagagtaattttttatatttttaggagtgtttgtgaagaagttgaggaatgggattgggaaagtatataaaataaggaaaattttttttggggttgggaaagagaagaaagtgtatagttggttatatattataagaattttgtgttaaaatgtttaaaagtttttaaagattgaatggaattgtttgggattggggaaaaggggttgggatttgggagagagagggaatagggagaagacggtattttttaaaggtattagttgttattaaatgttttttgagtgttatagggagtaggagttacgttttttgggtattagttttggggaaaagtttgttatgttagtaattagggttattaaaggtagagtttgtagtttttaagttacgtagagtttttaggcgggtataatggatatggggggtttgatgtttaggtttttgaaaagtttttatttttttatatttttgtttagatgttgggtaggtttttatggttgtataattatttttaggattatttttatttcgttgtcgatttatatatttatagtttttatttggagttgtgtttgtagtgggtatgatgggtatagggtggagtgggtaattttgtgtgttgtttagagaggtattgaggtttgattttatatttatgtatttataatttagttttttaagggaatttggtttagggggatgaggtggattgtgttttttttttcggtttatgtatttatattttttatttttatttttttttttagtatttaggatagaattgagatttattgaagaaagggtgttttttcgggaggagggagtatttgggggttgagaagaaaggttaggtatgtgaagaattttatgagggtaggggaaagtttgaaaaaattaataggatagagaggtatatgattagagaagaaaaaagaggagttcggggaaagaattcgaggaaaaattgaggaaagttttaggaagagttaggtatttttgaggtgtgtatttggtatgatataatcgttgatattttttttttttaattcgggtggggagagtggggtaataggagttagtagattgtggcgttgggaatggtaggcgttattttcgcgtggtcgtgggtttcggtttttgtttcggtttttatatattgatatttttttttggagtttagttttagagtttgttatatgtttttttgatgattttgatgttaggtattttcgtggtattgggtgtagagagattggacgggggtatcgtttattgtttttagaaattgtagatttttaaggaagaaaataaatagaaaataatgtaaggaaatttatatgatgaggaaagaagagagatttgtttagaaggatattgggttgtttattgtttttttttttttttttttttttttttgaggtggagttttgtttttgtcgtttaggttggagtgtagtggtattattttggtttattgtagtttttgtttttttgtttaagtgatttttttgttttagtttttcgagtagttgggattataggtatttgttattatgtgtagttagtttttgtatttttagtatagatagggttttgttatgttggttaggttggtttcgaatttttgattttatgattcgtttatttcggttttttaaagtgttaggattataggcgtgagttatcgtatttggttttttttttttttttttaagagatagggttttgttttgttatttaggttggagtgtagtggtataattttagtttattgtaatttttgtttttcgggtttaagcgatttttttgttttagttttttgagtagttgtgattataggtgtgtattattatatttagttaatttttgtattttgggtagagacggggttttattatgttggttaggttggttttaaatttttaattttaggtgatttattttttttggttttttaaagtgttgggattataggtgtgagttaattcgttcggtttttattgtttttttttttgtaggatattgattaaattttagaggtttttaatgttttttatattattcgtattaatttgattttaaaatttagttttttagtaatagaatttatttggtaagattttttaagattattttggtttatgggtatgtatttagatgatggatttaaaaggttttggttttaggatgaaaaaataaggaaaaggttaagatgaagggagaaatttatatttattatgggggtttttgagtagttaatttgggtatttgtagggtttgtgagggtttagggtgtaaagtgttgggtaattagaagttgttttattttacgtggtcgattaagtgttttaattggtaggttgagggcggagtttagtgtggtggttgttaggttgtttttttttgtttttaagtttaggtttaggtttagttttggttttagttttattttttttagttttttgtttgttagattatggggttttggtttaggggttattttaggtttattttttttttatatcgataggtgattgttagggggaattttggttttagttaattttttttttttttaaatttttttagtattttttattttttatttatttttatgattagatatcgtggtgggtttcgggttattttggtgaatttattggttagttttttaaaggttgggcgaatgtttttattaattatttaatttggaga

SEQ ID NO: 1383 - DNA, 12269 bp, Artificial Sequence
  chemically treated genomic DNA (Homo sapiens)
ttgaatttgaatcgagggttgggttgattattaatattgtagttttttaataagtttgtagaggggaagggtagtttagtattttagtagtatgaatattataaaaaaaaaattagggtaggcgtagtggtttatgtttgtaattttagtattttgggaggttgaggagggaggggttatttgatattaggagttttagattagtttagataatatggtgagattttgtttttacgaaagaataaaaaattttaggaggtatggtggtatgtgtttgtagttttagttattcgggaagttgaggtgggtggattttttgagattaggaatttaaggtcgtagtatgatttgatggtatttgtgaagagttgttgtattttagtttgggtaatagaataatattgttttagataaaaataaaagaaattagaaaaattagtatgtattattgtgagaatataggtgaataatttttgtttaagaaaaagttaaatgtgaattatagttgagttatttatattacgatggttgagtgaatttgtgtttgatttagttatagtttagtttttttgtagaggtagaaagtagagcggttgaagtgtgtgtaggttttttatttttatgttttaggtttaaattttgggtttttattttttttagtgattgcgagtttaggttttagttttttaatttgtgaaatagggattataatagtatttgttttaagggttgttgtgagtaatatatgaagtaattattataaggtattgagtatagagtttgagagtatgagttcgtaaatttattgtgagttttagttgttaatttaaagtagttttttgttgttaagtcgttggttaaagatgtttaagggttatggtttagagagaagtatttgaatttatttaagtagttgggttgggggatttcgtttggttgtttcgttagtttttgttttgtagaggtttttatttcgtaggttagatgtgtggtttattttttgtttagtttttttaggtttgcgtaggagtttattatttgtttattggtttgtaagttatttaggggttgggcgtttatagagttatttaaggcggtgatttatatttgtaattttagtattttgggaggtcgaggtaggtggtttatttgaagttaggagtttgagattagtttggttaacgtagtaaatgaaaattcgtttttattaaaaatataaaaaattagttgggcgtggtagtatatgtttttaattttagttattcggggaggttgaggtagaggttgtagtgagttgagatcgtattattgtattttagtttgggtgataagagtgatattgttttaaaaaaaaaaaaagttattggatttttttaagttagttttttatattttatattaggagggttatttatggtgttttttgcgtcgggttgtggtgggtttttatacgaatttttatatttttattttttatggtagttagaggagtttttaaaaagggtaaatttgtcgggtacggtggtttacgtttgtaattttagtatttttggagggggaggtaggaggattgtttgaggttagtttgggtaatagagtgagagtttattttttaaattaaatttaaaaatataaaaataaaatggttgggcgcggtggtttacgtttgtaattttagtattttgggaggttgaggtaggtggattgattgaggttaggagttcgagattagtttggttaatatggtgaaattttgtttttattaaaaatataataaaattagtcgggtgtggtggtgtgtgtttgtaattttagttattcgggaggttgaggtaggggaattgtttgagttagggaggtggaggttgtagtgagtcgagattgcgttattgtattttagtttggacgatagagtaagattttatttttaaataaataaataaataatttttattaaagggtaaattagttaaatttttaaaagaattttgagaatttagagtttattgttttgataattaaatttaatatttggatttagtttggtaagtgttttgtgatttagttcgttatttattttttattttatttttcggttatgttttaagaagtgtttgttttttaagtgtataagtttatgtttttaggtttatgtttttgtttttttttttgtttgggatattttttttttagatttttatatttttgtttttttttttagttttagtttaaatattatttttttttagaggttttttttgattattttagggatagtagttttttcgtttttttaggtatttttatattattttttttattatttttttttagagtttttaggatgatttgaattttttttataaattggtttatttatttgtgaattgtttgtttttttcgttataattgaagtattggaagaggttttgtatttagtaggtatttaatgagtatttgaggaatgagtgaatgaaatgtttagtgtataattaatttttataaaagtagtttttttttttatatataatttatcgttattatagtttttttttttgtttattcgtttcgttgaggggtttttgagaattttcgtagaggtttttattagttaaaaagtatttgtatcgttagagagggttttttattgtcgttcgtagtgttttttgttgttacgtgtagttttttgagtatgagtttgttgatataggttggtatacggtgtttggtttttgtaaatgttttttgtttttaggtgtgtcgtgttttattgaaggatagtatttatatttttttaggtattaattgattttttttttagtaatgtttgttttagggattaaagtttgtggaggagtttataatttttagatttatttgttttttttttggtagttagtatatttgttattttattttttttaagtttttgataatatcgttttagatatgttgatttgatggtattagttaacggaaagattttttggggtttgtcgtaggttagaggataggtttttcgggttatatttaggggcgattgagttaattttttacgttatttttttttttttttgtttaggacgattttatagtttatgatcgtttttttttttttttttttgtttgttttttttttttgttttttttttaagtattatagtgattttttatttatttagtaaagaaatggattattttatagtagtgaatttttaaaataatgttttttaagtattaaaattttaaataatatatttttaaaatagttttgttgaggtataattgatatattataaacggtatggatttaaagtgtataatttgatatgttttgatatatggatatatttatgaaattattattataattaagataatgaatatgtttattatttttaaaagttttttttcgtttttttttgtttttttttttaagtaagtattgatttgttttttaaatacgtttttaatgttataagggtttatatatttttttattttagaaaatggagtatgattaatatgattgattttttttttgatttagtattattattaatacgatggaaagtgattttagatgttatgaggatgtatgattgtttgttttgattattaaacggtttattgttgtgttggtatattgggtagttttaagtttgggagtttttttttttattgttagttgttttagagtttagtttttagtagataatttttgttgtttcgaattttggtatattaattattattttgtgacgtttttattttttattttgcgatagtggttttttgttgggagagatttttgttttttaagggatatttggtaatatttggagatttttttggttgttattatgggagcgggaatgttattagtagttaatgtttagtgattagggatgcgattgaatattttgtaatgtagagtgtagtgttttttatagagaattattcgatttaagatgttgataatgttaaggttgagaaattttgtttaggatgataaattgattgaaaatttaataaggggatcgggcgtggtggtttacgtttaataattttagtatttagggaggtcgaggtgggtgtattatttaaggttaggagtgcgagattagtttggttaatatggtaaaattttatttttattaaaaatataaaaaaaaaaaaaaaaaatacgagtggcgtaagtttgtaattttagttatttgggaggttgaagtatgagaatcgtttgaatttagaaggtagaggttgtagtgagttgtgattaggttattgtattttagtttgggtaatagagcgagatttttgtttagaaaaaaaaaaaataaatttataaaataaataaataaaaaaaattatgaggattgagtgatttatatttttgaatcgagagagagaaggatgggtagtaggtttgttgaagttggaaggttagggaggtcgtagattgaggaagattttggtgtgttttaggtatttttatgtaattttattagagaggtggtttttggttttttatggataagttttaagggatttagttatggggtattagagtttagcgtttagtagttgtttaatgaatgtttgttaggcgagattgtatttaaagtatttattaggtatataattgtggtagtattggttggttatggaaggtaaggtagaatataaggagttggagttggcggaaggaagttattaagttagttagtggttgggatgtagtaaagttaggtagaaggtaagtgtagatttattttaataaatgaggaaaatgagaagggttggttggttatgttaggatttagttttagtgcgattagatatgttattattatattatttttagtttttttttttatttatagatattttgtttgtttgttatataaagaaggtttttttaaagtggtttagttagaattggaagggtttcgttttgtgaagggataggagtttgattgttgtagttgtagtgagtggcggggaagtagtagcggttaggatgaattttaggtgttttggagttggatggtgaagtatggatatgttttattcgattttgtattgatttaaaggtttaattattttaggagtttttgtagatatttttgaaaaatgtaggtaggtaaaaagaagaaaataaagatcgtaaatgtgatttttttattcggagagaatattaatggaattttgttgtgtatttttttatgtacgtttgaatgttgtgtagatattttgtttataattaggtgtgggtgttgttgtcgaaggttttatttgttgtgtttgaggtggattagagattttagagaagatttttagagtattttaaggagataataggagtgtttggagttaggatgattgggtggatttaggattatgtgatttttaggagtttttttggattagttttaaattaaggataaagagaggtttagttggatttttttttttagagttttgttgggaaaatggagtttttttatagtttttatttatttattaggttttgttttttttatttatttttagatttttgttatatgtttaagttttgttaattgttgtgtaaaattggtaaggtgggatttagaggattttgggtttttagggttttaggttaggagatttgggttttagggttagttgagagtgataaagagaataatatttgtttataggatttgttgtaatgagataaaggtagaagttattagttgtggttaaatgggatttttttttagagaagttttatagagagtggtttttaaattttttttagtagtagaattgttgtaaaatataattttatgtgaaattttaaaatgtgagatattttgggtgaagtagagagaggtgtttaattgtttaattttgtttttattttttttttttagggaggtatttttgagaatttattttaaagaattttgttttatgtagattgaagaggtaagttggttggaagaaattgggaagttttattttttatcgtttttgtttgggtggtagttatttgagtttaggttagtttttttttttttaaagatttattgcgggtttttttggggttagtttttaggatgggtggggtatttgaagtagtaagtattgttatttttttgggttgattttttttttaggtttgaggataagtgggtaggtggggttagttttgtttttgtttttttttaatggagtttttttgtttatagtttaaggaagaagcgtgagttattttttgttttagtttgattgttggagtattgtttttttaattgtggttggcgttatttagtgtggtttttataagttttagttttttggcggaggggaagtttttattttgggataaggttaattggatttattttttcgtttaattttgaggatttagtattgtttttttagtttttagtttttgtagtgtttgtaaaggtgttcgaatcgtatttgattttatttattaaatattatttttattttatagaggggtaaattgaggaagtttttgagaaattaatttgtttaaggtgttttagtaaaaaatagtgttttagggatttgaatcggtttgttgattgattttttattagttgttttaagaattattatgatttaatttttttgggttttagtttttttttttataaaatgtagatagtgatatattaaaggtatttaaaggaaaatgtattgtatttattttatggggtatgtggtgaggataaaacgggttgatataggaaaagagtttttaatggtgtttggtttatagaaaatatttagtggatttttttttttttattattcgggaatttgtgttaaggaggttataggttgattttgtgtagttaggttattttatagggagcgagaagagatgggtataggttattttgcgattttggaataatttagtttgggaagtttttggttatattttttttttttttttttttagtttaagtagcgtcggttttagttaagtagtataaacgttttttagggtttagggagggagaggtttcggttggtatattgtaagtagtttggatttaggttttgttaaatattttagttttttgtaggatttgaggtttgttggttgtgggattttgcgtaaattatttaaacgttgtgcgttttagtttttttatttgtaaaatgggattaataattttagtttgaaaggattatgtggattaaattatgtatataagaaggagataatgtaaagtgattggtttggtgtttggtaagcggttggtgtttaaaaagaaaaaaaagttaaaaatattaaaaggaggtgggttatttttgtttatatatttatttgtttatataaatgtagacgaagtcgtgatttttttaatagtaggttaagaggaggttggttttgtcgtcgtgtagttttttttcgatttgggagtggaggattttaggttcgtcgtttttgggtatttaattcggttaggtttaaattcgtcgtttaggagtggggaagcgggggacggagagggttagttttttaagagttcggttgaggtagggttcggagtgttttttttaagtttttttttttggtttcgagttcgggttttcgcggtcgttttttcggggagttcgcggggcgaagagtcgagttcgggggcgggggtacggtagcggggtttgagggacgcgtcgggcggtcgcgaggattttgggatcgtttgttttattttttatttgtttttattaggagtcggagtacgcgggcgttttagaaggtttcgtagggtagtcgcgcggggtcggacgcgttggggtttacggcgttgggaacgcgggttcgtagtcgggttcgggcggtatgggcggcgggcggacgagtcggagtcggcggtggtggcggcggcggcggtcggggaagcgcggaggtggcgtcgcgagggggaggggcgcggcggcggaggaggaggtgttcgggtcgttgtcgtcgtcgtcgtcgttgatagcggttcgagtaaataagtcgcgtcgtcgcggttcggtcgttgttttcgttcgcgtcggagttggagtttaggtcgagttttgttttggtcgtcggtcgggtcgaggtcgcgtcgtcgcgttttttcgttttcgcgtcgtgacgttgtcgtcgggcgcggggatcgcgtcgagtttaggttttcgtcgtcgggtttttcgttcggtcgaggggcgttcgagtcgtcgcggcggtcgtttggaaaagttttttcgttagggttttttagggtaagtagcgagggcgcggggttcggggttcggggaaggtaagcgcgtttgggagtcgggttcgaggggagtcggtcgggtcgggtcgtggagttttgttttaggagcgggtttcgcggttcgggtgttcgggtcggggagggtcggggtattggcgtcggtgtagttttgattcgggtttttcggggttcggttgttcgtcggtttttcggaattggtttcggggtcggtttcgagggtggagttgtcgggagtagatagggcgtttcgtagtttatttgagcgcgtcgggttcgtttcggtttttcggtcgtggttggtattttttcgcgtggggttagggcgagttttttgattttaggaagcgtttgcggggtttttgttgggggcgggatggggagaaaatttcgtaggcgtcgggtgttttagttttttcgtcgttatcggggttgtcgtcggttcgtttatttcgcggtcgaggagggtttgcgtttcgttcggggaggggaggagcggtcgggggcgaggcgggggttttttcgtttgggtttcgttttcgtacgtatatttgtgcggttaggattcgggtgcgggattcgcgggcgtcggcggtcggcgtaggtaggtttttgggttgttttttgtcgcggtttggtcgaggtttttgtgttttcgttgtgtggttggattaaggggcggtttgtttgttagataggtttgacggtagttatttgtttggttagaattcgtttttttattattttttattttttggtttttggggtgtagatttttatttatcggagagtgttgggatttttattttgatttgggaagtgcgaggagaattcgggtgatatggtttggtgagggcgggtgttgagtaggtgtggatatagtataggagattagttaagtttgatttttttttaagtagggtagttttcgttttattattttttatattgggtttttacggagtatttgatttttaaaaaggattttgtggttttttaaaaagtttgaaagtcgttggtttagtagtttttattattaaggaaattgaggtttagggagaggaagtgatttgttaagattatttagtaaatagtgggtagggattgggagcgataaatttacgggagttttttagggttggtaataggatttcgcgtggtgtttttgttagagggagagattgattgggtgttcgagtggttttttcgtggtttgttttgtggttgtgttagagttagatttttagtgtttgggaaatagtagtcggttttggggtgaggcgtaatttgagtggtttagagtggttttttgtgttaggaggttttggtgttggagaaaagggttttgtttaagaatatagttaggaagagtatttatagttttttttggttatagtttggaatagagttttatgtgaaataagattatgagaaatatagtaagtttttaggtttgagataaattgggattagagggtgagttagagtttgggatgggggtggggagaaatttatttatttattgtttttagtttttatttttttcggggatttttttttgttttatatgttgtggtagagtcgtttgtgggggttttattttttggaagttatttttattttttattatggttggggttgttggatagagggaggttggttttttttttttggggggattgtttagttgcgtttgacgtttgtttttttttcgagtgttgtaaggtaattaaatagttggttaattatttttaacgttaaatagttgcggttttatttatagtgtgttggaatttgggttagatttagatgaatttagtttcgatttgggggttttagtaggatttatagtacggtggttggtggtggtgggggtaggggggtggttgtatgatatttggatttaagaggtagttgttgtggtagtaagagagaggagagagatgaggtttcgtttttatatggttttgtttttagggttttatattttttgttaaatgagggatttggggtggggggggcggtttttttattttttagggttggggcgtttagttgtttagttattgattaggttagttttttggaattaattatttaaagtattatggggttgtggtttcgaggtttgttttggaagttttgtggagtttgttcgtagggatgtgtaggagttgtattgtagatgttttttgttattagttgttaggttattttggtttaaattgaaaatattttaggaattgtgtgtggagtatttttagtttgtagggtgggattgtagtagttagggaggtcggttgtgtttaagggtagtttttggagaagtaaggagttttttgtggtgagtttgtttttttagttttttagggtttacgtgagttggggtgttttttttttggtattcggtagagtggttttggttatggaagtgttaagggtatttagggttttgttgttgtttagggagtttggtattgatatgggatatttttagtagtattgttgggattttttttagtttttttttttttttttagggttttggtttttggttagttaggggtattatgtggggatagttatgtggtttcgggtagagagaggtttcgtcgtttgtttgttgaaggagtaaaaataatattcggattattgatttagttttattttggcgtttttggtttagtagttagtgtttgttttggttgtttgggttcggattacgtaaggttggtgggcgtggagtaagtaagggggtagttgggggtttttaggtttaggtagggtagggtttggcggttttagcgttttttaggaaattgtaaaaacgagtttggggttttgattttgttgatagcggttattttagttatagagggaggtgaagtttttgtgatttttattttcgtatttttttaggatatggtttttaaaagtattattttatttagggttatttattttttttttaggagttgtggggttttgcgaataattttttatggttgaatttgttttgttgaattaggaaattttagtgagttgtatagatgttatttatttaagaattttgaaaagttaatattttatttttatgtaaaatatatttaggtgatttggagaatatagtgatataaagaagaaaataataattatttgtaatttttattattttgagagaattatcgttaatattttttagcgtgtgtatttttttagatttcgttttagtttgtataaatatatatgtataaatagtttttaaaaaataaaatgggattatgtgtatatattgttttataatgtattttttttattttgattatggtgaatatttatttatttgttgtttttgattttgagtgatttagggtttgatagtttttattttgttttttttgttatatttttttttttttttttttttttgagagggagtatcgttttgtcgtatagattgggaatgtagtggcgcgattttggtttattgtaatttttattttttgggtttaagtaatttttgtgttttagttttttaagtcgttggtattataagtattcgttattatatttggtttatgtttgtatttttagtagagacgaggttgtattatgttggttaggttggtttcgaatttttgattttaggtgatttattcgttttagttttttaaagtgttggatgatagaagtgagttattatgtttggtttttttgttatattttttatatttttgtatggagaaaggattgggggggattgtgagggtatttatttgtttatttatgtggttggttttgggggttagattttttttggggaggattaatttttttattttttttttttagattttattttaggttttaattgaaatttggggtgggtagggtagttttagtgcgtagtaggggaggaattgattttttttttttttttttttttttgttttttttagg

SEQ ID NO: 1384 - DNA, 12269 bp, Artificial Sequence
  chemically treated genomic DNA (Homo sapiens)
tttgagaggaataagaggggaaaaggggagagagggttagttttttttttgttacgtattaaagttgttttgtttattttaagttttaattggggtttgaaatgagatttgggggagaagggtaaaaaaattagttttttttagaagaaatttagtttttaaggttagttatatagatggatagatggatgtttttataattttttttaattttttttttatgtaagaatataagaaatgtaatagaagggttaggtatggtggtttatttttgttatttagtattttgggaggttgaggcgggtggattatttgaggttaggagttcgaggttagtttggttaatatggtgtaatttcgtttttattaaaaatataaatatgagttaagtgtggtggcgggtgtttgtagtgttagcgatttgggaggttgaggtataagaattgtttgagtttaggaggtggaggttgtagtgagttaagatcgcgttattgtatttttagtttgtgcgatagaacgatatttttttttaaaaaaaaaaaaaaaaaaaaaagtgtaatagaagaagtaggatgaagattattaagttttgagttatttaaaattagaaataataaatgaataaatgtttattatgattaaggtaaagaagatgtattataaagtagtatgtatatataattttattttattttttaaaaattatttatatatgtatatttatataaattaaagcgaaatttggaaggatatatacgttaaaaaatgttaacggtggtttttttaagatggtgagaattataagtaattgttatttttttttttgtgttattgtattttttaaattatttaggtatgttttatatgggaataagatgttggttttttaaggtttttaaatgaatggtatttatataatttattagggttttttagtttagtaaagtagatttagttatagggagttattcgtaaagttttatagtttttaggaagaaaatgggtgattttaaatgggatggtgtttttaggggttatgttttgagggggtgcgggggtggagattatagaggttttatttttttttatggttgagatggtcgttattagtaaagttagggttttagattcgtttttatagttttttggggaacgttggggtcgttaagttttgttttgtttgggtttggaggtttttagttgtttttttgtttgttttacgtttattagttttgcgtaattcgagtttaggtagttagggtaaatattggttgttgagttaggagcgttaaggtgagattgaattaatagttcgagtgttgtttttgtttttttagtaaatagacggcgggatttttttttgttcggggttatataattgtttttatatagtgtttttgattagttagaagttaaggttttggaggaagggggggaagttaggggaggttttagtagtgttgttgggggtattttatattagtgttaagttttttgagtagtagtagggttttggatgtttttagtatttttatagttaaggttattttgtcggatattaaaaggaaggtattttagtttacgtaggttttggggagttagagaggtaggtttattatagaaaattttttgtttttttagaagttgtttttagatataatcggtttttttgattgttgtagttttattttgtaggttgggggtattttatatataatttttggagtatttttagtttggattaaaataatttgatagttgatggtaggagatatttataatatagtttttgtatatttttgcgggtagattttataggatttttagggtaggtttcggaattatagttttatggtgttttgggtggttggttttagaaagttggtttgattaatggttgggtagttaggcgttttagttttaggggatggaaggatcgttttttttattttaagttttttatttaatagaggatgtgggattttgggagtagagttatataggaacggggttttatttttttttttttttttgttgttataatagttgttttttgggtttagatgttatgtaattatttttttgtttttattattattaattatcgtgttgtgagttttgttggagtttttaaatcgaggttgggtttatttgggtttagtttagattttagtatattgtagatggagtcgtagttgtttggcgttaaaagtgattaattaattatttaattattttgtagtattcggaaagaaagtaggcgttaggcgtaattgaatagtttttttaaagaaagagggttagtttttttttatttaataattttagttatggtgaggggtggggatggtttttagaaaatgagatttttatagacggttttgttatagtatgtgggataagggaggattttcgaaaagagtaagaattgaaaataatgaatgaatgggtttttttttatttttattttagattttgatttattttttagttttagtttgttttaaatttggaggtttgttgtattttttatggttttgttttatatgggattttgttttaggttgtggttagagagagttgtgggtgttttttttggttgtgtttttgggtaaagtttttttttttagtattagaattttttgatatagagagttattttgggttatttaaattgcgttttattttaggatcgattgttgttttttagatattgggggtttggttttgatatagttatagagtaggttacgggagggttattcggatatttaattagtttttttttttagtagagatattacgcggggttttgttattagttttgggaggttttcgtgaatttatcgtttttagtttttgtttattatttgttggatgattttaataagttattttttttttttgggttttagtttttttggtggtaaaaattgttggattagcggtttttaaattttttaaaaagttatagaattttttttaaaaattaaatgtttcgtagaagtttaatataggaaatagtaaaacgagggttgttttgtttgagaagaggttaggtttggttaattttttatgttgtgtttatatttgtttagtattcgtttttattaggttatattattcgggtttttttcgtattttttaagttagaataggaattttaatatttttcggtggatgagggtttgtattttaggggttagggggtagaggatgatgggaaagcgggttttgattagataagtgattgtcgttagatttgtttggtaagtaggtcgttttttggtttagttatatagcgggggtataggggtttcggttaggtcgcggtagaaggtagtttagggatttatttgcgtcggtcgtcggcgttcgcggatttcgtattcgagttttggtcgtataggtgtgcgtgcgggggcgaggtttaagcgaaggagttttcgtttcgttttcggtcgtttttttttttttcgggcggaacgtaggtttttttcggtcgcggagtgggcgagtcggcggtagtttcggtggcggcggggaggttggagtattcggcgtttgcggaattttttttttatttcgtttttagtaggggtttcgtaggcgttttttgaggttagagggttcgttttggttttacgcggaaaagtattagttacggtcggggggtcgagacgggttcggcgcgtttaggtgggttgcggagcgttttgtttgttttcggtagttttattttcggggtcggtttcggggttagtttcggaaagtcggcgggtagtcgggtttcgggggattcgggttagggttgtatcggcgttagtgtttcgatttttttcggttcgagtattcgggtcgcggagttcgtttttggggtagagttttacggttcggttcggtcggtttttttcgggttcggtttttagacgcgtttgtttttttcgggtttcgggtttcgcgttttcgttatttattttggggagttttggcggggaaatttttttaggcgatcgtcgcggcggttcgggcgtttttcggtcgagcggagagttcggcggcgggggtttgggttcggcgcggttttcgcgttcggcggtagcgttacggcgcggaggcggggaggcgcggcggcgcggtttcggttcggtcggcgattagggtagggttcggtttgggttttagtttcggcgcgggcgggggtagcggtcgggtcgcggcggcgcggtttgtttattcgggtcgttgttagcggcggcggcggcggtagcggttcgggtattttttttttcgtcgtcgcgtttttttttttcgcggcgttattttcgcgttttttcggtcgtcgtcgtcgttattatcgtcggtttcggttcgttcgttcgtcgtttatgtcgttcgggttcgattgcgggttcgcgtttttagcgtcgtgggttttagcgcgttcggtttcgcgcggttgttttgcggggttttttggggcgttcgcgtgtttcggtttttggtaggggtaggtaggaagtggggtaggcgattttaaagttttcgcggtcgttcggcgcgttttttaggtttcgttgtcgtgttttcgttttcgggttcggtttttcgtttcgcgagtttttcgggaagacggtcgcggagattcgaattcggaattaaagggaaaggtttgggggaggtatttcgagttttgttttagtcggatttttgggggattggtttttttcgtttttcgtttttttatttttgggcgacgaatttgagtttgatcgggttaagtgtttagggacggcggatttggggttttttatttttaggtcgagggaggattgtacggcggtaggattagtttttttttggtttattgttagaggagttacgatttcgtttgtatttgtatagataggtggatatatgagtagaagtagtttatttttttttaatatttttagtttttttttttttttagatattaatcgtttgttaggtattaggttagttattttatattattttttttttatgtatatgatttaatttatataatttttttaggttgagattattaattttattttatagataaggaaattgaggcgtataacgtttaaataatttgcgtaaagttttataattagtagattttagattttgtaagagattggggtgtttggtagagtttgaatttaagttatttgtaatatattagtcggagtttttttttttttgggttttagaaaacgtttgtgttatttggttgaggtcgacgttgtttgagttgagaaagaaaagaaggaaaatgtggttaggagttttttaggttgggttattttaaggtcgtagagtagtttgtgtttattttttttcgttttttgtgagataatttggttgtataggattagtttgtggtttttttaatataggttttcgggtaatgggaaaaaaaaaatttattgagtgttttttatgagttaggtattattgagagttttttttttgtgttaattcgttttatttttattatatgttttatgaggtgggtatagtatatttttttttaagtatttttgatgtattattgtttgtattttatagaggaggaaattgaggtttagagaggttaaattatgataatttttaaggtaattggtgaaaaattaattagtaaatcggtttaaatttttggggtattattttttgttgggatattttagataagttaattttttagggatttttttaatttatttttttataaaatggagataatatttagtgaatgggattaggtacgattcgggtatttttataaatattgtaagaattggaaattggaggaataatgttgggtttttaaagttgagcgggaagataagtttagttggttttgttttaaagtggggatttttttttcgttaaggaattaagatttgtaggggttatattgggtagcgttagttatagttgggagaataatattttagtagttagattgaggtaggaagtgatttacgttttttttttaggttgtgagtaagagaattttattgaggggaaatagggatagggttggttttatttatttatttgtttttaggtttagaagaaaggttagtttagaaaaatagtaatatttgttgttttaggtgttttatttattttggaggttggttttaggggagttcgtagtgggtttttggagggggaggggttagtttaggtttagatgattgttatttaggtagaggcggtgggaagtggagttttttagttttttttagttagtttgtttttttaatttgtataaggtaaaattttttaaagtgggtttttagaggtgtttttttgagagggaggaatgaggataggattgggtagttgagtatttttttttgttttatttagagtgttttatattttagggttttatatgagattgtattttataataattttgttgttaaaaagaatttgaaagttattttttgtgagatttttttggaaaaaaattttatttgattataattggtgatttttgtttttattttattgtaataagttttgtgggtaggtattgttttttttattatttttaattggttttggagtttaggttttttgatttggggttttaggggtttaaggttttttggattttattttattagttttatatagtagttagtaggatttgggtatgtgatagaagtttggagatgagtgagaggagtagggtttgatgggtaagtgggggttgtaaaggggttttatttttttagtagggttttgggaggaagagtttagttaggtttttttttatttttgatttggggttaatttagagaggtttttgagaattatatagttttaaatttatttagttattttgattttaagtatttttgttgtttttttggggtgttttgggagttttttttgaaatttttggtttattttaggtatagtaaataaagttttcggtagtagtatttatatttagttgtaagtagaatgtttatataatatttagacgtgtatagaagggtgtataataaaattttattggtgtttttttcgaatgaaagggttatatttgcgatttttgtttttttttttttgtttatttgtattttttaggaatgtttataagaatttttaaaataattaaatttttaagttaatgtaaaatcgaataaagtatgtttatattttattatttagttttagagtatttgggatttattttggtcgttgttgttttttcgttatttattgtagttgtaatagttaggtttttatttttttatagggcggggtttttttagttttggttaaattattttgggaaaattttttttatatgataggtaaatagggtgtttgtgggtggggggaggagttaaaagtgatgtggtggtgatatatttggtcgtattggaattggattttaatatggttagttagttttttttattttttttatttattggggtgggtttgtatttattttttgtttggttttgttgtattttagttattggttgatttaatgattttttttcgttagttttagttttttgtgttttgttttgttttttatggttagttagtgttgttataattatgtatttaataaatgttttgggtgtagtttcgtttggtagatatttattgagtagttgttgaacgttgggttttggtgttttatagttgggttttttagagtttgtttataggaagttagagattatttttttagtagggttgtatggaggtatttgggatatattagggttttttttagtttgcgatttttttggttttttagttttaataagtttgttgtttatttttttttttttcgatttagaaatgtgaattatttaatttttatagttttttttgtttgtttgttttatgggtttgttttttttttttttagataagagtttcgttttgttgtttaggttggaatgtaatggtttgattatagtttattgtaatttttgttttttgggtttaggcgatttttatgttttagttttttaagtagttgggattataggtttacgttattcgtattttttttttttttttttgtatttttagtagagatggggttttgttatgttggttaggttggtttcgtatttttgattttaagtgatatatttatttcggtttttttaagtgttgggattattaggcgtgagttattacgttcggtttttttgttgagtttttaattagtttgttattttgaatagggttttttaattttggtattattaatattttgggtcggataattttttgtaggggatattgtattttatattgtaggatgtttagtcgtatttttagttattaaatattagttgttagtagtattttcgtttttatgatgataattaaaaagatttttaggtattgttaaatgttttttgggagataaaaattttttttagtaaagaattattgtcgtagaatgaggagtgggaacgttataggatggtggttagtgtgttagggttcgaggtagtaagagttgtttgttgggaattaagttttgagatagttagtagtgagggagaaaatttttaaatttgaaattgtttagtatgttagtataataatgggtcgtttagtgattagggtaaataattatgtatttttatgatatttgagattattttttatcgtgttggtgataatgttgaattaaggaaaggattaattatgttgattatattttattttttaaggtggggaggtgtgtgagtttttgtagtattaaagacgtatttggaaaatagattagtgtttgtttggggaagggggtagggaggggcgggaggaaatttttgggaatgatggatatgtttattattttgattgtggtgatggttttatgggtgtgtttatatattaaaatatattaagttgtatattttaaatttatgtcgtttatagtgtgttagttatattttagtaaagttgttttgaagatgtgttgtttaaagttttagtgtttgaagggtattattttgaaaatttattattgtggagtagtttatttttttgttgaataaataaggggttattgtagtatttaaaaagaaaataggaagaaaaaataaatagaagaagaagaagaaaagcgattatgggttgtaaggtcgttttaggtagggaaggaaaggaatggcgtgaagagttggtttagtcgtttttgagtgtggttcggagagtttgttttttggtttacggtaggttttagagagttttttcgttgattgatgttattaaattaatatgtttggaacggtattattagggatttgggaaaaatagaatgataaatgtgttggttgttaggaaaggaatagatgagtttggaaattataggtttttttataaattttaatttttaaaataaatattgttggggaaaaagttagttaatatttggaggagtgtgagtgttgttttttaatggggtacggtatatttgggagtagagagtatttatagaagttagatatcgtgtgttaatttgtgttaataggtttatgtttaaggggttgtacgtggtagtagggagtattgcgagcggtagtgaggggttttttttgacggtgtagatgttttttggttgatggagatttttacggaggtttttaggagttttttagcgaggcgggtgagtaaggagaggggttgtgatagcgatgagttatatgtgaaaagaaaaattgtttttgtggaggttgattgtgtattgggtattttatttatttattttttagatatttattgagtgtttgttgggtgtaggattttttttagtgttttagttatagcgagggaagtaggtagtttataggtgaataagttagtttatgagagaagtttagattattttaagagttttggaagaaaatgataaagaaggtaatgtgggagtgtttggggaagcgggagggttgttatttttggggtggttagggaagatttttgggaggaggtgatgtttgagttgaggttgaaaaaagaggtaaaagtgtaaagatttggaggaagagtgttttaggtagagggagaggtaaggatatgggtttgggggtatgagtttatgtatttggggagtagatattttttggagtatggtcgagagatgagatgagaggtaggtaacgggttggattatagagtatttgttaagttgggtttagatgttgaatttaattattagagtaatgggttttggatttttaaaatttttttggaaatttgattgatttattttttaataaaaattatttatttatttatttagagatggagttttgttttgtcgtttaggttggagtgtagtggcgtaatttcggtttattgtaatttttatttttttggtttaagtaatttttttgttttagtttttcgagtagttgggattataggtatatattattatattcggttaattttattgtatttttagtagagatagggttttattatgttggttagattggtttcgaatttttgattttagttagtttatttgttttagttttttaaagtgttgggattataggcgtgagttatcgcgtttagttattttatttttatatttttaaatttaatttaaaagatgggtttttattttgttgtttagattggttttaagtaatttttttgtttttttttttagaggtgttgggattataggcgtgagttatcgtgttcggtaaatttattttttttaaaggtttttttgattattatggggagtagagatatgggggttcgtgtgggaatttattatagttcgacgtaggaggtattataggtgatttttttgatgtgaaatgtaggggattggtttgggggagtttagtgattttttttttttttgagatagtgttatttttgttatttaggttggagtgtagtggtgcggttttagtttattgtagtttttgttttagttttttcgagtagttgggattagaggtatgtgttattacgtttagttaattttttgtatttttagtagagacgggtttttatttgttacgttggttaggttggttttaaatttttgattttaagtgaattatttgtttcggttttttagagtgttgggattataggtgtgagttatcgttttgagtgattttataagcgtttagtttttgaatgatttataaattagtgagtaggtggtaggtttttgcgtaggtttgggaaggttggataggaggtgaattatatatttgatttgcgaagtgggggtttttgtaggataagagttggcggagtagttaggcgggattttttaatttaattgtttaggtgggtttaggtgtttttttttagattatagtttttgggtatttttagttagcgatttggtaataaaaagttgttttgagttaatagttgaaatttatagtgagtttacgggtttatatttttaggttttgtgtttaatgttttataatgattgttttatatattgtttataataatttttgaggtaggtgttgttatgatttttgttttatagattaggaaattgaggtttggattcgtagttattaaggaaaataaagatttaggatttgaatttgggatataagaatagaaagtttatatatattttaatcgttttgttttttgtttttataagagagttgaattgtggttaaattagatatagatttatttagttatcgtgatgtgggtggtttagttgtgatttatatttgatttttttttggataagaattgtttatttatgtttttatagtagtatatgttgatttttttggttttttttgtttttgtttgaaatagtattgttttgttgtttaggttggagtgtagtagttttttataggtgttattagattatattacggttttgaatttttggttttaaggaatttatttattttagtttttcgagtagttgggattataagtatatgttattatgttttttgaaattttttattttttcgtaaagataaggttttattatgttgtttaggttggtttagaatttttggtgttaaatgatttttttttttttagttttttaaagtgttgggattataggtatgagttattgcgtttgttttgattttttttttgtaatatttatgttattgaagtgttgaattgttttttttttttgtaaatttgttgggaggttgtagtgttggtgattagtttagttttcgatttagatttag

SEQ ID NO: 1385 - DNA, 5437 bp, Artificial Sequence
  chemically treated genomic DNA (Homo sapiens)
  unsure 873: n is a or g or c or t
ttttttttttttttttttttgagattgagtttggttttgtttttcgggttggaatgtagtggcgtgattttgatttattgtaagtttcgtttttcggggtttacgttatttttttgttttagtttttcgagtagttgggattataggcgtttgttattacgttcggttaattttttttattttttagtagagacggggttttatcgtgttagttaggatggttttaattttttgatttcgtgattcgttcgttttggttttcgaaagtgttgggattataggcgtgagttatcgcgttcggttttagtttttaatttttataatgttatttcgagaatattgtataaataaagttatagagtatgcgattttttggggttggttttttttatttagcgtagtttttttgaacgtttttttgttgttgtgggtattagtagtttatttcgttttatggttgagttttttataaggtagatgtattcgtttgtttaattatttatttacggatggagttttttagttattagttattataggtaaagttgttgtggataattgtgtatcgggttttttgtgtttatttattttatttttcgggataaatgtttaggagtaaaattgttaggttgtatagtaagtatatgtttattatttttgtgttgttttgttgtttttttatacggagttttgttttgttatttaggttggagtgtagtggcgtaatttcggtttattgaagtttttattttttaggtttaagcgatttttttgttttagttttttgagtagttgggattataggtgtatattattatatttagttaattttttgtatttttagtagagatggggttttattatgttggtttnaattatttgtaattttagtattttaggaggttaaggtgggaggattttttgagtttaggagtttaagattagtttggttaatatagtgagatttagtttttattatttaagtttaaaattttttaaataaaaaataaaagtaatttttaatttttagtatggttgaattattttagagttatttaaagtatgtattttttaatattttgagagatttagtttgtttttatttttattaatatttggtttggtttttattttttattgtagttgttttaataggtttttattttttattgtagttgttttaataggtttttattttttattgtagttgttttaataggtttttattttttattgtagttgttttaatagttgggttgtgatagtttattgtggttttaattggtgttttttgatagttaatgatattgagtatttttttaggtgtttatttgttatttatagattttttttggggagatgtttttttatggtttttgtttattttttaggtggattttatttttgttgttgaatttttaaagttttttatattttttagatattagttttttgttggatatgaaatttttaaatgttttttttaagtttgtagtttgtttttttattttttttttttttttttttttttttttttttttgttttttgagacggagttttattttgttatttaggttggagtgtagtggcgtgattttggtttattataatttttgttttttgggtttaagtgatttttttgttttagttttttgagtagttgggattataggtatgtgttattaggtttggttaattttgtatttttagtagagatggtgttttattatgttggttataggtggtttcgaatttttgattttaggtgattcgtttatttcggatttttagagtgttgggattataggtgtgatttattacgttcggtttcgtttatttttttaataaggtttttttggagtaagagttttagattttgatgtagtatgatttattagttttttttttttgtggattttgtatttggtgttaagtttaagaattttttatttagttttacgttttgaagatttttttttacgtttttttttaaaagttgtatagttttatgttttatttttaaattatgagttaatgtatatgttaggtgtgagttttagatggaggtttttcgtttgtatgggatcgattgtacgtgatgaattgttttagtattatttgttgtaaagattgttttttttttagagggattttcgtttgttaggtttttggtttaatgaaatatgattagagtgattttattttaacgtgaataattagatatttataaggtatttataaggttatataacgaggttatgttgttcgatattgattacgataattttttgtttttttgtttataggatattattatttttatttagagtatgatgtgttagtatttgggtgggttttatagtatatgagtttaacgtgggtgagaggtagtagttatttttatggttgggaattttggggagttgataattggttttttgtttattttagtgtttgtgggttggtttttttttttttggttttttttttatttgtttgtttgttttgttttttttgagatagggttttattttgttatttaggttggagtgtagtggcgtgatttcggtttattataatttttattttttagatttaagcgattttcgtgttttagtttttcgagtagttgggattataggcgcgagtttatggtttgaaaatattcgtatattaagttgattattaattataattgtagaatatttatgtttatacgaggtattttttattaagtttggagaatgtatcgatgatttgggagtgtagggggttatttttgtttataaataacgttaacgagtaggttgaggttgaagggtaaatggttattgattatattaggagtttttatttttagcgagtgtatttgtatgatttaggttttattgtagtttattatagttttttataaatagaggtatttatagaggacgggcgttttttttgttcgttgaggttgttcggttttggtatagagttattttttataaatttgtttttattgtgttttgtgagttattttgaattttttttcgtgtgagatttaagaatttatttttggggtttggattgggattttttttttcgataatattttttttacgtattgtttttgtagttttgttaaaggtttgttgttgttgtgtgtgagtttatgtttggattttttattttttattgatttatgtgtttatttttttgttaatattataattttttggtgattattgataatagtgtttgtaaatttgggtagattaattttttatattttatttttttttaaaatggttttagtaattgtagtttttttgttttgatatgtaaattttagaaaaaaaaatttttttatatatttatatatggtggggtgtggtggtttatatttataattttagtattttgggaggtcgaggtgagtagattatttgaggttagtagttcgagattagtttggttaaaatagtgaaaatttttttttattaaaaatataaatattagttaggtgtggtggtgggcgtttataattttagttattttggaggttgaagtagtaggattatttgaatttgggatgtagaggttgtagtgagttaagatcgtattattgtattttattttgggtaatagagtaagatttggttttaaaaaaatgtatatatgtatatatgtgtgtgtgtgtgttatatatatgtttatagttatttataaaatattttgttgagaatttgataggaattgtattaaatttttaggttgagttgaggagagttaatatttttgttgtgttgaagtttttagtttatgaatatattgtgtttgttttttattttaggtttttgattttttttttttgggtttagagtttaagttttgtttatatttggtgagatttttgtttatatgttgtgtgtgtgattataaattttgaatttttagtttcgggttttgtttattttttgatattgtgtgggaatacggtggatttttgtgcgattgattttgttgattttattcggttttaggaggggttttgtagagtttttgtaattttgtatttgggtaatgatgttatatgcgaatagagataggtatatttttttttttttaatttgtttgtttttagttattattttttgtttagttgttttggtcggaatgatttgttttgatggatgggggagtgggagtggatattcgtgttttgttttaggatttaagtgttttttagggagtgagatgcgggttcgattgtaagttataaagtgatgtttttttgtgggaaaaagtatatttaatatagattgtaggataaagtttgaaagtttattgttttttatttttatttagttttgtttgtgagttagagagaaatagtgttaataggtagtgtgtatttgtttagaggttggttgtttgagggatataggtgtgtatatttggggatgtttgagtggaaggtataggttaggattatgatcgtgtagttagttatttattggtatgatgtttgtggtattttggggtagttatggggtttttaggttttttgtttgttttataggttatatttttgttttggatatagttgtttttagtgttggtttttgatttaatattgtttaggagttttaatttagaaggtgttttcgtcgttgttagtttggattcgatttaggtttttttcgtttgaggttttgttaagaattgtttagttcggatatagaggaggttttcgcgtggacgtagggaagagttttttattgttttagtggaggaagttgtttaggggttaaggatgagttataggttcgaggaattatatggcgaggttgtgggcggggattttgtttgttttttttttatataaggttttttgagtttatattgttttagtatttttttggttttagagtttagagttatttatagtcgtagttatgttgtgttttttgtttattttgggcgtggttttggtttgtggtgtttcggttatggatattttttagattaagtaggatttggagtttttaaaggtttgaggttgggggagcgggtattttattgtgggaggtttggggcgggtgggagttgcgggtaggcgggaagtttaggattttagaaatttataggaagtatagaatggacgttatgacgttaggaagtttttagttttgttttttatttttagggtggtttttttggttttttagtattttaggtgatttattatttggattttggaatatttttgagttagtatatattggttattttaagtataggaaattttatagtttaggatttggtagatagtagataattatttaatgtttattgtatttattttagttagatttagtttcgtttgtatcgggtgtaacgagagttatggtggggtgggatcgtcgtgtagtttaaggtttttttagt

SEQ ID NO: 1386 - DNA, 5437 bp, Artificial Sequence
  chemically treated genomic DNA (Homo sapiens)
  unsure 4565: n is a or g or c or t
attgagggggttttgggttgtacggcggttttattttattatggttttcgttgtattcggtgtagacggggttgagtttaattgggatgggtatagtgagtattggatggttgtttgttatttattagattttgggttatgaaattttttgtatttaaaatgattagtgtgtgttaatttaggagtgttttaaagtttaaataatgagttatttaggatgttgggaaattagagaggttattttaaagatggagagtagggttgagggttttttgacgttatggcgtttattttgtgttttttgtaggtttttgagattttgggtttttcgtttgttcgtagtttttattcgttttaggttttttatagtaaagtgttcgtttttttagttttaaatttttgggagttttaggttttgtttggtttgggggatgtttatggtcgggatattatagattagggttacgtttagggtgagtaggaggtatagtatggttgcggttgtgggtggttttgagttttggagttagagggatgttgaggtagtgtgggtttagggggttttatgtaggaggagggtagataagattttcgtttatagtttcgttatgtgatttttcgaatttgtgatttatttttggtttttgggtagttttttttattggggtaatgggaggtttttttttgcgtttacgcgggaattttttttgtgttcgggttgggtagtttttggtagggttttaggcgggaggggtttgggtcgggtttaggttggtagcggcgggagtattttttgggttggggtttttggataatgttgggttagaggttagtattgaggatagttgtgtttagggtaggggtatggtttgtggggtaggtagagggtttgagagttttatggttgttttaggatgttatagatattatgttagtgggtgattgattgtacggttataattttgatttgtattttttatttagatatttttaggtgtgtatatttgtgttttttaaatagttagtttttggataggtgtatattgtttgttagtattgtttttttttgatttataggtaagattgggtggaaatgggaggtagtggatttttagattttgttttatagtttatattggatgtatttttttttatagggaagtattattttataatttataatcgagttcgtattttattttttggagagtatttgagttttgaggtaagatacgggtgtttatttttatttttttatttattagagtaggttatttcggttagagtagttaggtaagaaatggtaattaaaggtaggtagattgggaagggggaggtatatttgtttttattcgtatataatattattgtttaggtataaaattgtaagaattttataaaattttttttagaatcgagtgaggttagtaaggttaatcgtataaaaatttatcgtgtttttatatagtgttaaggagtagatagaattcgaaattggaaatttaggatttgtaattatatatatagtatgtaggtaaaaattttattaaatatggataggatttaaattttgaatttaaggaagggaaattaaagatttaaggtaaaggataggtataatgtgtttatgggttggaagttttaatatagtaaaggtgttagttttttttaatttaatttagagatttaatgtaatttttattaaatttttagtaagatattttgtaggtagttatagatatgtgtgtgatatatatatatatatatatatatatatatatttttttgaggttaagttttgttttgttgtttagggtggagtgtagtggtacgattttgatttattgtaatttttgtattttaggtttaagtaattttgttgttttagtttttagagtagttgggattataggcgtttattattatatttggttaatgtttgtatttttagtagagaggggtttttattattttggttaagttggtttcgaattgttgattttaagtgatttgtttatttcggttttttaaagtgttggaattataggtgtgagttattatattttattatatgtagatatatagagaaatttttttttttaaaatttatatgttaaggtaaaggagttataattgttaaagttattttgaagaagaataaagtataaagagttagtttatttaagtttataagtattattattaatagttattaagagattgtggtattggtagagaaatggatatatagattaatgggaaatagagagtttaaatatggatttatatataataataatagatttttaataaagttgtaagaatagtgcgtgggggaagtgttgtcggaaaagagggttttagtttagattttaagaatgggtttttagattttatacgggaaagaatttaaggtgatttatagagtatagtgaaagtaagtttatgggaaatgattttgtgttagagtcgggtaattttagcgagtaggaggaacgttcgttttttgtgagtgtttttgtttgtaagaagttgtaatgagttatagtgaaatttggattatgtagatgtattcgttaaagataggggtttttagtgtgattaatgattatttgttttttagttttagtttattcgttgacgttatttgtgagtaaagataattttttgtatttttaggttatcggtatattttttaggtttggtgggagatgtttcgtatgggtataaatgttttgtagttataattggtggttagtttagtatgcgggtatttttagattataagttcgcgtttgtaattttagttattcgggaagttgaggtacgagaatcgtttgaatttgggaggtggaggttgtagtgagtcgagattacgttattgtattttagtttgagtgatagaatgagattttgttttaaaaaaaataaagtaaataaataaataaaaaaaaaattaagaaagaaaaaattagtttataggtattgaggtggataggaagttagttgttagttttttagggtttttagttatggaagtagttgttgttttttatttacgttgagtttatgtgttgtgagatttatttaggtattggtatattatgttttggatgggggtggtggtgttttgtaggtagagaaataggaaattgtcgtagttagtatcgagtagtatagtttcgttatataattttataggtgttttgtgagtgtttagttatttacgttaagatggagttattttggttatgttttattaaattagaggtttggtaagcgggagtttttttaaaagaaggatagtttttgtaataaatggtgttggagtaatttattacgtgtaatcgattttatgtaaacgaagaatttttatttaaaatttatatttgatatatgtattaatttatagtttaaaagtaaaatataaaattatataatttttagaagaaagcgtgagagaaaatttttaggacgtagggttaggtaaagaatttttagatttgatattaaatgtaagatttataaaagaaaaaaattggtaaattatattgtattaaaatttgaaatttttgttttagaaagattttgttaagaggatgaacggggtcgggcgtgatgggttatatttgtaattttagtattttgggagttcgaggtgggcggattatttgaggttaggagttcgagattatttatggttaatatggtgaaatattatttttattaaaaatataaaattagttaggtttggtggtatatgtttgtaattttagttatttaggaggttgaggtaggagagttatttgaatttaggaggtagaggttgtagtgagttaagattacgttattgtattttagtttgggtgatagagtgagatttcgttttaaaaaataaagagagagagagagagaaaaaaaaaaagaggatgaagaggtaagttataaatttggagaaaatatttgaaagttttatatttaataaaggattggtgtttggaagatatagagaattttgaaaatttaatagtaaaaataaaatttatttagaaaatgggtaaaaattatgaaggaatatttttttagagaagatttatgggtggtaaataagtatttaaaaagatgtttaatgttattgattattaaggagtattaattaaggttatagtgagttattatagtttagttattaggatagttataatgaaaagtagggatttattaggatagttataatgaaaagtagggatttattaggatagttataatgaaaagtagggatttattaggatagttataatgaaaagtagggattaaattaaatattagtggggatggagataaattgaattttttaaaatgttgagaaatgtatattttgagtggttttaaaatggtttagttatgttggaaattggaagttgtttttgttttttatttaaaaaattttaagtttaaataatagagattgggttttattatgttggttagattggttttgaatttttgggtttaagagatttttttattttggttttttaaagtgttgagattataggtgattngggttaatatggtaaaattttatttttattaaaaatataaaaaattagttgagtgtggtggtgtgtatttgtagttttagttatttaggaggttgaggtaggagaatcgtttgaatttgggaggtggaggttttagtgagtcgagattgcgttattgtattttagtttgggtgatagagtaagatttcgtgtaaaaaaataataaaataatataaaaataataagtatatgtttattatatagtttggtagttttatttttgggtatttatttcgagaaatgggataaatggatatagaaaattcggtatataattgtttatagtagttttgtttgtaatagttaataattggaaaattttattcgtgaatgaatggttagatagacgagtatatttgttttatgggagatttagttataaaacgaggtgaattgttgatatttatagtagtaggagggcgtttaagggaattacgttgagtgaaaaaggttaattttaaaaggtcgtatattttatgattttgtttatataatattttcgaaatgatattatagaaattgaaagttgaggtcgggcgcggtggtttacgtttgtaattttagtattttcggaggttaaggcgggcggattacgaggttaggagattgagattattttggttaatacggtgaaatttcgtttttattaaaaagtagaaaaaattagtcgggcgtggtggtaggcgtttgtagttttagttattcgggaggttgaggtaggagaatggcgtgaatttcggaaggcggagtttgtagtgagttaagattacgttattgtattttagttcgggagatagagttagatttagttttaaaaaaaaagaaagaaaaag

SEQ ID NO: 1387 - DNA, 17389 bp, Artificial Sequence
  chemically treated genomic DNA (Homo sapiens)
ttatatatttatttatatatgtatgaattgttttttttatatgtatatttatgtgagatatggtaagatttttttttaaatagtttgtttatttttttattttttaattttaaattattatttttttttttttttttttttttttttttgattttattatatgtttaggtatgttatagttttagtttatatttatttttttatttgggaatggattggcgggcgttttagttttttgtagatgattttttttttttttttttttttttttattataagtttattttatttaagaaagtttaaatatttagttaatcgagtttagtttagattgtgtagtttgattttagtcgatggggaaaggatataggggtaggagttattttaggaataaaagtttttatttttttttgttcggtgtgttttcgtggtaattagttttacgagaagtatttttttgtatcgaagtaaatttgttttgttaaaaaattttttgtttgtttatttttttttaagatttcgagttttatttttaataatttatatatttttagatgtatatatatttatatatatattaataggtaatatttatgaagtgtttattttgtttgttaaatattgttttaagtattttatatgtattattttttattatttttattataatttagtgatgtagttgtaggtattatttttattttatagattaggaaattgaggggttagaaggttatataatttgtttaagatcgtagaaggagtataggtagaggtggattttaggttttgtttgattttgtttttttaataattataattatattttaataaagtatttagaaggtatgtattaaattgttaaataattattaaatgaagttggggttatagggtaatttgaattttttatttttttttgttttgtttagatgtttagtaatattaatattatattttaattggaaaaatgtttttaaattattatcgattatgttatttttttatgatataattgattatgttgtgatgtattattattgttatgtgttagattttgtattggatgtaagaataaaaatgatgtggtttttgtttttaaggtgtttattgtttaaattttattatattatttagaggatttttttagtaattttagttttttttttatttttattttttggtttgttttatttatatgtttaatgtttttgatatgatggagaatttgatatttttaagatgtattatttatttttaggtttttgagtttttgtttatgaatttttatattttgtagaatgagtaggagtttatttggaagaatttttatttatgtttgaaagttattgttatggtgaagtttttttataaagttttaattttgaaaagttttaaatatgtattttatataattatgagtatagtttaaataagtagtattgaagtataaaaaagaaaagtaagagtttttattttagtttattttaattttaacgttaattttagttttaattttattgttattttttaaatttttaatggtttttgtttttagatttttggtggtgatttttatgtttttaaaataatatgttattttattattttttggtatattattttaggttttatgtatttaattttttttaagagaaatgaagatttaatttatatatatattggttttattttttttttgattttttaatagagatacgtttttatatttagttttgtattgtttttttttttgtatatttagattatttcgttttgttaattatagatagtattttttgattgttattttttaaaatgagaattttagtattttatttttttttttattttatttttgtttttatttttttttatttattgacgtttattttgtgtattaaaaaaattaattatatttatattattttttagagttatagttattttttgatttgtttataaggtgaatttaaaagtagaaaattaatatgtagtatttttgcgattatgtgaatattgttttttgtaatttagtggagggtttgattatgttttttgttttgggttatttggagaatatttagattttagatttaaatgggattttttgtttgagatattattaatagtttaaaattaatttattttaggtatattatatttgcgttaggttttttttggatatttttttttttgaagattttagttttaattttaattttatattttagatggaaataatttaattataattttttttttttgtattttgttattttttaataatttcgagggtttttaagtttttagttatgtttttaattgtattgaattttatttttttttttagattttttattgtaattaggatgggttgttttttagtttttatattgttgttattttgggattttttttgtttatttcggttggagttatttttttttgggttttagatagtgaggtgtttttgatttttatattttttttaggataattaaataatttattttgttgaatttttatagttttttgtatttgtttaatagggtagtattttttgttgttatttttttattttttagggaaggattgtgttttatttatttttgaaatggtatttgatatatagttggtttttattttagtaaatattatttaaatttaaaaaaaaacgttgagcgtatggtaaggtatagtggtttatatttgtaattttggtattttgagaggttgaggtaggaagatcgtttgagtttaggagtttaagattaatttgggtaatatagtgagatattgtttttataaaaaataaaaataaaaaatttagttaggtgtggtgatatgtgtttgtgattttagttatttgggaagttgaggtaggaggattgtttgagtttgggaggtaaaggcggtagtgagttgtgattatgttattgtattttagtttgagtgatagagtgagattatatttttagaaaagaaaaaaaaaagaaagaaagaaaagaaaagaaaaagaaattgagtatattattataatttaatattttgattgaagggaagaggtgagatattagttttatttatattaaagaggaaataggtattgttatgttaatgggaaatgagaggaggaattaaatgtaggaaatagaataataaagaattaatttataaaaaattaaaataatttatattagatatattttataatttgtatgtttgtgttgatttatttttttggaatgtgaggaatattttttattaattttatttattgggttgttagatataatataggaagtttagttaaatttgaattttagataaataataaataattttttagtatatgttttaaatattgtatggggtatatttatattaaaaaattatttattgtttatttgatatttaaattttattagatgttttgtatttttatttgttaaatttgggtattttttattgggtatttttttagggtattaatttgttaaatgttaattgttgtggggttgtttagagaatatgatttaatgataatgggagatgatatgttgttggtaatgagagaagtgaataaaatgttgtatatttgtttttaggagttgtttttaaagtttattatttttttagtgtgggattaggtttttaattttaattttgtttttatttttgttttaaggttaaaagaagacgttagagatgtttttggtagggtataatgtatttttttagattgatatttgtgggttatttgttttatagggggttagtttaggaagtataagataatgttattaggcggatagagttttatttaaattaaaaataaaatttattgttaggtttaaatgagttattgttttattaagttattaatattagataatatatattgaatgaatgttttttataggttaagttttgttttaagtattttatatgtatttgtatttcgtgtttataaattgtttttgattgattgattttgatttttttgattttatggatgaggagatcgagaagtagagatgatgaatttttttaaggttatattatttataagtgggagaaataagttaaaatttaggttattttattgtagaatatttaaaattaaaataagtaaaattttatttttagttttggtattttattaaaaattaaaatacgatttaaaaatataaaattttaataatattatatataaattttaaattattttttttaagtttttagttgaagttttaaatgagtgtgtttttaatttattagaaagtggattgaagagaaaatattggaagatgaaggaaggcgttttagttaaattttaaataattttgtgttatattgagttatgaaacggttttttttagttttatttttttttagatttaagtgttatttttgattgttttttattgttatttttagggagaaatgatattagtatagtggtaggttttttaatttggagtacggtttatataattttcgaattggtgtttagtgtaaagtgtatcggagtgcggaaaatgcgtagggtattgttaattatagatgttcggagtaatttagtgtatttagagaatacggtgaaataaggaaaatcggtttgattggggggtgaatttagtagggagtaaatttgatcggtattaggtttgcggaaaggagttggtgagtacgatattatttaggtattgtttggtttttttcgcggcgggttaagttaatcgcgggtttaggtgcgggttatggttttggggagggtgttgggtgcgttcgagtaggttagcgtcgggagtcgtcgttgttagtgagaggtcggggttatatacgttttttttcggtattttttttagtattattaggggaggagagggtcggggttataaggtcgcgttaggcggatttaggatatagttcgcgcgtagtttattcgttcgtcgtttgttagagttgttcggttcgtagttagggggatagcggttggtcggaggttcgtagtgttgtcggcgagaagtagtcgggtttggagcgtttgggtcgcgttgggtgcgcggtggaacgcgtttagggattttagttttcgcgagtagtttcgcgtcgcgtttgagtgaggaggggtttcgggggcgaggcgggagtgggaggaagggtacggtcgtcgcgttggaggtcgggatttcggagcggcgatcggtcggggtgggttcgttgagtcgtattcgttttgttggtcggttttgggtttatagtttttgtagttttcggaaatagcgttaggatttttgcggggagagggagaggatgacggtattagatattagtttttttaaattttttttcgaaaggaagtaattttaagagtttagagttggggggagaattaggataggtagggaatatatggagtttttttttttttttttttttttttttttttttttttttttttttttttttttttttttttttcgtttttttttttttttttttgaggcggagttttattttgtcgttaggttggagtgtagaggcgcgatttcgatttattgtaatttttgtttttcgggtttaagtaatttttttgttttaatttttcgagtagttgggattgttggcgtgtcgtattacgttcggttaatttttttgaatttttagtagagacggggtttcgttgtgttcgttataatggtttcgattttttgatttcgtgattcgttcgttttcgttttttaaaatgttgggattataggtatgagttatcgcgttcgtttcggagtttttttatttgtagattttttatagggataattttttttttcgttttttttttttttttttttttttttttttttttttttttttttttttttttttttttttatatatatatatattattatatattttttattttgtttttttttttttttttttttcgtttttttttttatatattttttttttttttttttttttttttattttttttttgaggagtattgcgtttttggagtttagttatgcgtggttgttgtaagaataaaataaagtattttttgttttatttggagtatttttttgtcggttagataagattatagttgtgttattaagttaagggagaggtttatttttaaaaaattaagtaaaattagaaaatagagaatattgttttttttattattttttggagtttgtaagagaaatttttgttattaaaaacgaaaagttcgggtttttatttatgtttgtggtttttgggattattgtagtggtgatgaggaaggagaggtgcgtatggtttataaatggtagtttgttatttttaaaaggtatacggatttagatttgggatgtgttaataaattaggtttgtataaattatttttgatttaaatgagaatgttgagttgggagattggtatatgggtaggagttggaaaatgtattttttgaggtgttggtaattttaagaggtttagtacgaaattttgagtttatattgaatttagagatttgagtattaagtattggtttgattaagaagaagtagatggttttttggttacgaggtattggtgagtttttattatttaggtagatttttttatagaggaattttgttggttttgtagaaagtggtgagatagcgtattattttggtattttttagtaggtttattttagttttttgtatttgggtattgaaagtgtttttttttttttagatatttgtgtattagaagttgttgttggttatgtggtgatgttttaatgtttttttttattgaattgggttttttatatttaaggttggtattatagtttgtgattgtttattgtatagttagtaagattgaaggagttgtagtattaggagtgttgtgaatttggtttagttatttattttatagttgagaaattttttttgaggtgtggaagggtttgtttagtatcgtaggattttttttttagatagaatttgggatagttgggtttttattttttttttattgtgtttttgttttttttgtatttttgttgtgaggaatatatatgggtttaaatatatttttttatttttatttttgtatatgaatatgatttattatattttttgaagttttgttagtatagaatattaagaaaagtgttaattgggtatttgagtagttggagtgggagtttttgggaaagttagtttaggagttttttttatttttttttttttgatatttaagaagatggttattttttggaaaggaaggtggatattggattatttatattttgattttttttaagtttaatttttttttaagattcgtgataataagtttgattgacgttttaagatgttgagaaatttttataaaataaaagtattgaagagaaagtattgagtgaagggaaattgaagagaaatatttagttttaaaattgtattgttttagaatatgattttgggtttttattgattttttttatgacgttagttatttgttagatatattatgtgtttttattgttattttgtttaattttatgggcgtgatttaatattaatagaaataggttaatatatataaatatgtaggtttttggtttttaaagaaatttagtagttgaggagaaataaaaagtttattgtaagagtagatgtttattgaattaagtgggttagttgatttttagtagaatttgtatttatttatttatttattttaaaaaatatttattgattagattttaagtgttaggtattgagtatagtatagttagtaagatagatatgttttttgtttttatagtgtttatattttagaattgagggatgaatagggtgaatttatataatgagaagaaaagtaagtagattgttgtagtatagtggtgtgtgtgtgtgtgtgtgtgtgtgtgtgtgtgtatgtgtgtgttggatatatgggaggggtttagttttttggattggattgtgaggagagatttttttgtaagaaggtttggagatgaaattttaggaagatgggtagacgtttttgtagagggaattataagtataaatgttttgtttttgggaataggtgtgatgtgttggaggtatagttggaatgttagtgtggttggagttaggtgagggagaaggagagttggaggagtgagttttaggggtaggagttaggttaggaagatttttataggttaagggaaatatttggattttattttttataatgagagaagttaaaagagagtttgaagtagagatgtgatataattgatttattttataaagagatgattttgggtgttatgtggagaatggattataggggaaggagaggggatagaagaaggttagaagcgagtttattgatggggggtggtagtagtagatgggcgtaggttattttttggagttatagtgggaagttaatgtttttttgtttcgaattttttatttataaaatgggaatgagattgttatatttggtttatttgtaaaaattaataaataaatgaatatgttttgaagtataatgtaagatattattattattattatttgtttatattgtattattttgaattttttgtgttttattttaaaatttattttaataaatttgatgttttattatattatttttagtaaatttaatttattatatataaaagtatttttttttgttcggagaattggaaatttttaattaagagttattaataaaaataagtcgttataaaatgtagggaaattattgttaaaataatagttggtttaattttaaaagttgaatatggttagataaaaatttaaaaatagaataattaaagttgggaatgggaaaaaaatattttggatagatttgtttttgttttggttgtggttatgtagatatttgtgagtgtaaagatttgtagataattgaaaatatttatatggtagtagaatttttggagaagtttgtggattagagttgggtagggttgttttttttagtgaagtatttttttttagaggaagtttttgaattttttttcgtttattattaagttttagagtgttaggaagttttaaagttgtttattaattaggatagtgacgtttttcgtagagataggataagtaattgttataataaggtaattttattttttttttttgatttattttgatgtgtaagttattagaaggagatatgtttgtttagaggaaaaaaagtttttttttatttgtattgtgggtagtagaaatgttagttcgtgatttaatagtttttaggttatgttaatttgttagatttttttaattatttattggttagtgtgtttgaattttagtttgaagtggttagtttggtgatttaaattgtagataaaatgtgatagtaattttgggatttgtatgatttattttttgttatattaattattatattttttttagggttggagagtgggggtgtttgggtattttaaagggagaggttatatttttttttgaagttagaaatttatttgttttatttacgttttgaaaggttgaattagttgtttttttaaaaattagtggatattatatataaatgtaattttttagttttttttggaagtaattagatgatttagtgatatggagttgttatttttatatggaagtaattaattggaatagagtggtagttgttttttttggatggtttagtttgtattatttaaatagaataaggatagtttacgttagtttttattttattgtatgaatttgtttgatttatttaaattatttgtttggtttttgtagatttttgatttttaattttaggtttagggtaattaagtgtaatttgtttgttatatttttatttttatgtaatgtaggaatttatattttagtatttttgttggtagtttttaaatttgtattttaattgtttttttgataaagaagataatgttaattgttgaaaagttattgttgatggagttgtatagtttgggtttatatagaatatgtttaggaattttgtataggattgtggttgttatatgtaatttaggttttttatattaaaagtaaatattttttatttttttaatagttttttatgtgatttgttgttttgtttttttattattttggttatttttgggttattgttttttgttttgaatttttatttgttaaaatttttaaatttttattaatttaataagatgtggtttaattggtgtagaatgtagtgggagggtggtttttttttttttatgatgttatatttttgttatgtaattgaagatgtttttagattttttttggtttatttattgtgtttttaaatttatttttagggtttattttttagttagattgtttttgagagtttataggagaattgtttaatgtatagtttgagagtaatggtttttagttgaggatgatttatgtttttattttaggggatatttggtaatgtttggagacgtaatatttagttgttataattggggtgtgttattggtatttagtgggtagaggttagggatgttgttaaatattttgtaatgtataggatagtttttatagttaagatttattagtttttagtgttagtagtgttgagtttaagaatttttattttagggttcgggtttaggtttagattttggtttagttattttttatttttgtgaatttgggtacgttatttaatttttttgtttttattattttaattgtatgttaaagaattttgaggattaaatgagtttatttatatgaaatgtttagaagggtaattgtatgtataaatattattttatttttttattatattttatttattttggtgtgtatatatgatattagataagtgggtgggtaaagtttgagggatagtattttatttttaattttgtttatgggatgggtattagtgtatttggatgttttagggagttaatagttttttttagaaatgttttttttttatggtttttattattattttttcggttttttttagtatttttttttatattggggtatatatgttagtttaatattgtatttttttggagaatatggatattgagtttttttagcgggagagtatttgtgtttgttgtttgtatattttattttcggtgtgttttaggtttttttatattttagttatcgtggtttgtatttgtataatagatttttggggttgtgtagtaattggtagattttggataataataatagtatttttttaagggtttatatttttataagaattttattattagggtttttttttgatagatgaggagagaaaagtagaaagtaggtaagaatttaattgaagttattaaattagtaagtagtagatttaagatttaaattttggtagttagaaattggagttaaatttttaaattattttattattttgatataggtaagtttttttaagaagtatatttatgattttaatttaattattatgtagttatttatgtatataatatttaatagatttagttatttttatttttattattgtgagtaatatagttgggggattgagtttgagagtaagattaggaatttatagtatagtagtaggttgtttattgattttagataatttttattttttatgatttttaagttatatagaatattaaatatttggatatttgtatatgggatgtagattaatttttatttttaaaattgtgagtagaattaattaattatatgttatttgtaggttttgtattttatgtatttgtttttttagaatgaaataaaattttttttttattaaataaggatagagttgttttagttttttttagattagggttttttaattttagtagtattgatattttgagatttttttatgtgtagggttgttttgtgtattatagatgtttaatagtattttttgattgttatttattagatgttagtagtagtttttttttggttgtgtaacgtaaaaatatttttagatattaataagtgtttttttgggggttaaaaatgttttagttgagagatattgttgtagagtgatgttttagttgtattttttagtttttattttattgtaaaatatttaaagaagattttattttttttagtaattatttggtgtggtaatgggttagttttgaggtatttaagttattttttttgattttagttgaaattgaattgggttattatttgttttttgttttatttagttattttatatgttttatattagttttttattgttgttgtaaaaattttttataaatttagttatttaaagtaatataatttattattttatggttttgaaagttagaagtttgatatggttttattaggttaaaataataggtttagtgaatttttagaggttagttagtttgtgttgtttttttgaggttttagagagaatttgtttttttatttttttaagattttagaggttatttatatgttatagtttatgttcgttttttttatttttaaaattagttatggtgggttgagtttttatattatattatttagatttttttttttgttatttttttatatttttaaggatttttgtgattatattgggttagataatttatgataatttttttattttaaggttaattgattaatattaattttatttgtattttaatttttttttgttatggaatattatatatttatatgttttggggtttagaatatggatatttgggtgggagtgtattatttaatttgttatatgtttttattttaaaggttaattaggaagaatttggaaagagagtattgatatttaataaatgagtatttttttttttgattttttattaataatataagagttaaggtttatttgttttaattttttgttaggattgggttttatttggatggtttatttgttagttttttatagagattttaaattcgagattggatattttatttattgttttgggttgttttttgtttcgaaaagggaaatgatgtttgatgagaatttaatagtgataaataggggaaatcgggatttgtggtagttatggttgtgtatggagattataattgagatttgaagaataggtagggtattgtggttttagtgggagaaatgaagtttgtaggagagaggtagaaaggtagaattcgtttaaatggaatgtattatttgagtgtttattgaaagtttttttgattgttaggatgatattttatttagtggttaaggggttaaattgaagatagttatttttaggttttattatttgaagaaaattattgatttttaaagtgaatatttttattgatttagaatgttggtggtttatgtttgtaattttagtattttgagaggtagaggtgagcggattatatgaggttaggagtttataagtagtttggttaatatggagaaattttgtttttattaaaaatataaaaattagttaggtattatggtgggtgtttgtaattttagttatttagaaggttgaggtaggagaattatttgaatttggaaggcggaggttgtagtgagttgaggtggtgttattgtatttttaggtgatagagtgagattttatttttaaaaaaaaaaagtttgtgtttttgtattgattagtgattggggttatggtaatagatttttatataatatgatgatgaagacggttgtattaagggttttagtgtagttttgttggattttttagttttaagagaatgtttaaagttattattaagttttttagggttttagtttttaaatataaatatatttttagttaatttatattttatggttgagaaaaaggtatttatttgtgtaaagagaattttaaaagttaaaagattttttatgaattatttttgtgtgtttatatttagaagtttttgtggttattgtgattattatatgttaatatggtttttggtttataattttcgttgtttttgttatagtttttggttataatattggagtgttttagattttagaagtaggttttagaaagtagaatttttttttttgatttttttttgtttttttttttattgtttaaggtaggattttaatttgattgtaggttataagatttttatttagggaagggtttttttattttggaaaaaggaatgttgtatagatagattaagaagaatttgaatagatagggtttgttgggttgtttttttgagtttattagtattagagtttatttttattgtttagttatatttttatatagttgtttatattttgttgaatttatgtataaaaatagatagttttttttgtatttttgggtttttattttgaaggttttttgtgaatatatattaaataaataatttgttttttataagttgattttttagtgattttttagaggtttaaggggaatgttattcgtggtttttttggtttttttagtgtgtatgtattcgagtttagaaatgtttttggaaaaaaatttgttagtaagttattatttgcgaagagataatttaatttatttttttttgttatgtttggatttttgaaattatgtattaattttataatataattaaatgtaatattgaaataagattaaataaaattaattaaaattataaataattttaaagagttgtatatatatattttttttttttgattaaaagaaagatgttgaataaggaaatatagtttttttgtaagtagtttaagaagttttggttggatacggcggttgatgattgtaattttagtattttgggaggttaaggtgggtagattatgaggttaggagattaagattattttggttaatatggtgaaattttatttttattaaaaatataaaaattagtcgggtatggaggtgggtatttatagttttagttattcgagaggttgaggtaggagaattgtttgaatttaggaggtagaggttgtaatgagtcgagattatattattgtattttagtttgggtgatagagtaaaattttgttaaagaaaaaaaaaaatttagagttttagtaatatatttattagttgtttatttgggtttttttagtttgtataataggagttgtttttatacgaaagttttatttttttgaaatttttttgtttatatttttgttgtttttagaatttgtattatattatttaagaattataaaatgtttttgtaatttgttttttttttgtattatattgttaatatatgttagttttgtttttgaaatataattgtaaattttttgagagtagggattgtgttaaattttttggtatttattatagttgttgttataggagagggtatatagtatttgtttaagaaatattttttgattgaatgattgtagatttgataattaggataggttatgttgtgttttattaaggtaataatagttttatttggaaattttagtggtttaatatagtaaaggtttattttttatttgtgaaaggttatttgaattggtaggggtttttttttgtttagtgattaggtatttaggcgttttttattttaagattgtattatattagtatatgatttttaagtttgttgtgttagggaaaggaaggtatgaaggagatatagtgattttgttgtagacgatttttgtttaaatttttgttttttaggaattagttttatgggtttagtttaattataggggcggttaagaaatgtagggaagtatatagatgtttaggagtatttattgtttgtgttatatatttatattatattttttcgtaaaatagttatattaacgagtgttttattagtgttagtgggatatcggattattaaatttggttcggtttgtattagtaattagatgtgttagatttatttatttagtaggtatttattgagtgtttttgtatattaggtattattttaggttttgggaatatagtagggggaaaaattattaaaaatttttatatttatagaattaagtttttagtggaaggtgataaataattaataaataatatataaggtacgttagttggtgataaatattggagaaaaataaagtagggagggaaatagggaatgtattggtgtgaagaaggaggttagattgtaattttaaatagattgaatcgggaaagtgttattgagaaagtattattggagtaaaaattcggaggtgagaggattagttatttgggtgttagagtaaagagtatttttataaaagggaatatatttaaagtttttaaagtggggatggaaggtgggtgtggagtatttggtatgtttggtgaatggtaaagaagtaagtgtgattgtagtaggtgtttaagaggggttaggggaaggattgggagtgtgttgagtaaaggttatgtagattattataagttattttgggtgaatggtttttttttcgtaatatataatattatttgggggttttgtgtagaagggtgatataattattttggttgttgtgttggggatagattttagggttaagggtaaaagtagggagattcgttagaggtgatggtaaattttaggtaagagatgatggtggtttggattttttttattttttataaaagttgaagggttaaattttaggggggaaaatggatgtataaatgtaagatagtttttgttaataagatgttagtatatagattaattataatttattattattatatattttatatttttttgttttatttattgatttaataagtatttatgtaatattattttttttaggttttttattaggtattgagataataaataagatttgatttttgttttttggaaatttatattatagtaggattatagaaattagtaagaatataatattatattaatatttaaaataattatagtagtagaaatatagttattatataattaaatgatggaaatagttaaaatttatgaattatttattatgtgttagatatatttatggatattattatgatgatgatagatggttgttatatttgttatattttgttggttatttttatagttgattatattgttataaagttagaaaattagtgattaaaaatttaatttaattgtttgaaagtattatttttttgttttataatttaatgtaatttttagtaatgtaggtaatggtaattttatattattaaggattttattattgtagtattaatttaaaatttagtatagaaaatatatgttttattttttttaagtgttattagtattttagttttttttgatttgttagtttatttaaggtttttttattgtatatttttttttttttttaattatttgtttcgaagg

SEQ ID NO: 1388 - DNA, 17389 bp, Artificial Sequence
  chemically treated genomic DNA (Homo sapiens)
ttttcgaagtagatgattaaaagaaaaaagaagtatgtaatgaagaggttttaaataagttgataaattaagaaaggttgaggtattagtaatatttggaaaaaataaaatatgtattttttgtgttgggttttagattggtattataatggtaaaatttttggtaatgtaggattattattatttatattattaaggattatattggattgtagagtagagaaataatatttttagatagttagattaagtttttggttattagttttttaattttataatagtatggttagttataaaaatagttaataaaatataataaatataataattatttgttattattataataatatttataggtatgtttagtatatagtaaataatttataaattttggttatttttattatttaattatatagtgattatatttttgttgttgtggttgttttgggtgttaatatgatgttatatttttgttaatttttataattttattatgatataagtttttaaaaagtagaagttaggttttatttgttgttttagtgtttaatagagggtttggaagaagtagtattgtatagatgtttgttgaattagtaaatgaaataagagaatatgagatgtgtggtaataataaattataattagtttgtatgttaatattttattagtaaaaattattttgtatttgtgtatttatttttttttttaaaatttggttttttaatttttgtgggggatagaaaaggtttaagttattattattttttatttaaaatttgttattatttttaacgagtttttttgtttttgtttttgattttaaaatttatttttaatatagtagttagagtgattgtgttatttttttgtataaaatttttaaatggtgttatatgttacgggggagaagttatttatttaaaatagtttataatgatttatataatttttatttaatatatttttaattttttttttagttttttttggatatttgttgtaattatatttgtttttttgttatttattaaatatgttaagtattttatatttattttttatttttattttgagggttttgaatgtgtttttttttatgggaatgttttttgttttgatatttaaatgattggtttttttattttcgggtttttgttttagtgatatttttttagtgatattttttcggtttaatttatttaaaattgtaatttaatttttttttttatattaatatattttttatttttttttttattttatttttttttaatatttattattaattaacgtattttgtatgttatttgttagttgtttattattttttattaaaaatttagttttgtgagtgtaaggatttttgatggtttttttttttgttgtatttttaagatttagaatagtgtttggtgtatagaggtatttagtaaatgtttgttgagtgaataaatttagtatatttggttattaatataaatcgagttaagtttaatgattcggtgttttattgatattaatgaagtattcgttagtatagttattttgcgggaagatgtaatatagatgtgtggtatagataatgagtgtttttgaatatttatgtgtttttttatattttttagtcgtttttgtggttgggttgggtttatggggttaatttttgagaaataaaaatttgaatagaagtcgtttgtaatagagttattgtattttttttatgtttttttttttttgatatagtaaatttagaaattatgtgttgatgtagtgtagttttgaagtgaaagacgtttggatatttagttattgaatagagaagagtttttgttaatttaaatgattttttataaatgggaaataaatttttgttgtgttaagttattgaaatttttaggtgaagttgttattgttttaatggagtatagtatggtttattttgattattagatttgtagttatttaattaaagggtattttttaagtaaatattatatgtttttttttatggtaataattgtggtaagtattagagaatttgatataatttttatttttagagagtttataattgtgttttagagataagattagtatatattaataatataatataggaagaaagtaaattataggggtattttataatttttagatgatatggtataagttttgagagtaataggaatgtagatagaaagattttaaagagatggggttttcgtgtaagggtagtttttattgtataggttagaaagatttagataggtagttggtaaatgtgttgttggagttttaaatttttttttttttttgatagagttttattttgttatttaggttggaatgtagtagtgtgatttcggtttattgtaatttttgttttttgggtttaggtaatttttttgttttagtttttcgagtagttgggattataggtgtttatttttatgttcggttaatttttgtatttttagtagagatggggttttattatgttggttaggatggttttgattttttgattttatgatttgtttattttggttttttaaagtgttgggattatagttattagtcgtcgtgtttagttaaaattttttaaattatttgtagagggattgtatttttttatttaatattttttttttgattagaaaaaaaaggtatatatgtgtaattttttaagattatttataattttggttgattttatttgattttattttagtattatatttaattatattataaagttaatatatgattttaaaaatttaaatataatagaaaaaggtaaattgagttattttttcgtaaataatgatttgttaatagatttttttttagaggtatttttaggttcgaatatatgtatattgaaggggttaagggggttacgggtggtattttttttggatttttgaagggttattgaaaaattaatttgtaaaaggtagattatttatttaatgtgtatttataaggagtttttagaatgaagatttaaagatataggggaaattgtttatttttatgtataggtttaataaagtatgaatagttgtgtagaaatatgattggatagtaagggtaagttttaatgttaatagatttagaggggtaatttagtaagttttgtttatttagattttttttggtttgtttgtgtagtatttttttttttaaggtaagaggatttttttttgaataagggttttataatttataattagattagagttttgttttgggtagtagaaaggaaggtaggaaaaggttagagagaaagattttgttttttgagatttgtttttggggtttaaagtattttaatattataattaaagattgtagtaagggtaacgggagttatgagttaggaattatattaatatgtaataattataatgattatagaggtttttgaatatgaatatataggaataatttataagaagttttttaatttttaaagttttttttatatagataagtgttttttttttaattatgggatatgagttagttagaaatgtatttatatttaagaattaggattttgaaaaatttaatggtaattttagatatttttttagaattagagaatttaataggattatattaaaatttttgatatagtcgtttttattattatattgtatgaaaatttattattataattttaattattggttaatataaaaatataaattttttttttttggagatggagttttattttgttatttaggaatgtaatagtattattttagtttattgtaattttcgttttttaggtttaagtgatttttttgttttagttttttgagtagttgggattataggtatttattataatgtttggttaatttttgtatttttagtagagataaggtttttttatgttggttaggttgtttatgaatttttgattttatgtgattcgtttatttttattttttaaagtgttgggattataggtatgagttattaatattttaaattaatgggaatgtttattttaaaaattaatgattttttttaaatagtaaggtttgaaaataattatttttaatttggttttttgattattagataaaatattattttggtaattaagaagatttttaatgagtatttagataatatattttatttaaacggattttatttttttgttttttttttgtagattttattttttttattgaaattatagtgttttatttgttttttagattttagttgtagtttttatatataattataattgttataaatttcgattttttttatttgttattgttaaatttttattaggtattattttttttttcgaaataaaagataatttaaaataatagataaaatgtttaatttcgagtttgaaatttttgtgaaaagttgatagataaattatttaagtaaaatttagttttggtaagagattagggtaggtgggttttagtttttgtgttattagtaaagagttagaaaagaaaatgtttatttgttaagtattagtattttttttttaaattttttttgattgatttttggaatgggggtatgtggtaggttgaataatgtatttttatttaaatgtttatattttaaattttagaatatgtgaatatgtaatgttttatggtaaaaaagaattaagatgtaaatggaattaatgttaattagttgattttaaaatagggagattattatggattatttgatttaatgtaattataagagtttttaaaagtataagaggatggtagaagaagagatttgaatgatgtgatgtgagaatttaatttattatggttggttttgaaaatgaaggaagcgggtatgagttataatatgtggatggtttttagaattttggaaaggtaaggagatagattttttttagagttttaggaaagtaatatagattagttgatttttgaaggtttattgaatttgttattttagtttagtaaggttatgttagatttttgatttttagaattatgagataataaattatgttgttttaagtgattaaatttgtagaaaatttttatagtagtaatagaaaattaatatggagtatataaagtaattgaatgagataaaaagtaaataatagtttaatttagttttaattaaagttaaagaaagtggtttaaatattttaaaattgatttattattatattaaatgattgttgaagaagataaaattttttttggatattttataataggatgaaggttggagaatgtagttagaatattattttatagtagtgttttttaattaaggtatttttggtttttaagaagatatttattaatgtttggagatatttttgcgttgtataattaggagggggttgttattggtatttagtgagtagtagttaggggatgttgttaagtatttgtagtgtataggatagttttatatatagaggaattttaaaatgttaatattgttgaggttgagaaattttggtttaagaaaagttggggtaattttatttttgtttaataaggaagaaattttattttattttagggaggtagatgtatgagatgtaaaatttgtaagtaatatataattagttgattttatttataattttggaaatgggaattaatttgtattttatgtgtaaatgtttaaatgtttggtgttttatatggtttaaaggttataaaaggtaaaagttgtttaagattaatgggtagtttgttgttatattgtaagtttttgattttatttttagatttagttttttaattatattatttataatagtaagagtaagagtaattggatttgttgagtgttgtatgtataaatggttatatgatggttaggttaaggttatgggtatattttttgagaaaatttatttgtattagagtaataaagtggtttagaaatttagttttagtttttggttgttaaggtttgaattttgaatttgttatttattagtttggtgattttagttaagtttttatttattttttgtttttttttttttatttgttaaagaggaattttgataatggggtttttatggggatgtgagtttttggagaaatgttattattattatttaaagtttattaattgttatatagttttaggaatttgttgtgtaggtgtaagttacggtgattggggtgtggaggagtttggggtatatcggaaatgggatgtataagtaataggtatagatgttttttcgttaaaggaatttagtgtttatattttttaggaggatgtagtattaaattgatatatatgttttaatatggaggaaaatattaaaagaagtcggaaaaatgataatggggattatagagagaaggtatttttgagaaaagttgttagttttttaaaatatttaaatgtattagtgtttattttataggtaagattagaaatgaagtgttattttttaaattttatttatttatttatttgatgttatatgtatatattaaaatgaataaaatatggtagaaaaataagatagtgtttgtatatatagttatttttttaagtattttatataaatgaatttatttagtttttagagttttttgatatatagttgagataatgaagataaagaggttaaataacgtgtttaagtttataaggataggaagtagttaaattaggatttgaatttagattcggattttaaagtaggaatttttaagtttagtattgttgatattaggggttgataagttttggttgtgggggttgttttgtgtattgtagggtgtttagtaatatttttggtttttatttattagatgttaatagtatattttagttgtggtaattaaatattacgtttttagatattgttagatgttttttggagtgggggtataaattatttttagttgaaaattattgtttttaagttgtatattgagtagtttttttgtaaatttttaggaataatttaattggaaaataagttttgaaagtaaatttaaaaatataatggataggttaggaaaaatttaaagatatttttagttgtatgataaaagtatgatattatagagaaagggaggttatttttttattgtattttgtattagttagattatattttattgaattggtggggatttaaggattttaataaataaaggtttaggataagggatagtaatttaaaaataattagaatgatgagggaataaggtagtaagttatatgaggagttgttgaaggaatgaggaatgtttatttttaatgtggaaaatttaggttgtatgtgatagttatagttttgtgtaaagtttttaaatatgttttatgtaggtttagattgtatagttttattaatagtagttttttaataattagtattattttttttattagaggagtagttaaagtataggtttggggattattagtagggatattggaatatagatttttgtattatatgaaggtgaaagtataatagataggttatatttgattgttttaaatttgaagttaaaaattaaaagtttataagggttagataggtaatttaaatgaattaaataggtttatgtaatagaataaggattggcgtgaattgtttttattttatttggatggtgtaaattggattatttaaagaaggtaattattattttattttagttaattgtttttatgtaggaatggtagttttatgttattagattatttgattgtttttaagaaaaattggaaaattatatttgtatgtaatatttattgatttttaaaggagtaattaatttaattttttaaaacgtgagtgaaataaatagatttttggttttaaggagagatgtaatttttttttttaagatatttaaatatttttattttttagttttaagaaaaatatggtggttgatatggtaagagataaattatatagattttagaattattattatattttgtttgtaatttgaattattagattagttattttaagttgaaatttagatatattgattaataaataattaaggggatttggtaagttaatatgatttagggattattaagttacgagttgatatttttgttgtttataatataaatgaggaagagtttttttttttttaagtaggtatatttttttttagtaatttgtatattagagtgagttaggaaagagaaatagagttgttttattgtggtagttatttgttttgtttttgcgaagaacgttattattttagttggtaaataattttaaaattttttgatattttaaaatttagtgataaacgagagaaaatttaagagttttttttgagagagaatgttttattaagggaaataattttatttaattttggtttatagatttttttagaaattttgttgttatatagatatttttagttatttataaatttttgtatttatagatatttgtatgattatagttaggataaaggtaaatttgtttaaaatattttttttttatttttagttttaattattttatttttgaatttttatttgattatatttaatttttgaaattaagttagttattattttagtaataatttttttgtattttgtgacgatttgtttttattggtaatttttagttaagagtttttagtttttcgaatagagaaagatatttttatgtataataaattaggtttattgaaaataatataataagatattaaatttattaaaataaattttaagataaagtatagggaatttaaagtaatataatatgagtaaataataatggtaataatgttttatattatgttttagggtatatttatttgtttattagtttttataagtggattaggtatagtaattttatttttattttgtagatgggaaattcgagatagagaaatattaattttttattgtaattttaaaaaatagtttacgtttatttattgttattattttttattagtaaattcgtttttggtttttttttgtttttttttttttttttgtaatttattttttatatagtatttagagttatttttttataaagtaaattaattatgttatatttttgttttaaatttttttttggttttttttattgtaaagagtaaaatttaaatgttttttttggtttatgagggtttttttgatttggtttttgtttttaaagtttatttttttaatttttttttttttttatttaattttagttatattggtattttaattgtgtttttaatatattatatttgtttttaggagtaggatatttgtgtttgtggttttttttgtagggacgtttgtttatttttttgaggttttatttttaggtttttttgtagagaagtttttttttataatttaatttaagaagttaggttttttttatatatttaatatatatatatatatatatatatatatatatatatatatatattattatattgtagtaatttgtttgtttttttttttattatatgaatttattttgtttattttttaattttagaatgtgagtattgtgagagtagagagtatatttattttattaattgtgttgtatttagtatttggtatttaggatttgattaataaatattttttgaagtgaatgaatgaatgaatataagttttattaggaattaattagtttatttaatttaatgagtatttatttttataatagattttttatttttttttaattgttaagtttttttaaaaattaaaaatttatatgtttgtatgtattagtttgtttttgttagtgttgagttacgtttataaaattgagtaaaatgatagtgagggtatataatgtgtttaataggtggttggcgttatgaagaaagttagtaagaatttagaattatattttgaaataatataattttagaattgaatgtttttttttaatttttttttatttagtattttttttttaatgtttttattttatggaaattttttaatattttgagacgttagttaggtttattattacgaattttgaaaaaaaattaggtttaagaggaattagagtgtaaataatttaatatttatttttttttttaggaaatagttatttttttgggtattaggaaaaggaagataaaggggatttttaaattgatttttttaggggtttttattttagttgtttaggtatttagttagtattttttttaatgttttgtgttgatagagttttaaagagtgtggtaagttatatttatgtgtaaaggtgagagtgagggaatgtgtttaggtttatgtatgttttttataataaaagtgtaaaggggatagagatataatggagaggaaatgaggatttagttgttttaggttttgtttgagggaaaagttttgcggtgttaagtaagtttttttatattttagaagggattttttaattgtaaaatgagtggttgaattagatttataatatttttaatgttgtaatttttttagttttgttggttgtatagtaggtagttatagattatggtgttagttttgggtatgaagggtttagtttaatgaagaaagatattgagatattattatatggttagtagtagtttttggtgtataaatatttggggaggggaaagtatttttagtgtttaagtgtaaggagttgaagtaggtttgttggaaaatgttaaggtggtgcgttgttttattattttttgtagggttagtagaatttttttgtgagggaatttgtttgggtgatggaggtttattagtgtttcgtgattagaaggttatttgtttttttttgattaggttagtgtttaatgtttagatttttgaatttaatgtaagtttaaggtttcgtgttgagttttttgggattgttaatattttaggggatatattttttagtttttatttatatattagttttttagtttagtatttttatttggattaaaagtaatttgtgtaagtttgatttgttaatatattttaaatttgaattcgtgtgttttttaaaggtggtaagttgttatttatgagttatacgtatttttttttttttattattattgtagtaattttaagaattataggtatgaataaaagttcgaatttttcgtttttggtgatagaaattttttttataagttttaggagatgatgaggaagatagtgttttttgttttttgattttgtttaattttttaaaaatgagttttttttttgatttggtgatatagttgtgattttatttggtcggtagggggatgttttaggtaggataaagagtgttttgttttgtttttatagtagttacgtataattgggttttaaaaacgtaatattttttaaagggagagtgagagagagggagagagggagaagggtgtgtgagagagagagcggagggagagagagagaggaggtagagtgagaggtgtgtagtggtgtgtgtgtgtgtgagagagagagagagagagagagagagagagagagagagagagagagagagagagagagacggagagagagattgtttttgtaggagatttatagataagaaaatttcggggcgggcgcggtggtttatgtttgtaattttagtattttgggaggcggaggcgggcgaattacgaggttaggagatcgagattattgtggcgaatatagcgaaatttcgtttttattaaaaatttaaaaaaattagtcgagcgtgatacggtacgttagtagttttagttattcgggaagttgaggtaggagaattgtttgaattcgggagatagaggttgtagtgagtcgagatcgcgtttttgtattttagtttggcgataaaatgagatttcgttttaaaagaaagaaagaaggaacgaaagaaagagagagagagagaaaaaaaagaaaagagagagaggagaaaaaaaagaaaagaaaattttatgtgttttttgtttgttttgattttttttttagttttgagtttttagggttgttttttttcgggaaaaggtttggaagaattggtgtttaatatcgttatttttttttttttttcgtaaggattttagcgttgttttcgagggttgtagggattgtgagtttaggatcggttagtagagcgggtgcgatttagcgagtttatttcggtcggtcgtcgtttcggggtttcgatttttagcgcggcgatcgtgtttttttttttattttcgtttcgttttcggggtttttttttatttaggcgcggcgcggagttgttcgcgggaattggggtttttgggcgcgttttatcgcgtatttaacgcgatttaagcgttttaaattcgattgtttttcgtcgatagtattgcgagttttcgattagtcgttgtttttttggttgcgggtcgagtagttttggtaggcggcgggcgggtgggttgcgcgcgggttgtgttttgggttcgtttagcgcggttttgtggtttcgattttttttttttttggtgatgttggaggaggtatcggggaggagcgtgtgtggtttcggttttttattagtagcggcggttttcgacgttagtttgttcgagcgtatttagtattttttttaagattatggttcgtatttggattcgcggttaatttagttcgtcgcggagagagttaggtaatgtttgggtggtgtcgtgtttattagttttttttcgtagatttgatgtcgattagatttattttttgttgaatttattttttagttaggtcggttttttttgttttatcgtgttttttgaatatattgaattatttcgagtatttatagttggtaatgttttgcgtatttttcgtatttcgatatattttatattgaatattaattcggaagttgtgtggatcgtgttttagattggaaggtttgttattgtgttggtgttatttttttttggaaatgataatgaaggataattaggaatagtatttaggtttgaggagaaatggagttagaaggagtcgttttatagtttagtgtaatatagagttatttggggtttaattgaaacgtttttttttattttttaatgttttttttttaatttattttttaataaattaaaaatatatttatttaaaattttagttagaaatttagggaaagtagtttgaaatttatgtgtggtgttattaaaattttatatttttaaatcgtgttttggtttttggtgaggtgttagaattggagatgaaattttgtttattttgattttgagtattttgtagtaagatggtttgaattttagtttgttttttttatttatgagtggtgtgattttggggaagtttattatttttgtttttcggtttttttatttataaaattaagaaaattaaaattagttagttagaggtagtttgtgagtacgaaatgtaaatatatgtgaaatgtttgggatagagtttggtttatgggaaatatttatttaatatgtgttatttaatattgatagtttaatgaagtagtgatttatttaaatttaataatagattttatttttaatttaaatggaattttattcgtttaatgatattgttttgtattttttggattaattttttgtaaaataaatggtttataaatattaatttaaaaggatatattatgttttattaaagatatttttaacgtttttttttgattttaagataaaggtgaagataaagttgaagttgaagatttaattttatattaaaaaggtggtaagttttgagaatagtttttgaaaataagtatgtaatattttatttattttttttattgttagtaatatgttattttttattgttattaggttatattttttgagtagttttatagtagttggtatttggtaggttagtgttttgagaagatgtttagtgaagagtgtttagatttagtaaataaaaatgtagaatatttggtgaaatttgaatgttagataaataataaatagttttttagtataaatatgttttatgtaatatttgggatatatattaaaaagttatttgttgtttatttgaaatttagatttaattgggttttttgtattatatttggtaatttagtaagtaaaattaataaagaatattttttatattttaagaggataagttaatatagatatatagattataaggtgtgtttgatatgggttgttttagttttttatgagttggttttttgttattttgttttttatatttaatttttttttttattttttattgatataatagtatttattttttttttaatatgaatgaaattgatgttttattttttttttttaattaagatattaaattgtaataatgtgtttaatttttttttttttttttttttttttttttttttttttttttttttggagatatggttttattttgttatttaggttgaagtgtagtggtatgattatagtttattgtcgtttttattttttaggtttaagtaatttttttattttagttttttaagtagttaggattatagatatatattattatatttggttaaattttttatttttattttttgtagagatagtgttttattatgttgtttaggttggttttgaatttttaggtttaagcgatttttttgttttagttttttaaagtgttagggttataggtgtgagttattgtgttttgttatgcgtttaacgtttttttttaaatttgaatagtgtttattgaggtgagggttagttgtatgttaggtattattttaaggatgaataagatatagtttttttttggaggataaggaaataataataaaaagtgttattttattaggtaaatatagaggattgtgggagtttagtaaggtgagttatttaattattttgagaaagatgtgggagttaaggatattttattgtttgggatttaaagaaaagtggttttaatcgagataagtaggagaggttttagaatggtagtagtgtggaggttaggaagtaatttattttgattgtagtaggaagtttggagggaaaaatagggtttaatataattgaaagtatgattaggaatttggaagttttcgaggttgttagaaggtgatagaatgtaaagaaaaaaaattatggttaaattatttttatttaaaatataaagttgaaattaaaattaggatttttaagggagaaaatgtttaggaaaggtttgacgtaagtgtgatgtatttaaaatggattgattttgagttattagtggtgttttaaataggagattttatttaaatttgaaatttgaatgttttttaaatgatttagagtaggaagtatagttaagttttttattagattatagggaataatatttatatagtcgtagaaatgttgtatattggttttttgtttttagatttattttataggtaagttaaagaataattatgattttaaaagataatgtaaatatgattaatttttttaatgtatagggtaaacgttaataggtaaaaaggggtaggagtaggagtaaggtggagagaagggtggggtattaaggtttttattttaggaagtgatagttaaaagatattgtttgtagttgataggacgaaatggtttgggtgtatagaggagagagtaatgtagggttgaatatagagacgtatttttattaggaggttagggaggaggtaagattagtgtgtatgtgagttaaatttttattttttttaggaaaaattaggtatatagggtttaagatgatatattaggaaataataagatagtatgttattttggaaatatggagattattattagaaatttaaaagtagaaattattaagaatttggagaatggtaatgagattgagattgaggttgacgttggggttggggtgggttgaggtggggatttttgttttttttttttgtattttagtgttatttatttgaattatgtttatgattgtatgaaatatatatttaaaattttttaagattagaattttgtgaaaagattttattatggtagtagtttttaagtatgagtaggagtttttttagatgaatttttatttattttatagaatatggaaatttatgagtaaaggtttaggggtttagaagtgaataatatattttaggaatgttaagttttttattatgttaagagtattaggtatatggataggataaattagaagataagaatgaaaggagggttggggttattaaaaaagttttttggataatgtaatagagtttggatagtgagtattttgaggataggaattatattatttttatttttgtatttagtataaagtttagtatatggtaatagtagtatattataatatgattaattatgttataagaaaatgatataatcgatggtaatttgaaaatatttttttagttaagatgtaatattgatattgttagatatttaaataaaatagaaaaaaataggaagtttaggttgttttgtaattttaattttatttggtaattatttaataatttggtatatattttttagatgttttattaagatgtgattgtggttattaagagagtagagttagataaagtttggaatttatttttatttgtattttttttacggttttgggtaaattatgtagttttttaattttttagttttttaatttgtaaaatggaaataatatttgtaattatattattgggttgtagtgaggatgataaggaataatgtatgtaaagtgtttggaatagtgtttgataagtagagtgagtattttatagatgttatttattagtatgtatatagatatatatgtatttagagatatgtaaattgttagaaataaaattcggagttttaaagaaaagtgagtaaataaaggattttttagtaaagtaaatttatttcggtgtagaagggtgtttttcgtagggttgattgttacgagagtatatcgaataaaggagagtagaagtttttatttttaagatgatttttgtttttgtgttttttttttatcggttggagttagattgtataatttaaattagattcgattggttaaatatttaaatttttttagataaggtgggtttatgatgggagagagggaagaggaggaaggggttatttatagaggattagagcgttcgttagtttatttttaaataaggaaataaatgtgagttggggttgtggtatgtttgggtatatagtaaaattagaaagaagaaaaggagaagaaagaggggtggtaatttagaattagagaataagaagatgagtaggttgtttgaagagaaattttgttatattttatataaatatatatatgagaaagataatttatatatatatgaataggtatgtga

SEQ ID NO: 1389 - DNA, 6265 bp, Artificial Sequence
  chemically treated genomic DNA (Homo sapiens)
tgagattataggcgtgcgttattatgtttagttgatttttgtattttttagtagagatggggtgtatgtattcgttcgtttttacgttgttgataaaggtataatcgaaattgggaataaaaagaggtttaattggatttatagttttatatggttggggaggttttagaattatggtaggaggcgaaaggtatttattatattgtggtggtaagagaaaaatgaggaagaagtaaaattagaaataagataattttattcgatttcgtgagatttatttattattacgagaataaggaaaatttattagtttaatagtagattttttagtaaaaattttataagttagaagggattagggttttattttcggtttttttaaataaaataattattagttaagaattttatatttagtgaaattaagtatcgtgtatgaaggaaagttatagttatttttagataaataaatgttgagagaatttattattattaagttattattataagaattgttaaacggagttttaaattttgaaataaatttttgaaatatattaaaatagaatttttttaaagtataaattatataggatttataaaataaaaatttaagttaaaaagtaaaagtaaaaaataaaaaaatttattcgggaggtagaggatgtagtgaattgagattgtgttattgtattttaggttgggtgatatagtgagagttcgttttaataaataaattaataaataaatgtttatgtttttattttgaaaatgtttattggaaaaataaagatttgtaattaaaatgaatagggagatttttggattgtggtaagtaaaatggatgtttatatttatttttttttaagaaatattatttgaaatgtttattattaaacgttttttggatggatatagtaagttttgtataagtttttataaattttgattgatagtatagatgttttaattttatatttttaatagataagtgtttattaagatagatttattaggtcgggcgtggtggtttacgtttgtaattttagtattttgggaggttgaggtaggtggattgtttgagtttaggagttcgagattagtttgggtaatatggtaaaatttcgtttttatttaaatataaaaaaaaattagtcgggcgtgatagcgtacgtttgtaattttagttattatggaggttgagataggagaatcgtttgaatttgggaggtagaggttgtagtgagtcgagattatgttattgtattttagtttgggcgatagagtgagattttattttaaaaaaaaaaaaaaaaaaaaaagatagatttattattttagtagttaattgaagggaaggtgtatagaatcgtaatatattattttatattaaggtaagtacgtaatcgttttttgtttagaaaaattataatttagggagaaagttttatattttattataaagggagtttattgttttttgaaggattattatagaaataaaatttgatataaatttagtgtataattatattatatagattttaaatttttttaaatatgagtttgtgagtttaaggtttataggagttagtgttatttatttgtatgaagttagtgtttataaaagtgtttttgatttttttttgggtaattttatttatttttagagtattcgtttaaaaaataaggaattgatttatttagttaattaaatattaagtagtatgatattagattataataaatattttaaaaggtaaaaatgaagggagggtggatttttagaataaagggatgttaatttattgtatgtttattgattgttattgaatttaagtaatagtatagattaaagttttatgttttattttattgtttttatttgaaaattttagaaatgtaaaattggataagattttttaagataatttgatttatttttggtaaatttttatgaggtaaaaatttaaggtttttatgtaattggtttatgttgtttttgaatatttaggggatagagataattttttttttttatttattttatttatttaatttaattttattttgagatagggttttgttttgttatttaggttggagtgtagtggtgtgatttcggtttattgtagtttttattttttgggtttaaacgatttttttattttagttttttaatgggtggaattataggtttaaattattatatttggttaatttttttattttttcgtagagacggggtttttttgttttgtttaagttgttttttaatttttgggtttaagagatttttttattttggtattttaaagtgttgggattatagttttgaacgattgattttagtttatttttagagatgggggtttagtttgtttaggatatagtgtagtagtatgattatgatttattgtagtttggattttttgggtttaagcgattcgtttgtttttgttttttgggtagttaggattttaggtatgcgttattatatttagttaattaaaagtttttgtttttgtttgtttttttgagatagattttggttttgttatttaggttggagtgtagtggtatgattttgatttattgtaattttcgtttttcggttttaagcgatttttatgttttagtttcgaaagtagttgggattataggtatatattattatgttcggttaatttttgtgtttttagtagagatggtatttcgttatgttgattaggtcggtttcgaaattttgattttaagtgatttatttgtttgagttttttaaagtgttgggattgtaggcgtgagttttcgcgttcggttgttttttttttttttttttgtttttagagatgagattttgttttgttgttttggttggtttggatttttagggtttgagtaatttttttattttattttttttagtagttgggattataggtatgtgttattatatttagttaatttttaaaatttttttgtagagatgaggttttattatgttgtatttgttggtttttaattttttggtttaggtgatttacggttttttttttaatttttttatttttgttttggttttttaaattgttgggattataggggttagtaatttgtgtttggtagagataattttttttgaataaaggaaatttgttttggtattaagtaatagtaatgtttatatgagttatttataagtttttacgaaattaagatattttatataggttgtattttttttgtaatttttataaaagtcgggttagttattaggtgttttttattgagaaattgaggttaaagagaggtatggtaatttgttttaggtcgcgtttttggtaagtgcggggtttaggatttatatttaagttgtttttttcgttaattttgttgttttttaaatgtagtatatatatatatatttatttatataaagtgacgtaataaaattagtatatataagtttaagtttgttttaagaaaaaagtttttttggataatataaatgaatgataagataattttatttaaatttgttattaaaataatagtttatattgaattatttagaattttaaatttcgttttttaaaaattaagggtcggttgagtacggtggtttacgtttgtaattttagtattttgggaggtagaggcgggcggattacgaggttaagggatcgagattattcgggttaatatgatgaaatttcgtttttattaaaaatattaaaaaaattagtcgggcgtggtggtgggcgtttgtggttttagttattcgggaggttgaggtaggagaatggcgtgaattcgggaggcggagtttgtagtgagtggagattgtattattgtattttagtttgggcgatagagcgagattttattttaaaaataaaaataaaaataaaaaataaaaattagttgggcgtggtggtaagtgtttgtatttttagttattcgggaggttgatgtagagaatcgtttgaattcgggaggcggaggttgtagtgagtcgagatcgcgttattgtattttagtttgggcgatatagcgagatttcgttttaaaaaaaaaaaaaaaaaaaaaaggaaaagaaaagaaaaattataggtatttgtgtggaataaattaattataaatttttaagacgatttttgttattaatattttaatttataatttagtaaatatatatagatattttttatagggatatagttttaggtttttttttgggtattcgtttcgagatttggagagattttgatgtttgtgtgtgattaaggagaagaatagttgaattatatttaaaagcgagtttttttaattaagaatttataatataaattaagataatgatagtattttatttgttttttaattttaatagtttttttttttaagttagttagtttattttttttttttatttttttttaaattgggaaattatttcggaggtcggaggtagaaaggggcggtaggtggtcgggtttcgttgtttttcgcgtttttcggggttcgttatatacggtgttaacgggacgtcgcggtcggtcgtatgagcgtaaaagtagggtagcgaggtgagtagagttagagtttagaaggggtcgtaagttagacgaggggttgggaaaaaagagttttttttaaggttaatagaagcgtgcggagcgtgagaagtagtatttcgtacgtagattcgttcgtcggtcgggtggtatcgtttagtcgttcgttcgttagaaggtagcgcggtttcggttcggtttagttcggcgtatgcgtcgtagtttttttttcgttttcggcgttcgtttttttttttttttggcgggtttggggcggcggcggcggcggcggcggcggcgcggtgacgttagggcgttggggtagtttttgtgatagacggagttggagcggcggggcggcggcggagttcggcggtcgggagagcgagtgagcgagcggaggagtagcgatacgggagtttagggagcgagaaggagaaggaggggagcgttcgggcgcgagcgagagaaatcgcgagcgtcgagtttggattcgagtttcggaacggttgaggagttcgttcgtttttttttttttttttttttcgggttcgggtttagcgcgttatttttttttttttttttttttttttttttttttttttttttttttttttttttttttttcgtcggtggatgggagtgaaggacggaagaggttttgcggaggcggcggtgtagcgtttcggtaaggcggcgcgggtttgcgtttttttttttgttttttttatcgcgttcgggcggttgtaggtcggattcggcggtttgacgatgtggttgcgtcggtttttttttttttatttttttttttttttgttttcgtcgtcgtttttttttttttttttttttttcgtttttaaaatggcggtcgcgacggtcgttgagtgagagattcggaggagggggattgttcggggagggcgttgttttcgttttttttttttcgggttcggttttgggggttgtcggcgtttttgcgattttcgtttcgcggttttttttaagaagggatcgtttttttttttcggtgatttagtaagaaaagtatttttgggttggaagggcgtggggattaggtagttttttgattttggggaaaaggatcggttttgtttttttcggtcgcggagacgagtatcgtagtttttattttatttttagttatcggttcggggatcggtttagtttcgcgtcgtcggggtatttatagggttttttaggtatttcgttttcgattggtttttaagatggggttgattagcggagggtggtttatcgtttttttggttttcggtgcggcggtttagttttagtattcgtcgaggagaggtagttcggtttatcgagtaattcgtagtatttatttatcgaatttggtaggattttttttttgttatcggtttttcggtcgggagttgttttttgatgttgttaatatttagtttcgaggttttttgttattttttttcgtttaattttatttttttgtttttttgggaaacgtagtgtttttgtatatttattttttttagttttttatatgagaaaatgtttttgaggtggtcgatatattttgattttgtatttttaaacgtagtagtagaggggaagaggtttttcgtatttagtaggagagagtaaggtattatagttttatatgttatgttatttttttttagtgatttagt

SEQ ID NO: 1390 - DNA, 6265 bp, Artificial Sequence
  chemically treated genomic DNA (Homo sapiens)
gttaagttattgaagaaaggtagtataatatataaagttatggtattttgtttttttttattaaatacggaaaatttttttttttttattgttacgtttagaggtgtagagttaaaatgtgtcgattattttaaaggtatttttttatgtgggaggttaaagagggtaaatatgtagaggtattgcgttttttaaaggggtagggagatgagattagacgaaggggaatggtagggagtttcgaagttgaatgttaatagtattaaaaggtaattttcgatcgaggagtcggtggtagaaagaaaattttgttagattcggtgggtggatgttgcggattgttcggtgggtcgggttgttttttttcggcgggtgttgaggttggatcgtcgtatcgggggttagggagacggtgggttatttttcgttggttaattttattttaaggattagtcggggacggaatgtttggaaggttttatgagtgtttcggcggcgcggggttgagtcggttttcgagtcgataattgagggtggggtggggattgcggtgttcgttttcgcggtcggggagagtagggtcgatttttttttttaagattagagagttatttggtttttacgtttttttaatttaagaatattttttttgttaagttatcgagggaggagggcgatttttttttggggagggtcgcggggcgggggtcgtagaggcgtcggtagtttttaaagtcgggttcgggaggagaggagcgagggtagcgtttttttcggatagtttttttttttcgggttttttatttaacggtcgtcgcggtcgttattttgagagcgaggagagaagaagaaggaggaggcggcggcggaggtagggggaggggagaatgggagggaggggatcggcgtagttatatcgttaggtcgtcgggttcggtttgtagtcgttcgggcgcggtggaggagatagaggggagggcgtagattcgcgtcgttttatcggagcgttgtatcgtcgttttcgtagggtttttttcgttttttatttttatttatcggcgggggagggggagggagaggggagggaggaaggagggagggagggaaggaggggggaggatggcgcgttgggttcgggttcggggagggggaggggaggggagcgggcgggttttttagtcgtttcggggttcgagtttaagttcggcgttcgcggtttttttcgttcgcgttcgagcgtttttttttttttttttttcgttttttagattttcgtgtcgttgttttttcgttcgtttattcgttttttcggtcgtcggatttcgtcgtcgtttcgtcgttttagtttcgtttgttataggagttgttttaacgttttgacgttatcgcgtcgtcgtcgtcgtcgtcgtcgtcgttttagattcgttaggaagagggaggggcgggcgtcgggagcggaggaggggttgcggcgtatgcgtcgggttgggtcgggtcggggtcgcgttgttttttagcgggcgggcggttgagcggtgttattcggtcggcgggcgagtttgcgtgcgaggtgttgttttttacgtttcgtacgtttttgttaattttgggagaggttttttttttttagtttttcgtttgatttgcggttttttttgaattttggttttgtttatttcgttgttttgtttttgcgtttatgcggtcgatcgcggcgtttcgttggtatcgtgtgtggcgggtttcgggaggcgcgagaggtagcggggttcggttatttatcgtttttttttgttttcggttttcgagatgattttttagtttgggggggaatgagggaggggagtaggttggttggtttgggaggaggagttgttgaggttaaaaggtagatggaatgttgttattgttttgatttgtattatagatttttaattgggaggattcgtttttggatatgatttagttatttttttttttagttatatatagatattagagtttttttaggtttcgaaacggatgtttaaagaaaggtttggaattgtatttttataagggatgtttgtgtgtgtttgttaaattatggattgaaatattgatgataagagtcgttttggggatttgtagttaatttattttatatagatatttatgatttttttttttttttttttttttttttttttttttttttgagacggagtttcgttgtgtcgtttaggttggagtgtagtggcgcgatttcggtttattgtaattttcgtttttcgagtttaagcgattttttgtattagtttttcgagtagttgggagtataggtatttgttattacgtttagttaatttttgttttttgtttttgtttttgtttttgagatggagtttcgttttgtcgtttaggttggagtgtagtggtgtaatttttatttattgtaggtttcgtttttcgggtttacgttatttttttgttttagtttttcgagtagttgggattataggcgtttattattacgttcggttaatttttttggtatttttagtagagacggggttttattatgttggttcggatggtttcgattttttgatttcgtgattcgttcgtttttgttttttaaagtgttgggattataggcgtgagttatcgtgtttagtcgatttttgatttttaaaaagcgagatttggggttttgaataatttaatatgggttattattttaataataggtttaaatgagattattttattatttatttgtattgtttaaggaagttttttttttgaaataggtttaagtttatgtgtattgattttattgcgttattttatgtaggtaaatatatatatatatattgtatttgagaagtagtagagttaacgaaagagataatttaggtgtaaattttggatttcgtatttgttagaagcgcgatttggggtaaattattatatttttttttggttttagttttttaataaaagatatttaataattaattcggtttttgtgagaattatagaggaggtgtagtttgtgtaaagtattttagtttcgtggggatttataggtaatttatgtaaatattattgttgtttgatattaaaataagttttttttgtttaagaaaggttatttttgttaggtataggttgttaatttttgtaattttagtaatttgggaggttaaggtagggatggggaggttgggaggggggtcgtggattatttgagttaaggagttggagattagtaggtgtaatatagtgaaattttatttttataaaaaaattttaaaaattagttaagtgtggtggtatatgtttgtagttttagttattggggaggatgagatgggaggattgtttaagttttggagatttagattagttagggtaataaagtaagattttatttttaaaaataaaaaaagaaaagaaaaatagtcgggcgcggggatttacgtttgtaattttaatattttgggaggtttagataggtggattatttgaggttaggatttcgagatcggtttggttaatatggcgaaatgttatttttattaaaaatataaaaattagtcgggtatggtggtgtgtgtttgtaattttagttattttcgggattgaggtatgagaatcgtttgaagtcgggaggcggaggttgtagtgagttaagattatgttattgtattttagtttaggtaataaagttagagtttgttttaaaaaaataaataaaaataaaaatttttaattagttgggtgtggtggcgtatgtttggagttttagttatttaggaggtagaggtaggcggatcgtttgagtttaggaggtttaggttgtagtgaattatggttatgttattgtattgtattttgggtagattggatttttatttttaaaaataggttgggattagtcgtttaaggttgtaattttagtattttggggtgttaaggtgggagaattttttgagtttaggagttggagagtagtttgggtaagatagggaaatttcgtttttacggaaaaatagagaaattagttagatgtggtggtttgggtttgtggttttatttattgggaggttgagatgggaggatcgtttgagtttaggaggtggaggttgtagtgaatcgagattatattattgtattttagtttgggtgatagagtaagattttgttttaaaataaagttaaattaaataagtaaaatgagtaaaaaagaaagattgtttttattttttaagtgtttaaaggtaatatgagttaattgtatgaaggttttgggtttttgttttatgaagatttgttagagatgaattaaattgttttagaaagttttgtttagttttatatttttgggatttttagataaggataataaaatgaggtatagagttttggtttgtgttattgtttgggtttaataatagttaataaatatgtaataaattagtatttttttgttttaagaatttattttttttttatttttattttttaaaatatttattatggtttgatattatgttatttaatatttaattagttgagtaaattagttttttattttttaaacgaatgttttaaaagtaaataaaattgtttagaaagagattagaaatatttttataaatattgattttatataaataggtagtattaatttttataaattttgagtttatagatttatatttagaaagatttaaaatttatatgatgtaattatgtattaaatttatattaaattttatttttatagtggttttttaaaaaataataaattttttttgtggtaaggtataaaattttttttttggattatgatttttttgaatagaaaacggttacgtgtttattttgatgtgaagtgatgtgttacggttttatgtattttttttttagttagttgttaggatgatagatttattttttttttttttttttttttttgagatggagttttattttgtcgtttaggttggagtgtaatggtatgatttcggtttattgtaatttttgttttttaggtttaagcgatttttttgttttagtttttatagtagttgggattataggcgtgcgttattacgttcggttaatttttttttgtatttgagtagagacggggttttattatgttgtttaggttggtttcgaatttttgagtttaagtaatttatttattttagttttttaaagtgttaggattataggcgtgagttattacgttcggtttgatagatttattttaataaatatttgtttattgaaaatgtagaattaggatatttgtgttattaattagaatttgtaaggatttatatagaatttattatatttatttaggaaacgtttaataatggatattttagatgatgttttttgaaaaaaaataagtataaatatttattttatttattataatttaagaatttttttgtttattttaattgtagatttttatttttttagtagatatttttaaaatggaaatataaatatttatttattgatttatttattgagacggatttttattgtgttatttagtttggagtgtaatggtataattttagtttattgtattttttgtttttcgggtgggtttttttgttttttgtttttgttttttaatttgaatttttgttttgtaggttttatgtgatttatgttttaaagaggttttgttttgatgtgttttaaggatttgttttaagatttagagtttcgtttagtagtttttgtaatggtggtttggtaatggtgaatttttttagtatttgtttgtttgaaaatgattgtagtttttttttatatacgatgtttggttttattggatataaaatttttggttgataattgttttgtttgaggaggtcgaagataaggttttaattttttttagtttgtagggtttttgttgagaaatttgttgttaaattgataggttttttttattttcgtgatagtgaataagttttacgagatcggatgggattattttgtttttggttttgttttttttttattttttttttgttattataatgtaataggtgtttttcgttttttgttatgattttgaagtttttttagttatgtggaattgtaagtttaattaaatttttttttgtttttagtttcggttatgtttttattagtaacgtgaaaacgaacgaatatatatattttatttttattaaaaaatataaaaattagttggatatagtggcgtacgtttgtagtttta

SEQ ID NO: 1391 - DNA, 10716 bp, Artificial Sequence
  chemically treated genomic DNA (Homo sapiens)
gaggtgaagtttcgttttttttgtttaggttggagagtaatggtggatttcggtttattgtaatttttgttttttaggtttaaacgatttttttgttttaattttcgaagtagttgggattataggtatgtgttattacgtttagttaatgttgtatttttagaatagacgtagtttttttatgttggttaggttggttttaaattttggattttaggtgattcgttagttttggttttttaaagtgttgggattataggtgtgagttatcgtttttggttgggttgtttttttaatattattatttgagttttttaaacgtgaattttttttaagaaaatttttagaataataaatatttattgagtatttataggtatgtcgtatattgtgtgagtagttttaagagaattttaaggtaaattcgtaatgtaaatattattttatatgaggataaaattattttggattatatatgtttaaagtaatatatatttagtgttatttgatagtataagttatttgaaaaattatttgatatataatattaaatagattaataagatagaaggttaataaggatatttaggatttgaatttagttttgtattaagtagatttaatagatatttatagaattttttattttaaattaatagaatatatattttttttagtattatattatatttattttaaaatggattatataattggaagtaaagtattttttagtaaatgtaaaataatataaattataataaattgttttttagattatagtgtaattaaattagaatttaggattaagaaatttatttaaaatcgtataattatatggaaattgaataatttgtttttgaatgattattgggtaaataataaaatgaaggtagaaataatgatgttttttgaaagtaatgagaataaagatataacgtattagaatttttgggatatatttaaagtagtgtatagagggaaatttatagtattaaatgtttataagagaaggtaggaaagatttaaaattaatattttaatattataattaaaagaattagagaagtaagagtaaatatatttaaaagttagtagaaggtaagaaataattaagattagagtagaattgaaggagatagagatataaaaaattttttaaaaaattaatgaatttaggagttggtgttttgaaaagattaataaaattgatagatcgttggtaagattaataaagaagaaaagagagaataattaaatagatgtaataaaagatgataaaggggatattattattaattttataaaaatataaattatcgttagagaatgatataaatatttttacgtaaataaattagaaaatttagaagaaatggataaatttttggatatatatatttttttaagattaaattaggaagaagttgaatttttgaatagattaataataggttttgaaattgagataataattaatagtttattaattaaaaaaaaatttaggattagatagatttatagtcgaattttattagagttataaagaggagttggtattattttttttgaaattattttaattaatagaaaaaaagagattttttaatttattttatgaggttagtattattttgatattaatgttcggtagagatataataaaaaagagaattttaggttaatacgtttgatgaatattgatgtgaaaatttttaataaaatattggtaaatcgaatttagtggtatattaaaaagtttatttattataattaagttgggtttatttttgggatgtaaggttggtttaatatatataaattgataaacgtaatttattatataaataaaattaatgataaaaattatatgattatattaatgtagaaaaggttttcgataaaatttagtagttttttatgttaaaagttcgtaataaattaggtattgatggaacgtattttaaaatagtaagagttatttatgataaatttatagttaatattatattgaatgggtaaaaacgggaagtattttttttgaaaattagtataagataaggatgtttttttttattatttttatttaatatagtgttggaggttttggttagggtaattaggtaagagaaagaaataaagggtatttaattaggaaaagaggaagttaaattttttttgtttgtagatgatatgattgtatatttagaaaattttattgttttagtttaagatttttttaagttgataagtaattttagtaaagttttaggatataaaattaatgtgtaaaaattataagtatttttatatattaataatagataataatagagagttaaattatgagtgaatttttatttataattgttataaagagaataaaatatttaggaatttaatttataagggatgtgaaggatttcgttaaggagaattataaattattgtttagtgaaataaaagaggatataaataaatggaagaatattttatgtttatggataggaagaattagtattgtgaaaatggttatattgtttaaggtaatttatagatttaatgttatttttattaagttattaaagattttttttatagaattggaaaaaattattttaaattttatatggaattaaaaaagagttcgtattgttaagataattttaagtaaaaagaataaagttggaggtattacgttatttgattttaaattatattataaggttatagtaattaaaacggtatggtattagtattaaaatagatatatagattaatagaatagaatagaggttttagaaataatattatatatttataattatttgttttttgataaattgataaaaataagaaatggggaaaggattttttatttaataaatggtgttaggaaaattggttagttatatgtagaaagttgaaattggattttttttttatattttatataaaaattaatttaagatggagtaaagatttaaatgttagatttaaaattataaaaattttagaagaaaatataggtaatattatttaggatataggtatgggtaaagattttttgattaaaatattataagtaatggtaataaaagttagaatagataaatgggatataattaaattaaagagtttttgtatggtaaaagaaattattattagagcgaataggtaatttatagaatgggagaaaatttttgtaatttatttatttgataaagggttaatatttagaatttataaagaatttaaataaatttataagaaaaaaaataaataattttattaaaaagtgggtaaaggatatgaatagatattttttaaaagaagatatttatgtaattaatagatatatgaaaaaatgtttattattattggttattagagaaatgtaaattaaaattataatgagatattattttatgttagttagaatggcgattattaaaaagttaggaaataatagatgttggagaggatgtggagaaagaggaatatttttatattgttggagggagtgtaaattaatttaattattgtgaaagatagtgtggcgattttttaaggatttagaattagaaatattatttgatttagttattttattattgggtatatatttaaaggattataaattatgttgttataaagatatatgtatacgtatgtttattgtggtattatttataatagtaaagatttggaattaatttaaatgtttattaatgatagattggattaagaaaatgtggtatatatatattacgaaatattatgtagttgtaaaaaggatgagtttatattttttgtagggatatggacgaaattggaaattattatttttagtaaattattataaggatagaaaattaaatatcgtatgtttttataggtgggaattgaatattgagaatatttggataaagggcggggaatattatatacgggggtttgtcggggattgcggggttgggggagggatagtattaggagaaatacggaatgtaaatgacgagttgatgggtgtagtaaattaatatggtatacgtatatttatgtaataaatttgtacgttgtgtatatgtattttagaatttgaataaaaaaaaaaaaaaaaaagaaaaattatttgatatattttgatattttaggtttttaggattttatagtatttttaataggttttgttagtaaaattaatttttattttcgtattagtttaagagttttggaaggttttgtttatttattagtatagagttgagatttttaaagggttagtttagggtattgttttagtaatcgttgcgttgttataagtttgagtatattttttgttttttttttttatttttatagattttgtatttatttagtatataatttttttaatattgattttgtatatgtatgtttttttttaaattggatgtattttttaaggaaaagtttggggttcgttatttttttatgtattatttttataggcggttatttaaaatttttatatttattatagaaatagaaattttattaataaatgttaggtattgtttttttaattttggttcgttattttttttttatttttagtagtttggtttattttatgggtggaagaggaagttaagttggttgagtgtgaagggaatggcgttagtgtgattttacgttatatcgtttcgaatgttagttttatattgcggtggtacgaacgtaggattgagagatgtagttggagtaaagagagaagtttatgttttttagacgttatataaaatgggggtaatcgcgagaataaagtagggtatttaacggggtgtggcgggatatttgggcgtacgtcgttagcgttcgggagagcgaaggcggggagagaggaattacgttgaggcgtggtaggatgggggcgggattttcggaagttatttggttgagtggtaggggaatcggaagtggaggagttgttgttggtgttggggtcggaggagggacgcgtcggagcgggatcgacgggatcgagcgagcgatcgacgcgttattcgtcgacgttttagtcgtttggggttcgtacggattttttattttagtgagtgtatttagggtcgtagggaatcggtggtttagaggcgggggtcggaaggggttgcgaggtgttattgtgagaggttcgcgatttttttttttttatttttgcggtttttttttttacgtcgttttatttatttggggggggtttcgcgagcgcgcgttttttttgcgggtttagcgtcggttttttagtagtcggcgtagttagttttcgttttgagagttttttttcgatattttatatcgaaagttggcgtttttttttagtcgtcggtcggcgtttttacggttttttttaggagggtagcgcggcgggcgtttcgtttcgttttgttttgttttgttttgtcgggtttattcgcggtaggttttgcgtattttagttcgtttcggttgggcgttgtagtttttgttcgggttttcgttgttgttttttttttttattataggggtttaattttttattttttttttttttcgcgtttggtcggaggttaaaattagttatttcgttgtgtttttatcgagtattttttttttttttttttgttgaaaaattttaattttttagaaattttttcgttgttttttaggatgtgtttatttaaaagttgtatagatcgttattattcggaagggattattttttggaaggttttttagtttttattttattttagatatgaatgtgttcggagcggttggtgatttgtttaaggttagttagttagataaatttgttagcggagaggtttggggggatgttttttttttggtttatcgttcgtttgttagattcgtgttttttggtttataggtttgattgattcgttgcgtggtgatttatgtttttgttttttatagttcgtaggttagcgttgttttttagaatttatatataaataagaattaatattcggagttttcgtttttttgtagagtttattcgtagagaaaggaaagattattcggatttattttaggattttattttgtatagtttgaaattatgggaaggggttgggtcgggggtaaaggtgtggagaaagtggaaggagaaagtgtttaattaagattgtttttgttttggatgtgttttgtgtttttggttttttttgggtatattgttttgatataaaggttgtttttttgtgggggagaaggggaggattagtttgttggtttgggtatttgattataaattatggaggtgttggatcggaggaattatttattagtttacggaggttatcgggtatttaggataagggtcgtttttttttttagaataattatatttattttttttgaaataaagtggagagttttaggtttgagtggaaattttaaattttttaatttttggtttaattttttttatttgtttttttggtttagattaaaatatttaatttagttggagaagttataacgttttgttgttggacgtggttttttattaaatatattgtattatgttggtataagtatttggaaattttagtgttgtattgttatagtaagtagagaatatagaaaaggtaggaaaatcgtgtaagtcggttatttttcgtttttttagagaatttattttaatggataataaagttttttttggagtatagtttgttgtggtaaattaataaaatttgttttttagattttttatttgtattttgtttggtttttttttttttttttttttttttttttgtgtgtgtgacggagttttagtttgtcgtttaggttggagtgtagtggcgcgatttttatttattataatttttgtttttcggtttaagtttataggtatgtgttattatatttagttaattttgtattttttttttttagtagagacggggtttcgttacgttggttaggtaggttttgaattttcgattttaagtgatttattcgtttcggttttttaaagtgttgggataataggcgtaggaaatttaaagttatttagaagtttgcgttttattattgggtagtttttagttcgtttttattttatgtgtttataagagtagataatttttcgttttaattggaaagaatataatagttggagtttgagtaatatggtaagatttcgtttttacgaaatttaaaaattagttatgtgtggtggcgtgggtttgtagtattagttattttggaaggaagaaatgggaggattatttgagtttaggagattaaggttgtagtgagttgtgttacgttattttattttagttaacgattgattgagattttgtcggggtaaaaaataaaaaataaaatatagtcggttgggtgttgtgatttatttttgtaattttagtattttgggaggttaaggtagtaggattatttgagtttaggagtttaagattagtttgaataatatggtgagatttttatttattggaaaaaaaaaaaaaaaaggttaggtagttattcgggaggatcgtttgagtgtaggaggcggaaattgtagtgagttatgatttttttattgtgttttagtttgggtattagagtgaagttttattttaaaaaaaataaaaaaaaagtcggtcgggcgtggtggtttacgtttgtaattttagtattttgggaagttaaggtgggcggattatttgatgttaggagttcgagattattttgattaatatgatgaaatttcgtttttattaaaaatataaaaattagttgggtatggtggtaggtatttgtaattttagtattcgggatgttgagacgggagaattgtttgaattcgagaggcggaggttgtagtgagttaaggtcgcgtcgttgtattttagtttgggtaacgggagcgaaattttgttttaaaaaaagaaaagttagtttaatttttatttttgagatagggttttgttttgtttttgaggttggagtgtagtggcgtattattatttttagttaattgttgtggtttttgtagagatatagttttattatgttatttaggttggttttaaatttttgggtttaagtagtttatttgttttagtgttttaaagtgttgggattataggtatgagatattgtatttagttataatagtttttttgatttttaaattgttttaattttttatatgtatagttttttaggttgtgtatttttagttttgtttttaaagaggagattgtgtgagtttgtggtttagtttttttttttttggtgtttaaaaatgttattaagttatgggtattagtaaaattgaaagttgttttgtaataagattttgattgataaaataatataaaattagagttagaagatataaagaaatatatttttgtttagatattttgttattgtaggggaagaaggattattttgtatttatagttatagataaaaagattgtgtaattaggaatattttgtgattttttagttttttttgttttgtagttttagataagtgatattttgtttttcggtttttttatgtgtatgttttttttatttttttatgaagaaatttagggttgagatggaagtgttttgtttagggtattagaatgttattaaatttgggtagtagaaagtataagtgaaataatttagtaaattagaattagaatttattttttttttttttttttttttttttttttttttagatggagttttgttttgttatttagagtggggtgtagtggtgtgatttttgtttattgtaatttttattttttgggtttaagagatttttatgttttagttttttgagtagttgggattataagtatgtgttatttaatttggttaattttttgtatttttagtggagataggattttattatgttggttaggttggtttcgaatttttgattttaggtgatttttttgtttcggtttttttaaaatgttgggattataggtgtgagttattatgttcggtttttatgtagttttttttaattagaatataatattatttgtttaagagtaggttttggaagtttgttattttggttttaaattttatttgttttgtgttgtttattagttttgttgttatggagaagtttttttaggtttttttgagtattatgtttatttaaataataaagtttttagtatagggtttggtaaatagtaagtttttaataaatgttattttagattagttgtttgtttgttggatgaattttgaaaatttatgtttgtttattgaattgtagttttaagttgggagtgttttagttttttgtatttggagtttaatgtttttattgtatattttgtagaattgattgaaagtaatttggttttttatttgtttttttatttatagaagattagtagttttaattttgcggaattttatttgttagatgatatatttggatttattattattaaaatttttttttttttttttttttttttttgagatggagtttggttttgttatttaggttggagtgtagtggtgtgatttcggtttattgtaattttcgtttttcgggtttaagtgatttttttattttagttttttgagtagttgggattataggtgtatgttattatgtttagttaattttttgtatttttagtagagacggggttttattatgttggttaggatggttttaattttttgattttgtgatttgtttgttttggttttttaaagtgttgggattataggcgtgagttattatatttagttattatttttaaaatttttttagtggaaatttataaaaataaaaatatttagtaaatatttgtcgaaaattagtgttaaggtttatgattatttttgttataatttgtattatagttatttgtgtgatgtttatttagtaattagtggattataattattgtagtagtaattttgtaagtgttttttttttgagatagagttttgtttagtcgtttaggttggagtgtattggtatagtttcggtttattgtaagttttatttgtattttttgggtttacgttatttttttgttttagttttttaagtagttgggattataggcgttcgttattttattcggttaatttttttgtatttttagtagaggtagggttttattatgttagttaggatggttttgattttttgatttcgtgatttatttgtcgtttagttttttaaagtgttgggattataggtgtgagttattgtgtagggttagtaattttgtaatttttaatagtagtaagtgtgtaatttttaatagttgaaaagtttttgatgtagatttaattgtattgtaagtgtttaataattttttgtgttatttggtatttatagtaatatataattataaaaaattaatataggtataaagtatatatttggaggagattttttaaatgtattgtattgtaattaagttatatttaaagttatttggcggtttagtggtgttatttttatgggatttagttatgttttgtaatttatttttatagaaagtaattgtttttgtttagttttttaattgtttttaggtaaattatataaaattttaattattatttaaagtttgatgtgtataatatttaagtggtaataaatttttttgttaataaatgaaatatgatatagacgtttttttttagg

SEQ ID NO: 1392 - DNA, 10716 bp, Artificial Sequence
  chemically treated genomic DNA (Homo sapiens)
tttgagaaaaaacgtttatgttatgttttatttgttaataggaaggtttgttattatttaaatattatatatattaggttttaaataataattaaagttttatgtggtttgtttagaaataattgggaaattaaatagaaataattattttttgtagagatgaattgtagaatatgattaagttttataaagatagtattattaaatcgttagatagttttgaatatgatttagttgtagtgtagtatatttaaaaaattttttttaagtatatattttatatttatattagttttttgtgattatatgttattgtaagtattaagtgatataaggagttattagatatttatagtataattaaatttatattagaggttttttagttgttaagagttatatatttattattgttaagagttatagaattattggttttgtatagtggtttatatttgtaattttagtattttgggaggttaggcggtaggtggattacgaggttaggagattaagattattttggttaatatggtgaaattttgtttttattaaaaatataaaaaaattagtcgggtgaggtggcgggcgtttgtagttttagttatttgggaggttgaggtagaagaatggcgtgaatttaggaggtgtaggtggagtttgtagtgagtcgagattgtgttaatgtattttagtttgggcgattgagtaagattttgttttaaaaaaaaaatatttatagaattattattgtaatgattataatttattggttattaaataaatattatataaataattgtagtatagattatgataaaagtagttataggttttggtattggttttcgataaatgtttattaggtatttttatttttgtaagtttttattaagaaaattttagaaatgatggttgggtgtggtggtttacgtttgtaattttagtattttgggaggttaaggtaggtaggttataaggttaggagattgagattattttggttaatatagtgaaatttcgtttttattaaaaatataaaaaattagttgggtatggtggtatgtatttgtagttttagttatttaggagattgaggtaggagaattatttgaattcgggaggcggaggttgtagtgagtcgaaattatattattgtattttagtttgggtgatagagttagattttattttaaaaaaaaaaaaaagaaaaagaaaaaattttagtaatgatgagtttaaatatgttatttagtaagtaaaatttcgtaaaattagaattgttaattttttataaatagaaagataaataagaaattagattatttttaattaattttgtagaatatataatagaaatattaaattttaaatgtaaaggattagaatatttttagtttagagttataatttaataaataggtatggatttttagagtttatttaatagataaataattgatttaaaataatatttattaagaatttattatttattagattttgtgttaggagttttgttatttaaataaatatgatgtttaaagagatttaaggaaatttttttatgatagtagagttggtaaataatataggataggtgggatttgaaattagagtgatagatttttaaagtttatttttgagtaaatgatattatgttttgattagaaaagattatatagaggtcgggtatggtggtttatatttgtaattttagtattttgggggggtcgaggtaggaggattatttgaggttaggagttcgagattagtttggttaatatggtgaaattttgtttttattaaaaatataaaagattagttaggttgggtggtatatatttgtaattttagttatttaggaggttgaggtatgagaattttttgaatttaggaggtggaggttgtagtgagtagagattatattattgtattttattttgggtgatagagtaagattttatttaaaaaaaaaaaaaagaaaaaaaaaagaaaaaagataaattttaattttaatttattaagttgttttatttatattttttattatttaaatttaatggtattttgatattttgagtaaaatatttttattttaattttaaatttttttatgggaaaataaaaaaagtatatatatagagaaatcgaggaataaaatgttatttatttgaagttataaggtaggaagaattgggaggttataaaatatttttaattatatagtttttttgtttatagttatgaatataaggtgatttttttttttttataatggtaaagtatttgagtagaaatgtgtttttttgtgttttttgattttgattttgtattattttgttaattaaaattttattataaagtagtttttagttttattgatgtttatggtttggtaatatttttaaatattaggaaaagaaaaattgagttataaatttatataattttttttttaagaataaagttggaaatgtataatttagaagattatgtatatagaggattaaaataatttggaaattagagaaattgttgtggttgggtatagtgttttatgtttgtaattttagtattttgggatattaaggtaggtggattgtttgagtttaggagtttgagattagtttgggtaatatggtgaaattgtgtttttataaaaattataataattagttgggggtggtggtgcgttattgtattttagttttagggatagagtaagattttgttttaaaaataaaaattaaattggtttttttttttttgagatagagtttcgttttcgttgtttagattggagtataacggcgcgattttggtttattgtaattttcgtttttcgggtttaagtaattttttcgttttagtatttcgagtattgggattataggtgtttgttattatgtttagttaatttttgtatttttagtgaagacggggttttattatattggttagggtggtttcgaatttttgatattaggtgattcgtttattttggttttttaaagtgttgggattataggcgtgagttattacgttcggtcggttttttttttgttttttttgagatagggttttattttgatgtttagattgaagtatagtggagaaattatggtttattgtagttttcgttttttgtatttaagcgattttttcgaatagttgtttgattttttttttttttttttttaatagatggggattttattatattgtttaggttgattttgaatttttaggtttaagtgattttgttgttttggttttttaaagtgttggaattataggaatgagttatagtatttagtcggttgtgttttgttttttgttttttatttcgatagggttttagttagtcgttagttggagtgaagtggcgtaatatagtttattgtagttttgattttttgggtttaagtgatttttttattttttttttttagagtaattggtattgtaggtttacgttattatatatggttaatttttaaatttcgtagagacgaggttttgttatgttgtttaggttttagttgttgtattttttttaattgaaacgaagaattatttgtttttatggatatataaaataagaacgaattaagagttatttagtggtaagacgtaaatttttgagtgattttgggttttttgcgtttgttattttagtattttgggaggtcgaggcgggtggattatttgaggtcgggagtttaagatttgtttggttaacgtggcgaaatttcgtttttattaaaaaaaaaaaatataaaattagttgggtgtggtggtatatgtttataagtttgaatcgggaggtagaggttgtagtgagtagagatcgcgttattgtattttagtttgggcgatagattgagatttcgttatatatataaaaaaaaaaaaaaaaaaagaaagaaagattaagtagaatgtaaataaaaggtttgaagaataagttttgttaatttgttataatagattgtattttaggggaagttttgttgtttattaaagtgagttttttgggaagacgaggagtaatcgatttgtacgatttttttgttttttttatattttttatttattatgataatatagtattagaatttttaagtgtttatattagtatagtgtaatgtatttaatgagaaattacgtttaataataaagcgttataatttttttagttgagttagatgttttagtttgaattaggaaaatagatgaagaaagttgaattaagaattaaaagatttagagtttttatttagatttaagattttttattttgttttagagggagtgggtatggttattttgaagaagaaggcggtttttattttgaatgttcggtagttttcgtgggttggtgggtggttttttcggtttagtatttttataatttatgattaaatgtttaagttaataaattaatttttttttttttttttataaggaggtaatttttatgttagaataatgtgtttagaagaagttaaagatataaggtatatttaaggtaaagataattttaattaagtattttttttttttattttttttatatttttattttcggtttaatttttttttataattttaagttgtataaaatgaggttttagggtggattcgggtggttttttttttttttacgggtaagttttataaagaggcgaaagtttcgagtgttagtttttgtttgtgtataaattttgaaaagtaacgttggtttgcgagttatgaaaagtagaagtatgagttattacgtaacgggttaattaaatttgtagattagaaggtacggatttggtaaacggacggtgagttaggaaaaaaatatttttttaaattttttcgttgataggtttatttagttggttgattttgggtaggttattagtcgtttcgagtatatttatgtttaagatgagatgggggttggaaagttttttaagaaataatttttttcgagtggtgacggtttatgtaatttttgaataaatatattttaagaggtaacggagaagtttttaaagagttgaaattttttaataaaaggaggagggaaaagtgttcggtaaaaatataacggagtaattggttttggttttcgattagacgcgaggggagagaagagtgagaagttagatttttgtgataaagggaaaaggtagtagcggagattcgggtaggagttgtagcgtttagtcggggcgagttggggtgcgtaaggtttatcgcgggtgggttcggtagggtagggtagggtagggcggggcggggcgttcgtcgcgttatttttttgggaaaggtcgtggaggcgtcggtcggcggttgaggagaaacgttagttttcggtatggaatatcgggaaagggtttttagagcgaaaattagttgcgtcggttgttgggaagtcgacgttgggttcgtagagaaggcgcgcgttcgcgaggttttttttaagtggatggggcggcgtggggggaggggtcgtaagggtgggggaggggaggtcgcgggttttttataataatatttcgtagtttttttcgattttcgtttttaagttatcggttttttgcgattttggatgtatttattgaagtagagggttcgtgcgggttttaagcggttgaggcgtcggcgggtggcgcgtcggtcgttcgttcggtttcgtcggtttcgtttcggcgcgtttttttttcggttttagtattagtagtagtttttttattttcggtttttttgttatttagttaaatggttttcggaagtttcgtttttattttgttacgttttagcgtggttttttttttttcgttttcgttttttcgggcgttggcggcgtgcgtttaggtgtttcgttatatttcgttgggtattttgttttgttttcgcggttatttttattttgtgtggcgtttgagggatatgggtttttttttttattttagttgtattttttaattttgcgttcgtgttatcgtagtgtggagttggtattcgggacgatgtggcgtgaagttatattgacgttattttttttatatttagttaatttggtttttttttttatttatggaataaattagattgttgaaagtgggagggaaatagcggattaaggttaaggaggtagtatttgatatttattagtggaatttttgtttttatgatgaatgtggagattttgggtgatcgtttgtaaaggtgatatatagggggatgacgaattttaggtttttttttaaaagatatatttagtttaggggaagatatatatatataaagttaatattgaaaagattatatgttaaataaatgtaggatttataaaagtagagaggaggggtaagagatgtgtttaagtttatagtagcgtaacggttgttggagtagtgttttgaattggttttttaaggattttagttttatgttggtgaataggtagagttttttagggtttttaaattgatgcgggggtgggggttgattttgttgataaaatttgttaagaatattgtaaaattttgggagtttaaaatgttaagatatgttaagtaattttttttttttttttttttttttatttaagttttagggtatatgtgtataacgtgtaggtttgttatataggtatacgtgtgttatgttggtttgttgtatttattaattcgttatttatatttcgtattttttttaatgttattttttttttagtttcgtagttttcgataggttttcgtgtgtgatgtttttcgttttttgtttaagtgtttttagtgtttaatttttatttatgagaatatgcggtgtttggttttttgtttttgtgatagtttgttgagaatgatggtttttagtttcgtttatgtttttgtaaaggatatgaatttattttttttatagttgtatagtatttcgtggtgtatatgtgttatatttttttaatttagtttattattgatggatatttgggttggttttaagtttttgttattgtgaatagtgttataataaatatacgtgtgtatgtatttttatagtagtatgatttataattttttgggtatatatttagtaatgggatggttgggttaaatggtatttttagttttagatttttgaggaatcgttatattgttttttataatggttgaattaatttatattttttttaatagtgtaaaagtgtttttttttttttatattttttttagtatttgttgttttttgattttttaatgatcgttattttaattggtatgagatggtattttattgtggttttgatttgtatttttttgatgattagtgatgatgagtatttttttatgtgtttgttggttgtataaatgtttttttttgagaagtgtttgtttatattttttgtttattttttgatggggttgtttgtttttttttttgtaaatttgtttaagttttttgtagattttggatattagttttttgttagatgggtagattgtaaaaatttttttttattttgtaggttgtttgttcgttttgatggtagttttttttgttatgtagaagttttttagtttaattatattttatttgtttattttggtttttgttgttattgtttgtggtgttttagttaggaagtttttgtttatgtttatgttttgaatggtattgtttatgtttttttttagggtttttatggttttaggtttaatatttaagtttttattttattttgaattaatttttgtataaggtgtaaggaagggatttagttttagttttttatatatggttagttagtttttttggtattatttattaaatagggaattttttttttattttttgtttttgttaatttgttaaagagtagatggttgtagatgtgtggtgttatttttgaggtttttgttttgttttgttggtttatatatttgttttggtgttagtattatgtcgttttggttattgtagttttgtagtatagtttgaagttaggtagcgtggtgtttttagttttgttttttttgtttaggattgttttggtaatgcgggtttttttttggttttatatgaagtttaaagtagttttttttaattttgtgaagaaagtttttggtagtttgatggggatggtattgaatttataaattattttgggtagtatggttatttttataatattgattttttttatttatgagtatggaatgtttttttatttgtttgtgtttttttttattttattgagtagtggtttgtagttttttttgacgaggttttttatattttttgtaagttggatttttaggtattttattttttttgtagtaattgtgaatgggagtttatttatgatttggttttttgttattgtttgttattggtgtataggagtgtttgtgatttttgtatattgattttgtattttgagattttgttgaagttgtttattagtttaaggagattttgggttgagataatggggttttttaaatatataattatgttatttgtaaatagggaaaatttgattttttttttttttaattgaatattttttattttttttttttgtttgattgttttggttagaatttttaatattatgttgaataggagtggtgagagagggtatttttgttttgtgttggtttttaaagggaatgtttttcgtttttgtttatttagtatgatattggttgtgggtttgttataaatagtttttattattttgagatacgttttattaatatttagtttattgcgagtttttagtatgaagggttgttgaattttgtcgaaggttttttttgtattgatataattatgtggtttttgttattggttttgtttatgtgatggattacgtttattaatttgtgtatgttgaattagttttgtattttagggatgaatttaatttgattgtggtggataagttttttgatgtgttattggattcggtttgttagtattttattgagaatttttatattaatgtttattaggcgtattggtttaaaatttttttttttgttatgtttttgtcgggtattagtattaggatgatgttggttttataaaatgagttagggagtttttttttttttattgattggaatagttttagaaggaatggtattagtttttttttgtagttttaatagaattcggttgtgaatttgtttggttttggatttttttttggttggtaggttattaattattgttttaattttagagtttgttattggtttatttagagatttaatttttttttggtttagttttgggaaggtgtatgtgtttaggaatttatttattttttttagattttttagtttatttgcgtagaggtgtttatattattttttggcggtagtttgtatttttgtgggattggtggtgatattttttttattattttttattgtatttatttgattattttttttttttttttttattagttttgttagcggtttattaattttgttgatttttttaaaatattagtttttggatttattgattttttgaagggttttttgtgtttttattttttttagttttgttttgattttagttattttttgttttttgttagtttttgaatgtatttgtttttgtttttttagtttttttaattgtgatgttagggtgttgattttagattttttttgtttttttttgtgggtatttagtgttgtaaatttttttttatgtattgttttaaatatgttttagagattttggtacgttgtgtttttgtttttattgtttttaaagaatattattatttttgtttttattttattatttatttagtagttatttaggagtaggttgtttagtttttatgtaattgtgcggttttgagtgagttttttaattttgagttttaatttgattgtattgtggtttgagagatagtttgttgtgatttatgttattttatatttgttgaagagtgttttatttttaattatgtggtttattttagaataagtgtgatgtggtgttgagaagagtgtatattttgttgatttggggtggagagttttgtagatgtttattaggtttgtttggtgtagagttgagtttaagttttggatatttttgttaattttttgttttgttgatttgtttaatattgtatgttaagtaattttttaagtaatttgtgttgttaagtggtattaagtgtgtattattttaggtatatataatttaagataattttgtttttatataaaatgatgtttatattgcgaatttattttggaatttttttggagttgtttatatagtatacggtatatttgtaggtgtttagtaaatatttgttgttttgagggtttttttagaaagaatttacgtttagagaatttaaatgatggtattaaagaggtagtttagttaggagcggtggtttatatttgtaattttagtattttgggaggttaaggttggcggattatttgaggtttagagtttgagattagtttgattaatatggagaaattacgtttgttttaaaaatataatattagttgggcgtggtggtatatgtttgtaattttagttatttcggaggttgaggtaggagaatcgtttgaatttggaaggtaaaagttgtagtgagtcgagatttattattgttttttagtttaagtaagaagagcgaaattttatttt

SEQ ID NO: 1393 - DNA, 9707 bp, Artificial Sequence
  chemically treated genomic DNA (Homo sapiens)
atataaaaatataatggagttattataaaagaataaataaggtttttttgtagtaaatagcgtgattttaagatatattattaagtttaaagtttaaaaaggtaaggtttagggtcgggcgtggtgatttacgtttgtaattttagtagtttggaaggttgaggtgggtggattatgagtttaggagatcgagattaatttggttaatatgatgaaatattgtttttattaaaatataaaaaattagttgggtatggtggtgcgtatttgtagatttagttattaaggatgttgaggtgggggaattatttgaattggggaggtggaggttgtagtgagttgagatcgtattattgtattttagtttggtaatagagcgagattttattttaaaaaaaaaaaaaaaaaggtaagatttagaattatgtatagtatgttattatttgtgtaagaaaaggagggaaggaatatatgtatatatattattataaatatttgtttaaagatttttagaagaaattgataatattggttatttttggagaagagaattaggtgtttgatgaataggggaatgtgaaataatttttattaggttttatattttgatgtttgagttatatgagtgtttatttttttaaaaataaatgaaaaaagttatatttaaaaggaaaaaattatataatttggagtaaaaaaataaaaatatagtaaaaaaattaaaatataagggataatttttaaattagagaaagaaaatttgatttatatatttagcggaaagttaaaataggttttatggtgagaaaattttaaaagataattgattgtgggattggtttttttaagttaagtggtattatttggattgtgggattatgttgaaaagtttttaagaaatttttaaggtatgtataggtatatttataatgtaggtagattaaagatttagttatgatagatttagatgttagagagaagagtatttttttggaattttgggatggggaaggattttttaaataatattttatagtataaattataaaaatttttaaaaggatggatttgttattttaaaattatttgttttattgtttaattaaggaaggatattagttgataattaattgatagtgatatattgggaggtaatgtgtttagtgattgagaagggtatagagttaatatttggatatagagttaatagaaattattgtaataaatttataagataggaattttagtagaaaatgggtagaaaatatgatgataaattatttatagtatgggaaatttaagaggtataagtatataaagagatgtttaaatttatgagttatgagagaaatttaaattaaaaataataagatattagtttatgttgattagattggtaaaaattttgatttttggagaatattatatattaggtatatttattaataggaatttttttgtttgttggttggtgtgtagattggtttaagttattttaaagggtaatttggtagtattttgtgaaattaagagtgtatgttttttatgatttataatagtattatttttttattttagaaaatttttattttaggtttataagggaagaaagataaggaaatttattatagtattgtttggggtggtgaaaaattagtaatgatttagatgtttataattggaaaataaagaagttaagtgtggtaaatatatattgggatattttgaattatttagaaaagtaaagaattagatatatatttagtagtatggttggattttaagaatatagttgaaagaaaaaagaaattatgaaatttatagtatatttatagattgtagtaaatttatagtgttatattatatatttatgaaaaatatatatacgtataaatatttttatgtattttataagtttaaggttaaatattatattagagaagttgtttttggggaaaggtagtgagagtgaggaattatgataaaagagaatgaataaaaaaataagagaagggttatgtaggttttgtttttgtgttatgaatttatggattatgattaatttaattttttgtatatgaagataaataagaaagaattgataaatttgtaatggttgggtaatttttaatttttaaattagtaaaggttagttttaagtttgttaagtatataattttttattttgtgatatgttttttatttttgtgtagtgttaaaaaatattttagtggtttattgattgattgtggatgttttttttagatgtgttttttttttttttatttttttagtatttagtattgtttttattatagtagtatattgtattttaattaaattgaataaaaaggtggtttaaaaattatttgtaagtttatggtataagtaattttttatttttattttagtgtataaataaattttttttttttgttagaataattttttttaaagaagcgattagtttttttttttttagatagtaatgatgtgttttttttttaatttagatttagggtatttttatgtgagataggattaaaaattttatttttgtataattattatggagaatagtttggtagttttttaaaaaattaaaaatagagttattatatgatttagtgattttattgttgggtatatatttataagaaaggaaattagtatattaaagagatgtttgtttttttatgtttgttgtagtattgtttataatagttaagatttggaagtaatttaagtttttattaatatgggttttaaaaaaatgtggtattttaatatataatggagtattatttagtaataaaaaagaatgagattttgttatttgtaataatatggatagaattggaggttattatgttaaatgaaataagttaggtatagaaagttaaatattatatatttttatttatatgtggggtttaaaaattaaaataatttgatttatggagttagagagtagagagttaattattagaggtggggaagggtagtaggggtttggaggggaggtggagatggttaataggtataaaaaaatatagaaagaatgaataagatttagtatttgatagtataatagggcgaatatagttaaaataatttaattatatatttaaaaatatttgaaagagtataattggtttgtttgtaatataaaagataaatgtttgaggggatggatgttttatttttaatgatgtgattattatatattgtatgtttgtattaaaatattgtatatattttatgaatgtatatatttattatgtttttataaaaattaaatattagaaaaaagagttgtatttttagttgttatggggagaagaaagaaaagttattattttgttgttttaaaaattatgttgtttttattttaaataggaaagtaaaagtatttgagagttagtgtagtgttttggtgttgggtgaaatatagattgaatttgggttatttgtttaaattttttaggttttagttttttgtttattaaaagggagtgtatagtttatgggattgttaagaggaagaagtgaaattatgtacgtggagagcgtggtatagtgtttaagatagagtgtgtatgtaaataagtagataatattttttgtttttttttattgtatgtttgtaatatttttggagttgttatatttattgtttttaagtagtattaagggatgaaattatgtttgtaagaaaattttgaggttgaggaatataatatgttttatgtttattatattgaaaaatgtcggagttagataaagaatatagatttttttgaggatggaaattaagattttcgtttttaatatttaataatattgagtttttaatttattatgggaaatatttattaggtttttaaaggttttttttggatagaaattgtatttgttatatttgtatttttagtagatagtagatagtttggtatattataaaggtttaaggaattttaaatattttttaaaatttttattttaaagataaaaataaaataaaaaaaaaaaataaaaaaaaattgaggtatgggtttgattaaattagtggtagaattaagagttaaattatttgttttgaattttaaatttgagttttattttatttatttatttatttatttgtttatttatttttagatgtttggttaaagaatagtgggaggagagggatgggtttttagtaatttttattattggtttatttttttatagtttattatttttttttgggaaaatattaagtaggtatttaaggtttgaggtttttgagtttttatattttttttgaatttttgaatttgttttttagtatttttttatattttgttttattttttggttagtaatgttttatttttagttttttttaaaagtgtggttaatggtatttttttgattatttgaagattattggttaaattttattagtttatttatagattatttttttattttattttttttaaaagatttagttttatttaaatttatttatatgtttattttttgtttattagaatggtagtatagttggggaggtagagtttgttttgtttattgttgtatttttaaagattagaatattattaagtatacggtataggttttagtaattattgttaaatttatgtggatttgtttttaaataatattttttatttattgagtgtttatgtggaagaattgtattaaattttaatgtatttttttatttttatttttaaaattttttagtaaggtggttttattattttttttttcgagttttaggagtagttgtgcgaatagttggagaatattaggttggatttaaatttagatcgtttttatatttgttttttatttgttgtgtttagcgtttacgtgttttttagttgtagttttttgaagttagcgtatagtaaggtagtgtgtttagaggttaatagaagggaaaataataataataaaaatttaaatgagaattttgattgttttagttgggggtaaggggggcggattatttatataattgttatattagacggtcgtaggtttagtttaattgtagagaattcgttttttaggtttttgagagtttcggaagtgtttaaatttgtttaatcgacggggtttgggtggttcgtcgttttttggttttttttttttatttagggcgggtagcgaagtggtgttttttgcgttttttatatttttttttagtttttttttttcggttcgttttgggtaggtgatttggagtattcggtaggttgttttggttttttgcgttaggataacgtttacgaggggcgttattgtgcggagatgtattacgtaagagatattttttgtaattttttttttttttttagtgcgaggttaaaatttttagttttacgtgttgtttgtaaatttgtttgtatttgaggttttaaaaagttagagattttattttcggggagttagtatgtttattgcggttttggaaaatttaggtttgggtaggaaattttttgattttggataggtgagttacggtagtttgagttgtttagttaggggaatttgggtttttagagaaagagattcgaagattgttggtgttttttggttttataagtttagtaagaagtttgaattcgttggaagttgatgagaatatttaggaagttaatagataaatgtttttaataattgtttttaagtaggagaatatttgttttcggtggtttttataggaatgaatgattattgttttagggggttggggatttggtttttagaattgttattaattagttgtgtgtttttggataagttattgtttttttttgttgtttgtttatttttttgtatattgaaggggttggtttttaatgatttgggatgggatgtggaatttttttagattttttttgtaatatttataaagtgtttttagtaaggtattaaaatggtaaaattgtgagtaattattttttttttattttgggaagaagatgaggtatgaagagaatttagatagaaatttatttagattaggggaggtagaaattaagtagagaggaaaatgattaagagttagttttgggtatggaatgtgaaagaattttaaacgtgatttggaaataatgtttaaggtatattttatttttcgggatttgttggtatttttttgaggtgaagaattgtagaatatattttttaatgtgatttatatatttatttatgggaggaagtttgtttttggatttttgagatttagttataaagtttaggttagggaaataatgtaagtttgtaggtttttgttattagtaggattagggagaagagtttttagtagaaaatagggaggttggagagaaaagaatggttaatgttaacgttaatataattagaaagattgtagaatttaggattgatttttatttgaatttttaaaaaaaaaaattttttatgaaaatagtatatggtttttaggagatagaatttattgtatagaggaatagcgtgagagttagagtgattttagaataggttttggttttattttgtatatagttttggtgttgttggtaatacggtttttataattgtgggaaggggttaggggtagggattttattaggaaagtataggggtttaaagttttttatagagtatttagaagattgagaatttataaattatattaataataaataaagtagtgtcgtgttatatagtaaatgtgaatttgtagatatatttagggaaaagttataattaaaaaaataggttgtatatatattaatggttttaaaattttttatggttaagaattatttgggatggttttgaaatggtagattttaagataatttgatttaataggtttaggtaaagtttagggaattgtattataagaaggaattatttgtaattttggagttaagatttaaggaatatttattgagaaatattgatttataaagtgtatggagagaaatggagtaagtgaagggggattagtatggtgaaatataggttgttaggagtgttattgattaattgtttggtgattggattagagtaaattttttattttgtaagaaataggattaaatttttatattatgtttatagtaaagggaattatgtagaaaaattgataattaggagtttgagtttttgattagtttttattatttatgtggttttaggtgagttattttttttttttggttttaagttttttttatttgtaatgtaagggagtttaattagatgagtattaaggataaattaatttttgtgagttaattattatgaaatattatgtgggtattaaatgttaagtggaaagtatagataaagaagtgattgtgtatttgggttgaggggaataaatattttttaagagaattgagatttaaaagagtttttaaggaaggtgagattttggaaagggaaatttggtgaatattttaatgaggagttaaaaaggtaagaaagaaagtagtttggttggaaaggaggtttttgtaggtgggtttttagagattcggtattatagaaattgttaaatattagtaagaagttatggggatggagcgtttgagggattttaaatagaaggataagagtaaaaatgttaggttggatcgatgtaggttattaagaaatggatttaggtgatggtagtgggaagaaaggatttgatgtttagaggtatttttggagaagatgagattagatttgtgattggttgaatatatattgtagtggggtggggtttagggggtgatttaattttaagtttaggtatatttaagtttgaattgttttagttaaaagtggtatttgtggatgtgtattagaaatattttattttttttggaagttaataggagaaaagagtgttattaagtgaattagagataggaatattttttgataaaattaaggaaattggaaagaagaaggtttagtattttttagtaggaagaagatttaagttagagatttatttgtatttttttggtagggtttaaaagggggaagaggaatagaggttgtaagagattgtgatttatggatagtatgtagagattaaatgatttgggtttagattttggttttattgttaattgtgtaattataggtaagttttttaatttttttaagttttaattttgttattaataaaagggggtatttggtgtttaataaaatttattttttaggttgttgttaaattatatgagataatttaaattaagtgtttattataatatttagaaattataggttttaaataaatgtttatataggttttaaataaatgaagttttttagaaagataatattatgattaaaatgggatatttaatagtttagttttttattttatttgaagttttttaaaattatttttgttgataaatttgtttttttttttatattttagttttatgggatgttttggtaaaaatttgaattttttgaattgaaagaattttttgttaagggttattagtatttatgtagggtttgttattttgagttattaagagttttttaatatagtttttttttattgagatgatgtaatatttattttattaattttattaatttgtttataagagagtaattgttttgtaaatttttttttttttagttttaggtatttgttgtttattgtggatatatatagaattttatgtattatttttcgatttaggttaatgatttagtaaattttggaatgttagttttaattttaattttggttttttgttatatgtatgtagtaagtgttagattttggatattttttgagatttagtttaagattaagtttattttttgataggttatttgtgtatttttatggattttgtaatttttttttaataattggatgttttagattttagtatatgggagtaagttaatgttttttgagatttttgttaaaggttaagaggttatttttgtgtatttataattttttattatttttatatattttttaatattttttttaaattattttttttttttttttattttttgaatattgttttgatagattttgttattagtatgtttttacggatgagaaaattaagaaagttgaatgatttgtttaaagtagtttatttggaaaatgaaagagagaggattttaatttaggttttacgatttaaaagtttgtgtatgttttatttttagtattttttatattgtattttttaatgtttttttgggatattttataaattatattatattatttttaaggattttttagtttgttatatatgtgtttattaagttagattgtgagtttttaaaagataaagtattgttttatttatttttaaattttttagagtttaaatagtgtttggaatttagtagttgtttaataaaaggtattgaatttataggattgaatggtgatattaatgaataattgaagattttttaagttgataattgatttagtagtattattgattatttaattgttttggatttatttattttttattatattatatatttttgtatagaatatatatagtttattgtattgtaagatttaattagaagaaagagtttatgtttgttttgtttatggaggtttaataggaatgaattgttaaattgtggaaaatgttttaaataaatgtattttattttgtagg

SEQ ID NO: 1394 - DNA, 9707 bp, Artificial Sequence
  chemically treated genomic DNA (Homo sapiens)
tttataggataagatgtatttgtttaaaatattttttatagtttagtaatttatttttgttaaatttttatggataaagtaagtatgaatttttttttttagttaaattttgtaatataatgagttatatatattttatatagaaatatgtagtgtggtggaaaataagtaagtttagggtaattaaatgattaatgatgttattgggttagttattagtttaaggaatttttaattatttattgatgttattatttaattttgtaaatttaatattttttattgagtaattattaggttttaggtattatttgggttttgagaaatttaaagatgaataagataatgttttattttttaggagtttataatttaatttaatagatatatatataataaattgaaagatttttagaggtgatataatatgatttataaaatgttttagaaagatattgagaaatatagtgtggaaagtattaaaaatggaatatgtataggtttttgaatcgtaagatttggattggaatttttttttttttattttttaggtggattattttgggtaaattatttagtttttttagtttttttattcgtgaaagtatgttaataataagatttgttaaaatagtatttagaggatgaaaaaaggaaaagaatagtttaaaaagaatattgagaagtatataaaaatgatggaaaattataaatatataaaaatgattttttgatttttggtaaagattttaggaagtattaatttgtttttatatgttgagatttgagatatttaattgttgaaaaagagttataaaatttatgaaagtatataaataatttattagaaaataaatttagttttaaattaaattttaaagaatgtttaggatttagtatttattatatgtatgtgatagaaaattaaggttggggttagggttgatattttagagtttgttaaattattagtttaagtcgaaaaataatatataaaattttatgtgtgtttataataagtagtaggtatttaaaattgggaagaaaaaaatttgtagaataattatttttttgtaagtaagttaatgaaattaatggaatagatgttatattattttaatgagagaaggttgtgttaggaaatttttagtgatttagaataataagttttgtatgaatattgatgatttttagtaaaaaatttttttaatttagaaaatttagatttttgttaaaatattttatgaaattgaggtgtgaaggaaaaaataaatttattagtaagagtgattttagggagttttaaatgaaatggaagattaaattgttaaatattttattttgattatgatgttatttttttaaaaaattttatttatttagagtttatataaatatttatttagagtttataatttttgggtattataataagtatttgatttggattattttatgtaatttggtaataatttaagaggtaggttttattaggtattaagtgtttttttttattgatgataagattaaggtttagagaggttaaggaatttgtttatagttatatagttagtagtggagttaggatttgaatttaggttatttgatttttgtatattgtttatgaattataattttttgtagtttttatttttttttttttttttaaattttgttagagaggtatagatgagtttttgatttaagttttttttttattaaagaatattgagtttttttttttttagtttttttgattttattaaaagatatttttgtttttagtttatttggtagtattttttttttttgttggtttttaagaaaagtaagatatttttgatatatatttatagatgttatttttgattagggtaatttagatttgaatgtatttgggtttgaagttgagttattttttaaattttattttattatagtgtgtgtttagttaattataagtttgattttattttttttagaaatgtttttgggtattaggttttttttttttattgttattatttgaatttattttttagtggtttgtatcgatttagtttgatatttttatttttgtttttttatttagaattttttaaacgttttatttttatggttttttgttgatgtttggtagtttttgtggtatcgaatttttggaggtttatttataggaattttttttttagttaagttgtttttttttttgtttttttagttttttattagagtatttattaaatttttttttttaagattttattttttttaaaggtttttttgggttttaatttttttaggaaatgtttgttttttttagtttaggtgtataattatttttttatttatgttttttatttggtatttgatgtttatatggtattttataataattgatttatagaaattgatttgtttttagtgtttatttagttaaatttttttatattatagatggggaaaatttagagttaaagggagaaaataatttatttgaggttatataggtagtggaggttggttaagaatttaggtttttaattattaatttttttatataattttttttgttatggatataatatgggaatttagttttgttttttgtaaagtaaaagatttattttggtttagttattagatagttagttaatagtatttttaatagtttatattttattatgttgatttttttttatttgttttatttttttttatgtattttgtaaattagtgttttttaatgagtgttttttggattttgattttaaaattataggtgatttttttttataatgtagttttttgggttttatttaaatttgttgaattaagttgttttagaatttgttattttaaaattattttaggtgatttttaattatagaaaattttggaattattgatatatatatagtttatttttttaattataatttttttttaaatgtgtttgtaaatttatatttattatataatacgatattattttgtttgttattaatataatttgtggatttttaattttttaagtgttttataaagaattttaaatttttatgtttttttgatgagatttttgtttttaatttttttttatagttgtggggatcgtattgttagtagtattaaaattatgtgtaggatggagttaggatttgttttgggattattttgatttttacgttgtttttttgtataataagttttgttttttaagagttatgtattatttttataagaaatttttttttttaaggatttaaataaaaattagttttaagttttgtagtttttttagttatattaacgttaatattaattatttttttttttttagtttttttgttttttattgagaatttttttttttaattttattgatgataggggtttgtagatttatattatttttttggtttgggttttatgattgaattttaagagtttaggagtagatttttttttatgggtaaatatgtaggttatattaaagaatgtattttgtaattttttattttaagaaaatgttaataaatttcggagaatggaatatattttgggtattatttttaagttacgtttagggtttttttatattttatgtttagggttaatttttggttatttttttttttgtttagtttttgttttttttggtttgagtaagtttttgtttgaattttttttatgttttattttttttttaaaatgaaaggaggatagttatttataattttgttattttgatattttgttgagagtattttataaatattataaaagaaatttagaaggattttatattttattttagattattagggattagtttttttagtgtatagaagagtaaatagataatagagagggatagtaatttgtttaaagatatatagttaattggtggtagttttggaggttagatttttaattttttaaagtaatggttatttatttttgtgaaagttatcgaggatagatgtttttttatttagaaataattgttgaggatatttgtttgttgattttttggatatttttattagtttttaacgaatttagattttttattgagtttatgaaattaggaagtattagtagttttcggatttttttttttggaggtttaaatttttttaattgagtagtttaggttgtcgtggtttatttgtttaaagttagagagttttttgtttaagtttgggttttttaggatcgtagtggatatgttggtttttcgggagtgaggtttttggttttttagggttttaggtataggtaggtttgtaaatagtacgtggggttgaaggttttaatttcgtattagggaggagaagagagttataaagggtgttttttgcgtggtgtattttcgtatagtaacgtttttcgtgggcgttgttttgacgtaggaggttagggtagtttgtcggatgttttaggttatttgtttaggacgggtcggaggggaggggttgagggagggtgtgggggacgtaggaggtattatttcgttgttcgttttgggtaaagggaagaagttagggagcgacgggttatttaagtttcgtcgattagataggtttaggtattttcgggatttttagaagtttgggaagcgagttttttgtaattggattaagtttgcgatcgtttggtataataattatatgaataattcgttttttttatttttagttgaaatagttaggatttttatttagatttttgttgttgttgtttttttttttgttaatttttaagtatattgttttgttgtgcgttgattttagaaaattatagttagagggtacgtgaacgttgagtatagtaggtaaagagtaaatgtaagagcgatttgggtttaaatttagtttggtgttttttagttattcgtataattgtttttgaagttcggaaaagagggtggtagagttattttgttggaaggttttaagaataggaataaagaaatgtattaaaatttagtatagtttttttatataaatatttagtaaatggaagatattgtttaaaagtaaatttatataaatttgataataattattgagatttgtatcgtgtgtttggtggtgttttagtttttgggaatatagtaatgaataaaatagattttgtttttttagttatgttgttattttggtgggtagaaaataaatatataaataagtttaggtagggttaagttttttgaagaaagtaaagtagggggatggtttatgagtgagttggtgggatttggttagtggtttttaaatagttaggaagatgttattaattatatttttagagaagattgagggtgaggtattattgattaggaggtaaaataaagtataaaagaatgttggaaagtaggtttagaggtttagaaaggatgtgaaaatttaggggttttaagttttgagtgtttgtttaatatttttttaagagaaagtaatgggttgtaagaaaataagttaataataaaggttgttggaagtttatttttttttttttattgttttttgattaagtatttgaaaataaataaataaataaataaataaataagtaaaataaaatttaggtttaggatttaaaataagtggtttaatttttggttttattattgatttggttaagtttatgttttagtttttttttgttttttttttttgttttgtttttgtttttaaaatgagaattttaagggatatttaggattttttaagtttttatgatgtgttaggttgtttattgtttgttaagaatatagatataataagtgtaatttttgtttaaaaggaatttttaggggtttgatgaatattttttatagtaagttggaagtttaatgttgttaaatattgaaggcgaagattttgatttttatttttaggagaatttgtattttttatttgatttcggtattttttagtgtagtagatataaaatatgttgtattttttagttttaggatttttttataaatataattttattttttgatgttatttgagggtaatgaatgtgataattttaaaaatattataggtatgtaataaagaaaagtaaagaatattatttatttatttgtatgtatattttgttttagatattgtgttacgttttttacgtgtatggttttattttttttttttaataattttatgaattatgtatttttttttaataggtaagaaattgaggtttaggaagtttaaataaatggtttaaatttaatttatgttttatttaatattaaggtattgtattggtttttaaatatttttgtttttttgtttgaaatgaggataatataatttttaggataataaaatgatagttttttttttttttttttataatagttgaaaatgtaatttttttttttaatgtttaatttttgtgggaatatagtagatgtatgtatttatggagtatgtgtaatattttgatataggtatgtaatgtgtaataattatattattgaaaatggggtatttatttttttaagtatttattttttgtgttgtaaataagttaattatatttttttaggtatttttaaatgtataattaaattattttgattatattcgttttgttgtattattaaatattaggttttatttattttttttatatttttttgtatttattaattatttttattttttttttaggtttttattatttttttttatttttggtaattagttttttattttttagttttatgaattagattgttttgatttttagattttatatatgagtgagaatatgtgatgtttggttttttgtgtttggtttattttatttgatataatgatttttagttttgtttatgttattgtaaataataggattttatttttttttattgttgaatagtattttattgtgtattaaagtattatatttttttaaaatttatgttgatggagatttgggttgtttttagattttggttattgtgaatagtgttgtaataaatataaaagaatagatatttttttgatatattgatttttttttttataggtatatatttagtagtgggattattagattatatagtagttttatttttagttttttggggaattgttaaattgttttttatagtggttgtataaaaatggaatttttaattttattttatataaaaatgttttaaatttaggttgagaggaaagtatattattgttatttgagagaagaaaaattaatcgtttttttaaaaaaaattattttggtaaaaaggaaaaatttatttatgtattaagataaaaataagagattgtttgtgttataaatttgtagatgatttttaagttatttttttgtttaatttggttggaatgtaatgtgttgttataatgagagtagtgttgggtgttaaggaaatggaggaaaaaaaggtatatttagaagaagtatttatagttagttagtagattattgaggtattttttaatattgtatagaggtggggaatatgttataagatgagaagttgtgtatttggtaaatttagagttgatttttgttgatttggaagttgaagattatttaattattgtaggtttattagtttttttttgtttatttttatgtgtagaaggttgagttaattataatttatgagtttatggtatagaaataaaatttatatgattttttttttgtttttttatttatttttttttattataattttttatttttattgtttttttttagaggtaatttttttaatatgatgtttagttttgaatttgtaaaatatatagaaatgtttgtgcgtatatgtattttttatggatatgtgatgtggtattatagatttattataatttatggatgtattatagattttatagtttttttttttttttaattgtgtttttaggatttagttatgttgttgaatatgtatttagttttttgtttttttaaatggtttagaatattttagtgtgtatttgttatatttgatttttttattttttagttatggatatttaagttattgttaattttttattattttaaataatattgtgataaatttttttatttttttttttttataggtttggggtagaaattttttgggatagaagagtggtgttattatgaattatagggaatatgtatttttaattttataaagtgttgttagattgttttttagagtggtttggattagtttatatattaattagtaggtaaaagagtttttattggtgggtatatttaatatgtggtattttttaaaggttagaatttttgttaatttgattagtataagttggtgttttgttgtttttaatttgaattttttttataatttatgagtttgagtatttttttatatatttatattttttagattttttatgttatgaatagtttattattatattttttatttattttttattaggatttttgttttgtagatttgttgtaataatttttgttagttttgtgtttaaatattagttttgtgttttttttagttattgaatatattgttttttaatgtgttattgttagttaattgttaattggtgtttttttttgattaaataataaaataagtaattttgaaataataagtttatttttttaaaaatttttgtggtttgtattatagagtattgtttaagaagtttttttttattttaaagttttaaagaggtgtttttttttttagtatttagatttattatagttagatttttaatttatttgtattgtagatatatttgtatatgttttggggattttttagaggttttttaatatggttttatagtttaggtaatattatttaatttaaagaggttaattttataattaattgttttttgggatttttttattatagagtttattttaatttttcgttagatatatagattaaattttttttttttgatttgaaagttattttttatattttaatttttttgttgtatttttatttttttgttttaagttatataattttttttttttagatataattttttttatttatttttgaggaggtgagtatttatatggtttaaatattaaaatataaaatttagtgaaaattattttatatttttttgtttattaggtatttgatttttttttttaaagataattaatgttgttagttttttttagagatttttaagtaaatatttatgatagtgtatatgtatatatttttttttttttttttttatataaatagtagtatattatatatgattttaaattttgtttttttttttttttttttgagatgaagtttcgttttgttgttaggttggaatatagtggtacgattttagtttattgtaatttttatttttttagtttaagtgatttttttattttagtatttttagtagttgggtttataggtgcgtattattatgtttagttaattttttgtattttagtagagatagtgttttattatgttggttaggttagtttcgattttttgaatttatgatttatttattttagttttttaaattgttgggattataggcgtgagttattacgttcggttttaaattttgtttttttaaattttaaatttaatgatatattttgaggttacgttgtttattataggaagattttatttatttttttgtaatggttttattgtatttttatgt

SEQ ID NO: 1395 - DNA, 5559 bp, Artificial Sequence
  chemically treated genomic DNA (Homo sapiens)
gggttaatgtttttgtttagttagggaatgagaggaggtggtattatgtttgttgttggagtgtaatggcgcgattttggtttattgtaatttttatttttcgggtttaagcgatttttttgttttagttttttgagtaattgggattattggtacgtattattacgtttagttaatttttgtatttttagtagagatagggttttattaaattggttaagttggttttgaatttttaattttaggcgattcgtttgtttcggttttttaaattgttgggattataggtatgagttatcgtatttagtttgtttatgtggtttttaatttgttttttgattttgattttttgttggaggtagtgaaggtaggagagagtggaggttatatttaggagtttttagggatttgaggggttggaggataatgaaatttaggatacgttattgatttgcgtttgtttgttaatttttttttatttaaaaaagttatttaaagggttaggtgtagtggtttatatttgtaattttagtattttgggaggttgaggtaggcggttcgtttgaggttagaagttcgaggtggtgaaattttatttttattaaaaatataaaaattagtcgggtgtggtggtatgtatttgtaattttagttattcgggaggttgaggtaggagaattatttgtattttggaggtggaggttgtagtgagtagagattgtgttattgtattttagtttgagtaatagagtgagattttgtttttaaaaaaaaaaaaaaaaaaaaaaaaagttatttgaattgtggttaagtttattttaatgatttttaagtgtttagtttagtggtagtaagtatatttatattgttattatttatttttagaattttttttttttggagatagagtttcgttttgttattaaggttagagggtagtggtatagtttttgtttattgtaatttttgttttttaggcgtaagtgatttttttattttagtttttcgagtagtagggattataggtgtatattattatattcggttaatttttgtatttttttgtagagatggttgggggggtgttttattttgtggtttaggttggtttcgaatttttgattttaagtgatttatttgttttggttttttaaagtgtagggattataggcgtgaattattttatttagtttagaatttttttattttgtaaaattgaaatattgtggttttaagtatttattttttaattttttttttttagtttttggtattttttaatttattttattttttgtttttatggaggtgattattttagggattttttatgagtggaatgatttaggatttgttttttcgtgatcggtttattttttttagtataatgtttttaagatttatttataatgtagtatatgttagaatttttttattttttaaggttgtttttttttttttttttttttttttttttggtagagttttattttgttattcgggtgggagtgtagtggtgtaattatagtttattgtagtttcgattttttgggtttaagtaatttttttattttattttttgattttttgtagagataagattttattatgttgtttaggttggttttgaatttttgagtttaagcgatttttttatttcggttttttaaagtattgggattataggtatgagttattattttgaaatagttcggtttggttgtttgttttttttaagaaaataagattttggtcgggcgtggtggtttacgtttgtaattttagtatttcgggaggttgaggcgggtggattatttgaggttaggagtttgagatttgtttggttaatatgatgaaatttcgtttttattaaaaatataaaaattagttaggtatggtggcgggtgtttataattttagttgttcgggaggttgaagtaggagaatcgtttgaatttaggaagtagaggttgtagtgagtcgaaatggtattattgtatttttagtttgggtaataagagcgaatttttatttttaaataaaaaatattttggttaggtgtagtggtttatgtttataattttagtgttttgggaggttgaggtaggtgggttatttgaggttaggagtttgagattagtttggttaatacgacgaaatttcgtttttattaaaaatatataaaattagtcgggtatagtggtaggcgtttgtaatttttgttgttggggaggttgaggtaggagaattgtttgaatttaggaagtagaggttgtagtgagttgagattgcgttattgtattttagtttgggcgattgatcgagattttattttaaaaaaaaaaaaagtttttatggaaagtaatatagtgtatagaaaattttaatagtataaaatagatatatggtttttttttttttaaagttgtcgcgtttagcgtttttcgggaagtatttgggtagtgtcgtttgggtatagtttgtgtttgataggggtaatgttatcgttatttttgtttgttggggttttttcgatagtttgtgttgtcgtgttgttttcggggaggggttgttggcgggtatttttttgttttgtgttgttgtgtggatatttttttaaggatatttttttgtgcgtgtgtttggtagaaatttttagatatggaatttttgagtataagggtatgtgcgttattatgttttttttttttttttgagacgcgttttatttttgttgtttaggttggagtgaggttggagtgtaatgatgtaatttcggtttattgtaatttttgttttttatgtttaagtgatttttttgtttcgtttttcgagtagttgggattataggtatatgttattatgtttagttaattttgtatttttattagagatggggtttttttatgttagttaggttggtttcgaatttttaattttaggtgatttattcgtttttgttttttaaagtgttgggattataggtgtgagttattgtgtttggtttttttttttttttttttttttttttgagtcggagtttcgtttcgttgtttaggttggagtgtagtggtgtgattttagtttattgtaatttttgcgttttgggtttaagagatttttttgttttagttttttgaggagttaggattatagacgtgcgttattatgtttggttaatttttgtatttttagtagagacgggtttttattatgttggttaggacggtttcgattttttgatttcgtgatttatttatttggttttttaaagtgttgggattataggcgtgagttattgcgttcggtcgtgtattattattttgatgtattatttttaaattattttgttttagtattattggattgtcggtgtgtttagttttttttgtatagttttttattttgtttatagagaagacggtggaggggggagtttaggcgtgggtttttcgtgtgttgagggtgtttttagttatttttttttttaagttattgacgtgaagttgatttttttattggtggttatggaaattgtttagaaatgggagtagggtttttgagattttgttttagttagattttttttttaggttttagtgtttttttttggagttgggtgttgattttgtttaagattttgtttagttattttttggttgattttcgagtgtttaagtgtgtgatgagattagggtttttttaggtaggaaacggttatattggattttttttttttttatttttagtttattttattttttttaatttttatggtttttaattaggtttttttgtttttagatttttttaagttttgttttttattttttgtagtttagcgttgagtatattggggttagaattatttatattagatttttttagggtacgacgggttgaggtttttttgaggtagggagggataatattgaggggttttgtgtagaagagggaaggggtattttttcgagttttagtttttttatttgttcgatgagtttttatttaatggtatttaggagtggggatgtgttggggttagaggagggaggttttttggaggttggtttggggattttttaatttggttattttatttagggttagaggttagagtaggcgagttatatatttcgaagttttttcggttttcggtaggtgttgtttttagtattattgttttttttatagatgttcgtgtgttttttgggtaagagtgaagtgaggtatttatataggggtgttttgtgagtatggggttagtcgaggatgttgaggggttttcgaggtttagttagagtttttgacgttgggttcgtgttgttttgggggtttgaagggattttcgttattattttttgggaggcgtttatttttggtttttttttttttttttgtcgagtttcgttttgttgtttaggttggagtgtagtggtaagatttcggtttattgtaatttttattttttgggtttaagtaatttttttattttagttttttgagtagttgggattataggtatttgttattaagtttagttaatttttgtatttttatgagagatggggtttttttatgttggttaggtcggttttaaatttttaattttaggtgatttgtttgttttggttttttaaaatgttgggattatagtcgtgagttatcgtgtttggtttagtagggttttttttattttgtttattagagataggaagtcggggggtgattttaggaaaggtttagagttcgtgatgggcgtggggattggggtgaggatagggttgtcgtgagaatagtggttgtagatgtgagcggttggtaggaagtggttatttgaatcgtagatgttttttgggttggttagggatcgggggtgttggttgtagttgggatttttttttttgtattttgttggtttggtatttgggtttttgggaggcgttatattggatatagttacgtggggtagttcggtttttataatttatattttagtttttttacgggttggttggtaagcggttttggtgggtttgcgggggtaggggtagtttttttggtttatttttatcggcgcgatttgttcgttcgtttcggttttagaagttggggtttagggttcggcgaggtaggaagtttgaggttatagtttagagtagtttgagtgtagttatgtgggggcgattgtttttgtggtttttggtgttggggtttagtttgtttggcggtatttagatttttagcgtttacgacgagagcgggagtatcggaggtggtgatggtgagtggttttggttttggggtgtagagatggggttatattagagatggagttgggggttcggagttggggagggggaggtcgggaagttgcgggttttagtttagtttattttgtatttcgtttttgattttatagggttgggttatttttttgagtgttatgtttagttgttttttattagggtagattttaggttttgagtatttttttttttgttgtttttcgttatttgtcgaggtaggggttgattgaggtttttttttttttttaga

SEQ ID NO: 1396 - DNA, 5559 bp, Artificial Sequence
  chemically treated genomic DNA (Homo sapiens)
tttgggagagagaggggattttagttagtttttgtttcggtaggtgacgagaagtagtagggagggaggtgtttagagtttggggtttgttttggtgggaaatagttggatatgatatttaagggaatagtttagttttatggggttagagacgggatatagagtgggttgggttgaagttcgtaatttttcggtttttttttttttagtttcgggtttttagttttatttttgatgtaattttatttttgtattttaaagttaggattatttattattattattttcggtgttttcgttttcgtcgtagacgttgggggtttgggtgtcgttagataggttgaattttagtattaggggttataggagtagtcgtttttatatgattgtatttaggttgttttgggttgtggttttaggttttttgtttcgtcggattttgagttttagtttttggagtcgaggcggacgagtagatcgcgtcggtagagataaattaggaaggttgtttttgttttcgtagatttattagggtcgtttgttagttagttcgtgggaggattggagtgtgggttatggagatcgggttgttttacgtggttatatttagtgtggcgttttttagggatttaggtgttaggttagtaagatgtaggggggggggttttagttgtagttagtattttcggtttttgattagtttaggaagtatttgcggtttaagtggttattttttgttagtcgtttatatttgtagttattgtttttacgatagttttgtttttattttaatttttacgtttattacgggttttgggttttttttgaagttatttttcgattttttatttttggtgagtaggataagaagagttttgttaggttaggtacggtggtttacggttgtaattttaatattttgggaggttaaggtaggtaaattatttgaggttgggagtttgagatcggtttgattaatatggagaaattttattttttataaaaatataaaaattagttgggtttggtggtagatgtttgtggttttagttatttaggaggttgaggtgggagaattgtttgaatttaggaggtggaggttgtagtgagtcgagattttgttattgtattttagtttgggtaatagagcgagattcggtaaaaaaaaaaaaaaaaattaaggatgggcgttttttagagggtaatagcgagggtttttttagatttttagagtagtacgagtttagcgttagggattttggttgaatttcgagagttttttagtattttcggttgattttatatttataaggtatttttgtatgagtgttttattttatttttgtttaggggatatacgggtatttgtaggggagatagtgatgttggggatagtatttgtcgaggatcggggggatttcggggtgtgtggttcgtttgttttgatttttgattttgagtgaggtggttaggttgaagggtttttaagttagtttttagggggttttttttttttagttttagtatatttttatttttgggtattattggatgggggtttatcgggtagatgaagaaattgaagttcgggggggtatttttttttttttttgtataaggttttttagtgttgtttttttttgttttagagaggttttaattcgtcgtgttttgggggagtttggtatgggtggttttggttttagtgtgtttagcgttgggttataggggatgggggatagggtttgggggggtttgggagtaggagggtttagttgggagttatgaggattggggaaaataaaatgaattagggatgggggagggaggggtttaatgtggtcgttttttgtttgggggagttttaattttattatatatttgagtattcggggattagttaggaagtgattgagtagagttttggatagagttaatatttagttttaggaggagatattgaagtttggagagagagtttagttggggtagggttttagaggttttgtttttatttttgggtagtttttatggttattaatgagaaaattagttttacgttaatgatttggggaaaaaggtggttgaggatatttttagtatacggaaaatttacgtttgggtttttttttttatcgttttttttgtgagtagagtgggaagttgtgtaggggaggttgggtatatcggtagtttagtgatgttggggtagggtggtttgaagatgatgtattaaaatagtgatgtacgatcgggcgtaatggtttacgtttgtaattttagtattttgggaggttaggtgggtggattacgaggttaagagatcgagatcgttttggttaatatggtgaaaattcgtttttattaaaaatataaaaattagttagatatggtggcgtacgtttgtagttttagttttttaggaggttgaggtaggaaaattttttgaatttaggacgtaggggttatagtgagttgagattatattattgtattttagtttgggtaacggagcgagatttcgatttaaaaaaaaaaaaaaaaaaaaaaaaaagttaggtatagtggtttatatttgtaattttagtattttgggaggtagaggcgggtggattatttgaggttgggagttcgagattagtttgattaatatggagaaattttatttttagtaaaaatataaaattagttaggtatggtgatatatgtttgtaattttagttgttcgggaggcgaggtaggagaattatttgaatatgggaggtaaaggttgtagtgagtcgagattgtattattgtattttagttttattttagtttgggtaataagagtgaaacgcgttttaaaaaaaaaaaaaaaatatagtgacgtatatgtttttatatttaagggttttatgtttaggaatttttgttagatatacgtataggaagatgtttttgggaggatatttatatagtagtataaagtagggaggtgttcgttaatagttttttttcgggaataatacggtagtataggttgtcgggggaattttagtaagtagaggtgacgatgatattgtttttgttaggtataagttgtatttaggcgatattgtttaggtatttttcggaggacgttgggcgcgatagttttggaggagaggaaattatgtgtttgttttgtattgttggagttttttgtgtattgtgttattttttataaaaattttttttttttttaagatggagtttcgattagtcgtttaggttggagtgtaatggcgtaattttagtttattgtaatttttgttttttggatttaagtaatttttttgttttagtttttttagtagtagggattataggcgtttgttattatgttcggttaattttgtgtatttttagtagaggcggagtttcgtcgtgttggttaggttggttttaaatttttgattttaggtgatttatttgttttagttttttaaagtattaggattataggtatgagttattgtatttggttaaaatattttttatttagagatggaggttcgtttttgttgtttaggttgaaggtgtaatggtgttatttcggtttattgtaatttttgttttttggatttaagcgatttttttgttttagtttttcgagtagttgggattataggtattcgttattatgtttggttaatttttgtatttttggtagaaacgaggttttattatgttggttaggtaggttttaaatttttgattttaggtgatttattcgttttagtttttcgaagtgttgggattataggcgtgagttattacgttcggttaaaattttatttttttaaaaagggtagatagttaggtcgggttgttttagagtggtggtttatgtttgtaattttagtgttttgggaggtcgaggtagagggatcgtttgggtttaggagtttaagattagtttgggtaatatagtgaaattttgtttttataaaaaattaaaaaatgaggtgggaagattgtttgagtttaggaggtcgaggttgtagtgagttgtgattgtattattgtatttttattcgggtgatagagtgaaattttgttaaaaaaaaaaaaaaaaaaaaaaaaaaaggtagttttaaaaagtaagggaattttgatatatgttatattgtggatgaattttgaggatattatgttgagggaaataagtcggttacggaaagataaattttgagttattttatttatgggaggtttttggagtggttatttttatagagataggaagtagaatgggttggggggtgttagaggttgggggagggggattggggagtgagtgtttaaggttatagtgttttagttttgtaagatggaagagttttgggttgggtgaggtggtttacgtttgtaatttttgtattttgggaggttaaggtaggtggattatttgaggttaggggttcgaggttagtttgggttataaagtgagatatttttttaattatttttataaaaaaatataaaaattagtcgagtgtggtagtatatatttgtggtttttgttattcgagaggttgaggtgggaggattatttgcgtttgggaggtagaggttgtagtgagtagagattgtgttattgttttttagttttggtgatagagcgagattttgtttttaaaaaaaaaaagttttggagatggatggtgataatatgaatgtatttattgttattgagttgaatatttaaaaattattaagataaatttgattataatttaaataattttttttttttttttttttttttttggagatagagttttattttgttgtttaggttggagtgtagtgatatagtttttgtttattgtaatttttatttttagggtgtaagtgatttttttgttttagtttttcgagtagttaggattataggtgtatgttattatattcggttaatttttgtatttttagtagaggtggagttttattatttcgaatttttggttttaggcgagtcgtttgttttagttttttaaagtgttgggattataggtgtaagttattgtatttggttttttaaataatttttttaaatggggaaaaattggtagataggcgtaagttagtggcgtgttttggattttattgttttttaattttttaggtttttggaagtttttggatgtggtttttatttttttttgtttttattgtttttagtaaaaggttagggttagggaataagttagaagttatatgggtaggttgggtgcggtggtttatgtttgtaattttagtagtttgggaggtcgaggtaggcggatcgtttgaggttgggagtttaagattagtttgattaatttgatgaaattttgtttttattaaaaatataaaaattagttgggcgtggtggtgcgtgttagtaattttagttatttaggaggttgagataggagaatcgtttgaattcgggaggtggagattgtagtgagttaagatcgcgttattatattttagtagtaaatatggtgttatttttttttattttttggttgggtagggatattaattt

SEQ ID NO: 1397 - DNA, 5572 bp, Artificial Sequence
  chemically treated genomic DNA (Homo sapiens)
agaaagtagaaggaaagttttataaaagaaagagaataggttaggtacggtcgttacgtttttaattttagtattttgggaggttgaggtaggtggattatgaggttaggagtttaagattaatttgattaatatggtgaagtttcgtttttattaaaaatataaaaattaattaggcgtgtgtgtttgtaattttagttatttaggaggttgaggtaggagaatcgtttgaattcgaaaggtgaaggttgttgtgagtttagattaggttattgtattttgatttgggcgatagagcgagattttatgttaaagaaaaagaaagaggataagaaaattttttaattggaaggtagatagttgattaaaagggtttattgattgtataatataataatgataaaagattaaattagagtatatttttaagatattttagaggatttaagtaagaagatttaaaaattttgagatagaaaatataatgtaattagaatgttattggttttttaaatagtaattttggaaattagatgataataaagtaatgtttttaaaattatgaaggaaaatgttttttaatttagagttttatgttttattaaattattaattaagtatgaagataaatttaaaatattttttaatatgtaaggtttttaagaatgagttatattatttttagaatatattgaggatatattttgttaaaatgaaggggagaaataaaaagagaaaagtatgtaatttaggaaataagaagtttatagagaaaatgatttttaaggtgttagaggagtataattttaggatgattataagtaacgagttttaaaattagtttagattaggttaggtgcggtggtttatatttgtaattttagtattttgggaggttaaagtaggttggttgtttgagtttagaagttcgagattagtttgggtaatatggtgaaattttcgtttttattaaaatataaaaaattagttgggcgtggtggtatgtgtttgtatttttagttattttggaggttgatgtaggagaattgtttgaatttaggaggcggaggttgtagtgagttaagattgcgttattgtattatagttttattaatagagcgagatttcgtttttaaataaataaataaaattaatttatattaaagtaggggatggagggttttagaatagatgtttttaaaaagagaatagaattgatagtttatttaatgtgattaacgttattgagaggaggaaaatttgagtatatatttgtgattggtatataaaaaaataagtcgatgattaaagaaaaaaaaagaggtaagttttaattgtagaaaaatggtaaagataaaaggtatagttgtgtaataaggaaaaatagttgtaaaaaaaaagaaatgtaattatatatattatatgatttagttatgaatagtatttgtatagttataatattacgggcgtgtaggagtatgaaaagtatatgtgtggtcgggtatggtggtttatgtttgtaattttagaattttgggaggtcgaggcgggtggattacgaggttaggagatcgagattattttggttaatatagtgaaatttcgtttttattaaaaatgtaaaaaaaaaaaaaaaaaaaaaaaaaaattagtcgggcgtggtggtagttatttgtagttttagttatttaggaggttgaggtaggagaatggcgtgaattcgggaggcggagtttgtagtgagtcgagatcgcgttattgtattttagtttgggagatagagcgagattttattttaaaaaaaaagaaaaaaaaaagaaaaagaaaagaaaagtatatgtgttattagtgtattagagttaaatttttttttatatttaaaaatggaaaaattaagatgtataatagtagatatgtatataaaaaataaatatgaagatttttattaatggaaatagttaaaaagtttaaagttttgggtagggtttttagaatggataaggtagagaggggattgttgttttttgttataatttttgtagaattaaagtatgtaatttttttattttatgtatatataatattttgatgttagaggatgaattgtatatgttttagaaatatttgtattgaaggtaaaatggttattttttaatatattagttatttatatatataataatatatttttttaaaattattaagattaatatttaggttttattttgatatatttaaatgaatttgtttttgttagtattattattatattttattttattattaagggtaagtgagtcgttaaaaattggttattttaggttaatttagaggtgtttaatcggggaagaattttattttagggattatgtggtaatgttataatataggtgggggttttttattggtatttaataggtagaagttaacgatgttgttaaataatttataatgggtaggatagtaaagaattatttagttttaaatgtaatagtgttgaggttgagaaattaagttttaagtttttgaggattattttattagaacgttatatataaagattgatgatatgtaaatattttgtaatttaggattgatttagttaaatatttcggtgtaatgttggaagtagtttggttgtgaaatatattttcgggaatattgagaatggtaaagataaaaggtataataaatgataataataataaaatatagagttttgtattttaataattttttttatttatggtttttagggtattttatagattaataatatttattttggtatttatatattattttttatttaaggattgtaggtatttttataatatttttacgatgtaggaagtattattatttttattttatatgtaagtaaatagaggtataaaagttaagtaatttgtttaaagttatataagttagtagtagttaaaatttttgatttagaatttattaatattaagagaattggtttaagttatgtagtgataaatttatgtggggtgttattttagtttatttaaagtttatcgtttttaggttgatattgtatatttaatattttatttgttataattttttttttttttatatattttttagagattaaggattttaagtttttagaagggattatgtttattgagtgtttttttcgaattaagtatattttatgtgtagtgttagtttttaagatagtttaaatataatgtaattgggaggttgagagtaggagaattgtttgaatttaggaggcggaggttgtagtgagttgagatttcgttattgtattttagtttggcgatagagcgagatttcgttttaaaaaaaaaaaaaatgtaatttttgttgattttatagtatagaaagttgagtattagataatgtaaatatgtttaagattttttagttagttgattatattttttttttattatattttgtagtttttttaggagaaaagttttttgataagttataaagtatatgaatgtgaatacgtttaatgttttagttttttttattttttttaaaatttagaaaataaattaatgaatatgtaattgagaaattttaggtggtatattggggttggtattagtttaggtaaatagtcgtttagttttttagatttatttttaataaaagtttttaattttttaaggatttttttagagttttcgttatacgttttttataatagttagattaaagattaaaattgtttttttttgagaaatatagagtatgtgaattatttttttttgtttttagttttgtggtaggtaaatattgattgtttatttattatgtgttatttgggtaaaataggaatattaagtaggaagaaaggtttatgttaggtaagagcgtgatttagggtttttttatttttttataaaatggagatttggtatttgtagttttttataatgatgtgttttgatattatttggatatagaaaggttagttttaggtgcgttagtgatagtttatttcgttttgatttagaaattttagatgatttgtattagaggataagtttttggtatgttaataatgaaaaaatagagataattattgttttagtttattttaaattagtattagtgtagcgttagtattttggtagggagttttgttgttaaatttattttttgtaaagaggagaggtagagatagggttaaggggaaaattttaagattggaatcgttaatataataaattgtcgaattgagttttttttttcgtaattttaagatattagtaagtttttttttttagttaattttttttattagggtatcgtagtttttttagaaggagggtgttgggtttgttttaggtttttttatttttttgttcgttgttttagtatatttgaaaagggagtagcgattaggaaaagagatacgtgggtatttttttattttgtttagttattttttgaattattataagttatcgtatttttttttttagttagtagcgttcgagatttttttttaaataatacggttttgtatttaaaaggaagagtggtgggagaagagagaggcggagaagataagtaagaagggcgtggagtgtcgttttcgtttcggagtcggaggcgtcgggaggtcggacgtcgcgaagttgttagtttaggaatgtgtcgtttaattcgtaggtcgcgggcgatcgcggcgggcgcgttgtggtttgcggcgggagcggggtagaggacggttggcgtagggtaggttgtagcggcgggtcggacgcgacgtcgcgtatttgagcgttcgggggcggggcgttagcggttacgattttttttatcgcgcgacgcgtttttcgcgcgtcgtttcggtttttttcgttcgtgtttcggcgcgttcggtttttttcgcgtttttggttttttttttttttttttttttttttttttttttttttttttgttttgggattgtttggatttcgtatcgcgagtttgtcgcggtattttcgcgcggcggaagagcgcgcgttagtttcggtatatttgggagtcggattttagttttacgtttcgttttttataagtttttttaaggtaaggcgttcgtttatattcggttttttttacgttcggcgggatagttgggttttcgttttttttgcgaatcggttaggagtttcgcgtttcgttttgggagtggggttgtagttgacggggatttcggatcggcggtggttagagcgcggagtaggcgatacgacgagtcgataggtggcgggtttagttttagtatttcgatcgtcgtcggcgcggattttggtggggatggggcgggcgggtcgatttgggggtggggttagttttttttttttttttttaggggcggcgatcgtcggggttcgtattgtaggtgcgtgggagaaattttgtagggtggggattcggcggttgttggtcggtagtgattggtgggcgcgttcgaggattttaaggggcgtagttcgggggtagatttttgggtcgggcggggattttacgttttttttattcgtttttttttgttttttattttagt

SEQ ID NO: 1398 - DNA, 5572 bp, Artificial Sequence
  chemically treated genomic DNA (Homo sapiens)
gttgaggtgaaagataaaagggggcgggtaagggaagcgtaagattttcgttcgatttaagggtttgttttcgggttgcgttttttggagttttcgagcgcgtttattagttattatcggttagtagtcgtcgggtttttattttgtaaagttttttttacgtatttatagtacggatttcgacgatcgtcgtttttagaagggaggagagaggattgattttatttttaagtcggttcgttcgttttatttttattaaggttcgcgtcggcggcggtcgagatattagggttagattcgttatttgtcggttcgtcgtatcgtttgtttcgcgttttagttatcgtcggttcgaggttttcgttagttataattttatttttaaggcgaggcgcggagtttttagtcggttcgtagaggaggcggggatttagttgtttcgtcgagcgtggaaaggatcgggtgtgagcgagcgttttattttggaggagtttgtaggggacgaggcgtagggttgggattcggtttttaggtgtgtcgaagttggcgcgcgttttttcgtcgcgcgaaagtgtcgcggtaaattcgcggtgcggagtttaggtaattttaggataggagggagggagaagaaggagggagggagggagggagggagttaggggcgcgaagggagtcgagcgcgtcgaagtacgagcggaaaaggtcgaggcggcgcgcgaggggcgcgtcgcgcggtgggaagggtcgtggtcgttgacgtttcgttttcgggcgtttaggtgcgcggcgtcgcgttcggttcgtcgttgtagtttgttttgcgttagtcgttttttgtttcgttttcgtcgtagattatagcgcgttcgtcgcgatcgttcgcggtttgcgagttagacggtatatttttgggttagtagtttcgcggcgttcggtttttcggcgttttcgatttcggggcgggaacggtattttacgttttttttgtttgtttttttcgtttttttttttttttattatttttttttttaagtataagatcgtattatttgagagaaagtttcgaacgttgttggttaaggggaaaagtgcgataatttgtgatgatttagggaatgattagataggatgggaaaatatttacgtgtttttttttttagtcgttgttttttttttagatgtattagggtagcgggtaggagaatagaaagatttgagataaatttagtattttttttttaagaaaattgcggtgttttggtgaaaagggttggttaagaggaaggatttattagtattttagggttgcgggagaaaaaatttagttcgatagtttattgtattggcgattttagttttggagttttttttttaattttgtttttgttttttttttttatagagaatgaatttagtagtaaagttttttattaaagtattaacgttgtattgatgttaatttgagatgagttggggtagtgattgtttttatttttttattattaatatgttagaggtttattttttgatgtaagttatttgaaatttttggattagagcggggtgggttgttattgacgtatttaagattgatttttttatatttaagtaatgttagggtatattattgtgggaggttataaatgttaggtttttattttgtaaaaaagtaggagagttttaagttacgtttttatttaatataaatttttttttttatttaatatttttgttttgtttaggtagtatatgatgagtgagtaattagtgtttgtttgttatagaattgggaatagaagaaagtgatttatatgttttatattttttagggaaagatagttttggtttttggtttggttgttgtgggaaacgtatggcgagagttttggaaaaatttttagaaaattaaaagtttttgttgggaataggtttaaaaggttgagcggttgtttatttaagttagtattaattttagtgtgttatttgaagttttttaattatatatttattagtttgttttttgagttttaaggagagtaagggaggttgggatattaaacgtatttatatttatatgttttgtaatttattagaggattttttttttggaagggttgtaggatatagtggaaagagggtatagttagttagttgagagattttgggtatgtttatattatttggtatttagttttttgtattataaaattagtaaaaattatattttttttttttttgaggcggagtttcgttttgtcgttaggttggagtgtagtggcgggattttagtttattgtaattttcgttttttgagtttaagtaatttttttgtttttagttttttaattatattatatttaagttgttttaagaattgatattgtatataaaatgtgtttgattcgaggaaggtatttagtaaatatagttttttttaggggtttaaagtttttggtttttaagaagtgtatgggagaagaggaaattataatagatggggtattgaatatataatattagtttaaaaacgatagattttgaatgaattaggataatattttatataaatttattattgtatggtttagattagtttttttagtgttaataggttttgagttaggaattttggttgttattgatttgtgtggttttgggtaagttgtttaatttttgtgtttttgtttatttatatataaaatggggataataatattttttgtatcgtgagagtgttgtgaaagtgtttgtagtttttagataaaaggtggtatgtgagtattagagtaggtattattagtttataaagtgttttaggaattatggatgaaagagattattgaggtataaagttttgtgttttgttattattattatttattatattttttgtttttattatttttaatattttcgaagatatattttatagttagattgtttttaatattgtatcgaggtatttagttgagttagttttaaattgtaagatgtttgtatattattaatttttatgtatagcgttttgatgaaataatttttaaagatttggagtttggttttttaattttagtattgttatatttggggttggataattttttgttgttttgtttattgtaggttgtttagtagtatcgttggtttttatttattagatattaataagaaatttttatttgtattgtgatattgttatatggtttttgggataaaattttttttcggttgagtatttttgagttagtttaaaataattaatttttagcgatttatttgtttttaataataaaatgaaatatgatgataatgttgataaaaatagatttatttaaatatgttagagtgaaatttagatgttagttttaatgattttgaggaagtgtattattatatgtatggatagttagtgtattgggaagtagttattttgtttttaatgtaggtatttttggaatatatgtaatttattttttaatattaaaatattatatgtgtataggataaaaaaattatatattttagttttataaggattataataaaaaatagtaattttttttttattttatttattttgaaaattttatttaaaattttgaattttttaattgtttttattaatagagatttttatatttattttttatgtgtatatttgttattgtatattttgatttttttatttttagatatagaagaggatttagttttaatatattaataatatatatatttttttttttttttttttttttttttttttttttttgagatggagtttcgttttgttttttaggttggagtgtagtggcgcgatttcggtttattgtaagtttcgtttttcgggtttacgttatttttttgttttagttttttgagtagttgggattataggtggttgttattacgttcggttaatttttttttttttttttttttttttttgtatttttagtagagacggggttttattgtgttagttaggatgatttcgattttttgatttcgtgatttattcgtttcggttttttaaagttttgggattataggtatgagttattatgttcggttatatatatattttttatatttttatacgttcgtagtattatgattatataaatattgtttatagttgagttatgtggtgtatatgattgtatttttttttttttataattgtttttttttgttgtataattatattttttgtttttattatttttttgtagttaaaatttgtttttttttttttttttaattatcggtttatttttttatatattagttataagtatatatttaaatttttttttttttaatgacgttaattatattgggtaagttattagttttattttttttttggaaatatttgttttggagttttttattttttgttttaatatggattgattttgtttgtttgtttggagacggagtttcgttttgttggtgaggttgtagtgtagtggcgtagttttggtttattgtaattttcgttttttgggtttaagtaatttttttgtattagtttttagagtagttgggaatataggtatatgttattacgtttagttaattttttgtattttagtagagacgggggttttattatgttgtttagattggtttcgaatttttgagtttaggtaattagtttgttttggttttttaaagtgttgggattataggtgtgagttatcgtatttggtttaatttggattgattttaaggttcgttgtttgtggttattttgggattatgtttttttaatattttgagaattattttttttgtagattttttgttttttgaattgtatatttttttttttttgttttttttttttattttagtagagtatatttttagtatattttgaagatagtataatttatttttagagattttgtatattggaaaatgttttaaatttatttttatatttgattaatagtttggtggagtatagaattttaggttagaaagtatttttttttataattttgaaggtattgttttattattatttagtttttagagttgttgtttagaagattagtggtattttgattgtattgtattttttgttttaaaatttttggatttttttatttagattttttgaaatattttgaagatatgttttgatttggttttttattattattatgttatgtagttagtggatttttttaattagttatttgttttttagttaggaaatttttttattttttttttttttttttgatatggagtttcgttttgtcgtttaggttagagtgtagtggtttgatttaggtttatagtaatttttatttttcgggtttaagcgatttttttgttttagttttttgagtagttgggattataggtatatacgtttggttaatttttgtatttttagtagagacggggttttattatgttggttaggttggttttgaatttttgattttatgatttatttgttttagttttttaaaatgttgggattagaggcgtgacgatcgtgtttggtttatttttttttttttataagattttttttttatttttt

SEQ ID NO: 1399 - DNA, 6534 bp, Artificial Sequence
  chemically treated genomic DNA (Homo sapiens)
tttgattcgagcgaaagaaagatttgttagttttttttttttagtattttttttttttaagagtaggatatatagttttagttttttatgtatcggcgttcggaggtaggagtttttggagtggttattcgtttatttttttgttttacgagttaaggaaattaacggattttaaggttttttttatttattttttttagttttgttttcgtttttattttatttatagtttttatttgttttcgtatagattagattttttggtttttttaaggtttaggttgttcgtttttaatataagacggttttttagttaaataaggttttttaatttttattttttttatatatattagatttttttatatatatatatatatatatttcgaatatatatatttcgaatatatatatttcgaatatatatattaaagagtagttatcgaagaatttgttttttaaatattatttttattttattatgaatttttatttaattgagtagaatattttttggaagattagataggatttatttattttttataagatattttatttttttcgttttggagaatcgggcggcggaattttgttttttttgtttgtttaaaaataatttttttagatttaaatgaattaggatattagttgttgtgagatttattttttttttttttttttattgtttttaaaaaaaaaagtatttttttttttttttttttttttttttttttttttttattttttttttttttttttatttttttataaattatatgttttttattgtaaattcgtttatacgttttttggggtttttttagttgaaggagtaaatttatttcggttggtttatattatgttttaatgggatgtttatatttttatttagttttttaattcgaatttatttcgattgatttttcgatggggagaagagcggcgttaatgtttttgataaataattgcggggggtttaatgattgttattgaggtagcggttgcgaaggattacgggtttaattcgggtatttattaattttgtattattatattcggatcggaagtttatgattacgaatttggcgttttgatgtttttttcgtgagttttcggtagtttttttgtgggattgagggtttttcggcgtttgtttaatttttattgtattttgagaattacgtttggggtcgggcgggtggttaggaatttttttgttcgatcgtgttagtttgttagagttcggttttttagacgggaggaaaaaggtttgggtggtagatattattttcgttttttattaggttagggatattattttgtatagattataatttttttttaagatttgtgtttggttgagtatgaagttaatttttagaggttttgagaagtttacgggttatgaaatttttgtgttagtgtttttaagtgcggaggttgttcgttaaagggtgttttatagtttaggtcggttattaaagtgcgattgggttgtagacgtacgtatttaaacgggttgcgagggagaatttttaagttaataagggtacgttttatttaggtttggatagttagttcgttgttatttttatttgtagtgtttttgaaattgggggtagaggcgtagaggggataatagaagttatttttttcgtttattttttttttttttttgttaaattatttaaatatcgtttttaaggttttcgttttatttcgaacgtgtatagagcgtgagtggattttatattcgtttataatatcgttgtggagagttttattgatgttttttgggtaatttgttagtttaggtaaaagttattgttttttaaattagggtttaaggatgtagggcgcgggttttcgttttttaagttttatcgttgggttatttttttattaattagcgtttgtatcgcggttaaatttggtattaggattttttggtttatcggttgcggatagggaagtggtttggatttttatttagttgcggggtttgggtgtggggtggtttgggtttcggagagattttagaaagaaataaaggggaggtttaagattcggagatagagaaagagtggttggaattattcggtatttttgagatttgttgcgttttgttttgcggagttacggttttgagtcgggttaggtttggcggcgtgcgggcgttttaggttaggtagttttagttaattttgttgttttggttattttaggtcggatttcggggatataggttataagaaatttagatttattaagtttttggatgtggtttagttgtttagagtttaagggtgtttttttattttttttcgggtgtttagggatttttggttattggtcggtgagaagggtcgggttgattatttgggtatatatgaattttagagcgttcggtagaaaagaaagaggtcggaaaggagagaaaatgagtcgttttttgatttcggagttttaggtttttagtatttttatatttttgtggtttttatttgtatatgtttatagtaagtgatagttagtttatgaatttatgggtatttaagatttagtttagtcggtagtattttcgtttaacggtttcgcggattttgtaatttacgggatcgggagaaggaattttgtagtaagcgtttttttttagtatttgtcggtttttaggagagaaaattttcggtaggagagagacgggtggacgttgggagggtttggagattaagttttcggtttaaaaataaatgagatttagttttagatgttttttaattgttcgcggggtttaagagtttattttagttgagagttgagtttatttttgtttttttgaaattatatttttggtattttttttatatagtaattatcgttgattttagaaagtgttttgtcgattttgtttaatttttgggaagaagaaaatttggaaaaagtttagtttttaaaatgttatcgttgagaagtggtttaaaacgtacggatataggttttggtggttttaacgttttaaaaagaaaatgagaaaattttttttttgaaaaattgaattatttaatgtaaaattaggttaaataaggtatatgttttttttatgggtttagatatttttgggagttttttgagatttgttttcgtggttttgagggttaattaagttttttggtattaggtaggttgaaagtttgtttggtttttttaatggtgagtgggtttttaaagggttaatttgtggattgttgagcggttatattttatatttttttatattttgttttttgagtttgttttaattagggaatggggaagtagggttgggggttcgagtttacgttaaaattgttaaaggaggtgggggagggggatagagagagaggagtggagaattttttttaggggtaggaaaaatttaaaaattataaaaggaaaagggggaatttgaagtttagaagttattgttttttttattttaaagggaaaaatttgttcgatttttatttttttgattgattaaggttttgaatatttcgcggtttcggagtgatagtttttgaataggttcgagcgaataaagcgtagtgtagagcgcggggttggtattcgggggtgtaaaggaggcgagttcgttggtatttattaagttataaataaaaggttatgtataatggtattttttttaaggatagatagtttttataatatttttggcgttatattttgttggggatattttagtttttagttaagatttcgttttttttatttttttagtagtttagtttgaatgttataataaatttttgagaataaacgttgaattcgggtaaaattttaatatatagatatatttttgtcgacgtatcggggatttatatgtagagatttagaatcgtagtttgttagagcggtttttatattaagaagaggagttaggtttttttttgtatttttttttatatttttagtttttaattaacgagtgtttgggtttagcgacggttgtttgtgttttatattagtttcgtttgcggacggagaagataaaagaatattagcgtattttggattttttttaggaggagttttatcgggaggattttttaataagtttaggttaaggggtattgattataggaaggaaagttaaatatgtttggggttttagatgtttttttattggaattgtgttttttttagtggtagtaagttaagagaaatgagagcgagatttataggtagaaaaaatgagatatagagagagatataggaaattataagaggaatagaggttgagcgagatatatatatagaggtatagaaagagatagagagggaaatagaaagttaaggaaagagtgattagagaaagatatatatatatatatatatatatatatatatatatatatatatatatatagagtgatatagatagagagatagagatagagagataggaattttttcgtttttagtaattgttatttttttggggttgttttttttagtttttatcgggttaatttttttttttgggtaaggggcgtagcgcgggtttttttcggggttagtagaggtttcggtattattagagatgggaagagaaagtggtcgttgttgtttaattagcgcgtgttttcgttattcgggacggtttattcgtcggttaatcgtagtttagggtttttgattaagttttgggtaaaagaattaataaatgttttcgagttcggattttcgtattcggtgttattataggaggagatttaggtaggtcgcgttttagttttattaggtttttcggttcgtcgtggttttttgagttttttttttagggattttagtcgttggaatatttgtttagattcgtattaaattttttcgttttgggttcgggattttggatttcggggttttttcgtttttttttttttcgggttttagtttcggtttttggattaggaatcgatagttttttttttcgcgtttttttttttttttttagtcgttttggggaggggttttttacgtttcggatagttttcgagggttattcgcgtcgtattcgttttttcgtttcgtttttatttggatataattttcgagcgaagttgtttttaggatgattacgttggtcggcgttgtgtttaggatgatgcggtcgggttcggggtagaattattcgcgtagcgggttttcgttggaaggtaagggagggttttagcgcgtcgtttggattttagggtttgggatcggttgttttattttatttttaggtttcgtaggtttttttggtgtttttaggaagtttattttttgggtattttatattttaagaagtattagtcgggggcgaggatttattcgattttttttttgtaaatggagcgcgttgttttttgtaaattttggcggagttgggcggttaggtttgcggcgagtcggggagatttgtttttgttgttttggaaatgtcgcggtggagaaggaggtgaatcggtttttgagcggtagaagtaattttttcgtaatttgtttattcgaaattgtttcgaagttgtttcgaaattgtttcggttgcgtttatatttgtgaaatatatgttagtttaggaagtatttttttttttttgttttgtaaagttgtggtggttaacgtcgcgttattgtgattggaatttttagaataattaaataaattagaattttatgtattttaaatagtatttagaagtttttataatttgtttaggaatcgttttttcgtttatttgaagattttgggaatttcggggaggtaggaagttttgtaagtttgagtcgtttttaatggttttttaggttagggcgttttagtagagatgtttatcgttttcgttatttattttttttatatttagtttagagtagaatgtaatatttagagtaagaatgggggttgggggtttaggaatagttttgtcgttgttgtggtttttgttttaagatgtaataggtgatataggtattgttgtttgggttttttttttggattttttttgatttttggttgttgtatttttggttagaaattttaagggttattagttggtttaagttttttagaaagggagagattttaattggatagggatcggtgggagtagagtttattaaggttagtttttgggtgaattttttttcgttaggaggttgtttttagagtaagttagattttttattagttgtagggttttttaagttgttatttttcgggttcgaaggggaagacgttttttttggggagaattattttgttttatttgttgtttttatataagattatatgcgttatattgttgaataatttgaataaatgtgattgaaaggaggtttgggtttgggagttcgatgtcgagtagttttagcgtcggtgttgtaatatgaggataggatagaagattgcgaaattacgtgttgttgttttttgttttttatttttttttagtgattttttttttgttttttttttttatttttttatagt

SEQ ID NO: 1400 - DNA, 6534 bp, Artificial Sequence
  chemically treated genomic DNA (Homo sapiens)
attgtgggaaggtgaaaaagagaagtaagggaaaagttattggaggaaaataaaaagtaaagaatagtagtacgtaatttcgtagttttttgttttatttttatgttatagtatcgacgttgaaattgttcgatatcggatttttagatttagatttttttttaattatatttgtttaaattatttagtaatatagcgtatgtaattttgtgtaaagatagtaaatggggtaaaataattttttttagagaaagcgttttttttttcgggttcggggagtggtaatttaggagattttgtagttggtagagagtttagtttgttttagaaatagttttttggcgaagagaagtttatttaggagttggttttgatgaattttgtttttatcgatttttgtttaattgggatttttttttttttaagggatttgggttagttgatagtttttggggtttttagttaaaagtgtagtagttaagggttaaagagggtttagaaaggaggtttaagtagtagtgtttgtgttatttgttatattttgggatagagattatagtagcggtagggttgtttttgggtttttagtttttatttttgttttgggtgttatattttattttaggttgggtgtgaagggagtgggtggcgggggcgatgagtatttttgttggggcgttttaatttggaaaattattgaaaacggtttaggtttgtaagattttttgttttttcgggatttttagaatttttaagtggacggaaaggcgatttttaaataagttatagaaatttttagatgttatttgagatatatagaattttaatttatttaattattttaaaaattttaattataatggcgcggcgttagttattataattttgtagggtaaaaaaaaaaaaatattttttgaattaatatatgttttataagtgtgggcgtagtcgggataatttcgagataatttcgagataatttcgaatggataaattgcggagaagttgtttttgtcgtttagaagtcggtttatttttttttttatcgcggtatttttaaaataatagggataagttttttcggttcgtcgtaggtttgatcgtttagtttcgttaggatttgtagagagtagcgcgttttatttgtagaaaggaaatcgagtaggttttcgttttcgattggtgttttttggggtgtggggtgtttagggaatgggttttttggaagtattaaaggagtttgcggagtttggggatggggtgaggtagtcggttttaggttttgggatttaggcggcgcgttgaggtttttttttattttttagcgggaattcgttacgcgggtagttttgtttcgggttcggtcgtattattttgggtatagcgtcggttagcgtggttattttgggggtagtttcgttcggaaattatatttaggtgaaggcgaaacggaaaggcgagtgcggcgcggatgattttcgggaattattcggagcgtggagagtttttttttaaaacggttggagagagagggagggacgcggggaggggggttgtcggtttttagtttagaggtcggagttggaattcgggaaaggggaggacggggaggtttcggagtttaggatttcgagtttagggcggaaaagtttggtacgagtttgggtaaatgttttagcgattggggtttttgaaaagggggtttagagagttacggcgagtcggggagtttggtgaggttggagcgcggtttgtttgagtttttttttgtggtgatatcgagtgcggggattcgggttcgggagtatttattagtttttttatttaaagtttggttaggagttttgagttgcgattggtcgacgggtagatcgtttcgggtggcggagatacgcgttgattgggtaatagcgattattttttttttttatttttggtggtgtcgaggtttttgttggtttcgagggggattcgcgttgcgttttttgtttaggagagaaggttggttcggtggaaattgagagagatagttttagggagatggtagttgttgagggcggagaagtttttgtttttttgtttttgtttttttgtttgtgttattttgtgtgtgtgtgtgtgtgtgtgtgtgtgtgtgtgtgtgtgtgtgtgtgtgtttttttttgattattttttttttgattttttatttttttttttgtttttttttgtgtttttgtgtgtgtgtttcgtttagtttttattttttttgtgattttttgtgtttttttttatgttttattttttttatttgtaggtttcgtttttattttttttggtttattgttattggagggggtataattttaataagaaggtatttggggttttagatatatttagtttttttttttgtggttagtgttttttggtttaggtttgttaaggggttttttcgatggggttttttttgggaggagtttagggtgcgttgatgtttttttgtttttttcgttcgtaagcggggttaatgtgaagtataggtagtcgtcgttaggtttaagtattcgttagttgaaggttgggggtatgggggagggtgtagaaaaaaatttggtttttttttttggtgtaaaaatcgttttggtaagttgcggttttaaatttttatatatagattttcgatgcgtcgatagagatgtgtttgtatgttaaagttttgttcgggtttagcgtttgtttttaggaatttattatggtatttagattaaattgttggaaaaataaaaggaacgaagttttggttaggagttgaagtgtttttagtaggatatgacgttaggagtgttgtaaagattgtttgtttttagagaaggtattattgtgtatagttttttatttataatttggtaagtgttagcgaattcgttttttttatattttcgagtgttagtttcgcgttttgtattgcgttttattcgttcgagtttatttagggattgttatttcggggtcgcgaggtatttagggttttaattaattaaaaggatgagaatcgggtaggtttttttttttgaaataaaggaaataatgatttttgggttttaagtttttttttttttttttatgatttttgaattttttttgtttttggagggagttttttatttttttttttttgttttttttttttattttttttgatagttttgacgtgaattcgggtttttaattttatttttttattttttaattaaggtaaatttagaaggtaagatgtaggggggtgtggggtatagtcgtttagtagtttataagttggttttttaaaaatttatttattattggggaaattaggtaagtttttagtttgtttgatgttagaaggtttggttgatttttagagttacggagataggttttaggagatttttagaaatgtttggatttatgaaggaggtatgtgttttgtttaatttggttttatattaaatgatttaattttttaaggggaaaatttttttattttttttttaaggcgttggggttattaaagtttgtgttcgtacgttttaagttattttttagcgatagtattttgagagttagattttttttaagtttttttttttttaaaggttaagtagagtcgatagagtattttttggggttagcggtaattgttgtgtgaaggaggtattagaagtgtaattttaagaaggtaaaagtaggtttaatttttagttaaaataaatttttggatttcgcgagtagttaaagaatatttagagttgagttttatttgtttttgagtcggaggtttggtttttaagtttttttagcgtttattcgttttttttttgtcgggagtttttttttttaagagtcggtagatgttggagggaagcgtttgttgtaagattttttttttcggtttcgtagattgtagagttcgcgggatcgttgaacggaggtattgtcggttgagttgggttttaagtgtttatgggtttataaattagttgttatttgttataaatatgtataaatggaggttataaggatgtgggggtgttggggatttaaagtttcggaattaggaggcgatttattttttttttttttcggttttttttttttttgtcgagcgttttgagatttatatgtatttagatgattagttcggttttttttatcggttagtggttagaggtttttggatattcggagaggggtgggagggtatttttaggttttggatagttgggttatatttaaagatttaatgaatttaaattttttgtggtttgtgttttcgaagttcgatttgggatggttaggatagtaaagttggttgaggttgtttggtttagggcgttcgtacgtcgttaaatttaattcggtttagagtcgtgatttcgtagaatagggcgtaataggttttaggaatgtcgggtgattttagttattttttttttgttttcgagttttgggttttttttttatttttttttgaagttttttcggagtttaagttattttatatttaaatttcgtagttggatgggagtttaggttatttttttattcgtagtcggtgggttaaggagttttggtgttaaatttggtcgcggtataggcgttaattggtaaagggatgatttagcggtggggtttggaaggcgagggttcgcgttttgtatttttgaattttggtttgggaggtagtgatttttatttgggttaataaattatttagaaagtattagtgggattttttataacggtgttgtgaacgagtgtagggtttatttacgttttgtgtacgttcgaaatgaaacgggagttttgaagacgatatttggataatttgataaaaaaaaaaaaaaggtgggcgggggagatagtttttattgttttttttgcgtttttgtttttagttttagagatattataggtgaaaataatagcgggttggttgtttaggtttgagtggagcgtgtttttgttagtttgaaagttttttttcgtagttcgtttggatgcgtgcgtttatagtttagtcgtattttggtgatcggtttgggttgtgaagtattttttagcgaatagttttcgtatttggggatattggtataagggttttatggttcgtggattttttagggtttttgagggttgattttatatttagttagatataggttttaagaggaaattatgatttatgtaaaataatgtttttgatttagtggggagcgggggtggtgtttgttatttagattttttttttttcgtttgaagggtcgagttttggtaggttgatacggtcgagtagagaagtttttggttattcgttcggttttaggcgtgatttttaggatgtagtaaaagttgggtaaacgtcgagaaatttttaattttatagaaaggttgtcgggggtttacggggaggatattaaaacgttaggttcgtgattatgagttttcggttcggatgtgatgatataggattggtgaatgttcgggttaaattcgtggtttttcgtagtcgttgttttagtgatagttattaggtttttcgtagttatttgttaaaagtattggcgtcgtttttttttttatcgaaaaattagtcgggatgagttcggattaagggattagatgaggatgtggatattttattgaaatatggtgtaggttagtcgaagtgggtttgtttttttagttgggggagttttagggaacgtgtgagcgggtttataataaggaatatatggtttgtgggaagataggaagagagaaggaaaataggaaaggaaaaagaaaagaggaaaagaagagagaggtatttttttttttaaaggtagtgagggagggagagaagaataaattttatagtagttggtgttttagtttatttgggtttgagaaaattatttttaggtaaataaggaagataggatttcgtcgttcgattttttagggcgggaagaataggatgttttgtaaaaaataagtaagttttgtttaattttttaaaaaatgttttgtttaattaggtaaaagtttatggtggggtgggggtgatgtttagaagatagatttttcggtaattgttttttggtgtgtgtattcggggtgtgtgtattcggggtgtgtgtattcggggtgtgtgtatgtgtgtgtgtgaaagaatttggtgtgtgtgaaaggggtaagggttgaaggattttatttagttgggggatcgttttgtattgggagcgggtagtttaggttttggaaagattagaaaatttgatttgtgcggaggtaggtgaaggttgtgagtgaggtgggggcgggaatagagttggaggaagtgaataaaagaaattttggggttcgttggtttttttgattcgtggagtaaaaaagtaggcgagtgattattttaggaatttttgttttcgggcgtcggtatataaagagttggggttgtgtgttttgtttttgggggaggagggtattgggaagggggaattaataggtttttttttcgttcggattagg

SEQ ID NO: 1401 - DNA, 6081 bp, Artificial Sequence
  chemically treated genomic DNA (Homo sapiens)
ttgggttttagaaattttttttttgaggggaaggggtaggtgtggagagtagtaaaaattaggttgaagtgagtagaatttataatatttaaggtaaagtttgagttattggtgttttatttggttatttagttggttgtttgttagttgggtggttttgttttttatttattttttttagaatttagtttttttatttgtaagatgggttgttaaaagggtttagtttattttttttaatttaaaaaaaaaaaaaaaaaaaattatgattattagagaaaaaaattgagttgtgtacgttaatttttttatttttttttgttatttttttttttgtgtttttaggaagttttttttttatttatttgtaagtattagggtttttttttagaagtttaggtaattgttgttaaaggttgtggggtgggtaaagagtttaagggataagtgtttaggatatatttttatttaaattaattggataaatgttattagtggttttttttaaattgttttcggtagtttaattagtggtttttttttttttatttgttaggatttatatttttatttttgagtttttaaagtttagggaggtggagaatttggaataattaatgattgatttttaggtattgttattaggaggttttagggtaggttgtcggttattttttgagtgtagggatagggttgaaattttacgtggtttcggtaggattgggtaagtttgtgaggggagagggtggagcgaaaattgttagtgttttgaatatttttgttttttgtaaaatgatgaagtcgttgttggaagttttgttggggtgttggttttttgttattgatttttttttttttttgggttaacgaatgttaattgttgtttttatagatatttttgttttattgttatttttgtatttacgtttgtatttataggtacgggtttattggtttttttttttttaaggtttttttgggaaaggattaaaggaatcgatttttatagtaaaattttagggatattttaattttgttttttttggatgtatttttttgtttttgttgtttaataataattaatttttgtatagaggtgtagtttttaaagggtttttatatttataattttattcgtttttataataaagttacgaggtgggtttgattttttttagtttttcgtttatatttatattatgtagaaggggaaattgaggttcgggtagaagaaattattttattttatataattagggttggaatatttatttttgatgtaaagtagagagttgttgttttttttttgaagggatgtattttagttttaataatggttcgttacgtaggggaagtggtatggtggtaagtaagttaggaggattgttgggagtagtggttttttttcgaggttggtttttgggtattgtgtttagagaaattagggtatataggagtaagaggaagagtttatggatttattggagtttaagggttttagttatttgagttagtaggtagaatgatttaagtgtgtaaataattatttatttaatagttagttgaaatacggtagtttataaaagatttttaaattattttatttttatattttaattagttaggatgattaatttattttgatttgttcgggaaagttttagttttaattcgtatttagaaaatattgttggttttcgtttagggtaaattagggtattttattattttattattagtttagtgtattatagttgagtttagaaaagaaagaatattttttgaaggtttagtagattagtatagaattaaataaattgtgggatattatgtaaatttaaaaattattgtagttaggtaattatttaggattgttggaatgttaaatttgaaagaatgtttatttttataaagaaacgtttagatttgcggttagattttttgtatttttaaaggtaaggtagagttagtttttcgtttttatttttgtattttgatattggtaatgaattatatttttttaaaaaaatattgagtttaaaaaaattataattagttgttagttgataatattgttataaaagttttatgggttttaagtttgagaagaaaagttggtaaatgaggtatttattttaaaaagtgagttttaaggtttggttaggtatagtggtttatgtttgtgattttagtattttgggaggttgaggtaggcggattatttgaggtttggagttcgagattagtttggttaatgtggtgaaatttcgtttttattaaaatataaaaaattagttaggtatgatgatgtatatttgtagttttagttagtcgggaggttgaggtaggagaattatttgaatttaggaggtggaggttgtagtgagtcgagattatgttatcgtattttagtttgggtgatagagtgagattaagtttagaagaaaaaaaaaagagttttaaaagttttattgaaagtttattagttatagtgtaaatttattttaaaattttaaatattattataggaaggtatatgatttttatttttaattaaaagtattatggattttaagtttgaaaaaatattgtgataataggtgattttaaaaatatatgtattttaaatttttcgttttgtagaggaggagattgatgttaaagagatagagttaaagtattagttaatgatatttttttggttttggttttagagaattaggaagtattaaggaatttaggtttgatttttgattttaattagaagtagggttagtttaggaggtttgtgtttatttttgtagtagaagtttattgtatttttattttttgttcgttttagattttttttgttgagttttttggttatttgttatgttatttgtagtttggagaagaggtattgttaaggtgtggggtgtgtttttttttgaggagtaattttgaatagtgtatattgtttttattttgaaatgaaattttaaagataaatttatatatgggataggaatgttttgataatttgttggatttgttttttaagaaattttgtttaaaaaggggataggaaagggagagggtttattgtttgggtagaaaagatgtgtataggtaagaatgattgtatgagagttaatggttattggtacgtattagaattttagattgggtagaatttttaaggttgttagagttgtttgaaatgagggcgtattagatttattttggagtattgtttttttggtgggagggaattttgggtggataaagagagtttttgttgtggttgttatattttatattttttttgtagtaggatataatttagggtagtaaattggtttatggggttcggaggatttatgttaagatttatttttattttaatatttttggattgtttttttttgggagggattgttagagaagttagggatttggagttttgaaaattatagagatatttaaaattataattttagagaaagatttaaaatgatgaagtattaattatttttgtttatagtttttttttgtaaatgtggaggaaatatgtagggatatatatttttttttttttttttttataagatgatttattttttttaaattgagaaatgagaaagattgggtggaaggaggttgtggattgatatgaaagagaaaatttttttaatttagaaaaatagtttatgtgtttttatatacgtgtatatatgtgtatatatatatatatatatatatatatatatatatttaatttttttgaatattttagttttttttgtattttttttgttttttttttattggttttttagttttttgttttagaataattttattaggtttgtagagttattattgaaaagggtatggttgttttttagattgtaattttgagtttagaggtttggttaaagattggaggagtatttaggttttgatttttaggtttgttagtgttttaggatatttgtttatttatatttatttataattttacgtgtatttcggtttttcgattgagagaattatgaggaaggagggggtagtttttgttattattaaggtaaagaggtgttaggtagttttgttcggttttagggtttattaattttgttattatttttattagtggatttttttttaattatatttaggtttttatattgttgaggttattgatttttatagattaggttagaggttagtttagttttgtttttttttaaggtttttttatatagagatgaagtttaggtttttaatgttttttttttgaattttttttttaagtttaaaatttttaaggagtaagaaagagggtaggtggttgcgtgtgtgttttagaggagagaggcgaggagttgttgtggaatgggttatgtgataattttgttagtttgataatgtaagggtgtgaacgttatttgtgtagaatagagggaatggttttaggtgttgtttaggatttttttttggaagaggttatagttgtggtgagaaggtaatagtattttgtttatagtttcgaaagtaggttttatttaaagaattaggtataaaatagaagttttttttttttttttataaaagaaaaggttgttttttggtgagtaaattaggggagatagggggtaaggagggtattttatagagattattttttttatttttggtggttagtgatttaggaggatttagagaattttatttttaggtttttaggtttttgttttttatttttttaatatttttaggtttgttgagttagggtttagttgtttttttttttttttcgttggaaatagaagtttttagcgaatgtttttaatttttgagtttatttagttatgttttttttgtaaaattttttttttttcgtatttttttgtatttagttagttaattcgcggtttacgagtttcgttagatttattttttagggttttagcgggataaaatcggtcggtgatgtcgggtggatgggaataaattttagaaggaggagagatatcgggtttagggtattttcgcgggcggatttaattagtgagggtttgtagtcggtcggttaggtatgttatttaggggttagttggaagttggttagtagtgaggacgggggatggaagaaaggagagggttttaggatgtttggtagtttttttttttttaagttaaacgggataagattgggatagcggagggagtgggtacggaggttggagtttggagtttttttagcgtatttttaatttttgattttttcgggaagtttgttagttaggttaggttgaggttggttttatttcgtttaaaaatttttttatttttggtagacgatgtaggtgtaaaggatgaggtttggggagggggtttgaggatgtaggtatcgaattttatcgtattttatgttttttttttgggtttgtgtagggtagcggtaggcgcggttcggatttacgggaggaagtttcgagttttcggcgggttgcgagcgatttttcggcgatgttttataattttattagatttggtaagaacgcggtgtggttaggattttcgagttttcgcgtcgttgagcgttcgtgcgtgcgttcgggtggttggatttcgagagcgttagtacgggattcgcgggatttattcgcgtggggatttagttggggcgtttggggtttggtttttcgttggagtcgtttcgttgttttcgggtattggggttttattcggttagttgagtcgtttttgttcggtttcgagggattatatggatcggtgaggggatttttgtggagttagagggggttttttttgagttttatttttagttttgtatggcgtattagtgtggatatttttcgtgttttgtttttgggttgtatcggtgttggatttgtcgttttttcgttttcgatttttaagttatttttttcgggtgcgcgtagttttttttagtgatttttttggttggattgtgagttttcgtatttttaagttacggtaatggagtcggtggtttcgggttcggagtcggtagcgatttaggtgtttttcgattttttttggtttagt

SEQ ID NO: 1402 - DNA, 6081 bp, Artificial Sequence
  chemically treated genomic DNA (Homo sapiens)
gttgggttaggaggagtcggagagtatttgagtcgttgtcggtttcgggttcgggattatcggttttattgtcgtggtttgaggatgcgggagtttatagtttagttaggggagttattgggaaggattgcgcgtattcgaggaagatgatttagaggtcggggacggggaaacggtaagtttagtatcggtgtagtttagggatagagtacgaagaatgtttatattaatgcgttatgtaaggttgggaatggagtttaaaggaaattttttttaattttatagagatttttttatcgatttatgtggtttttcgaaatcgggtaagggcggtttagttggtcgggtggaattttagtgttcgagaatagcgaggcggttttagcggagggttaggttttaggcgttttagttgggtttttacgcgggtgggtttcgcgaatttcgtgttgacgttttcgagatttaattattcgagcgtacgtacggacgtttagcggcgcgggggttcggggattttgattatatcgcgtttttattagatttgatggagttgtgaggtatcgtcggggagtcgttcgtagttcgtcgagggttcggggttttttttcgtaggttcgggtcgcgtttgtcgttgttttgtataaatttaggagaagggtatgagatgcgatgagattcgatgtttgtatttttaggttttttttttaggttttattttttatatttgtatcgtttgttaggagtaggaggatttttaggcgaagtagggttaattttagtttagtttagttaataggtttttcgggaggattaaggattgggagtgcgttgaagaagttttagattttaattttcgtgtttatttttttcgttgttttagttttatttcgtttaatttgggagggaaaaggttgttaggtattttgggattttttttttttttttatttttcgtttttattgttagttagtttttagttaatttttgggtgatatatttggtcggtcggttgtaggtttttattggttgggttcgttcgcgagggtgttttgggttcggtgttttttttttttttgaagtttgtttttatttattcggtattatcgatcggttttatttcgttgaggttttgggagatgggtttggcgaggttcgtaggtcgcggattggttggttgggtgtaggggggtgcgggaaggggaggattttgtaagggggatatggttgagtggatttaggagttagaaatattcgttgggagtttttgtttttagcggagggaagagggaggtagttgagttttaatttagtaggtttggaaatattggaggagtggggaatagaggtttaggagtttgaggatgaggttttttgggtttttttgggttattgattattagaagtgagagggatggtttttgtaggatgttttttttgttttttgttttttttggtttgtttattaggaagtagtttttttttttgtaaaaggaaggagggaatttttgttttatgtttgattttttaggtagagtttgttttcggggttgtaggtaagatgttattatttttttattatagttatgattttttttagggaagaattttgagtagtatttgaagttattttttttgttttatatagatagcgtttatatttttgtattgttaggttaataaaattgttatataatttattttatagtaatttttcgttttttttttttggaatatatacgtagttatttgtttttttttttgttttttgaggattttgaatttggaagaagagtttaggggaagggtattgagggtttagattttatttttgtgtggaaaggttttagaaaggaataggattgagttgatttttggtttggtttgtaggaattaatagttttagtaatatgggggtttgggtgtggttaagaaggggtttattggtgggaatgatggtagggttggtgagttttgggatcgagtagagttgtttggtatttttttattttagtgatggtaaaagttgttttttttttttttatagtttttttagtcggggaatcggggtatacgtaagattgtgagtgggtatgagtgagtaaatgttttggaatattggtaggtttgggggttaaggtttggatgtttttttaatttttggttagatttttggatttaggattatagtttagaggatagttatgttttttttagtgatggttttgtaggtttggtggggttgttttgggataggaggttaagaagttagtgggaggggggtaaggaaggtgtaggggaaattgggatatttagggggattggatgtgtgtgtgtgtgtgtgtgtgtgtgtgtgtatgtatatatgtatacgtgtgtgaaaatatatgaattatttttttgaattaaaaaagtttttttttttatgttaatttataatttttttttatttagttttttttattttttaatttaggagaaatgaattattttgtgaaaaaagagagaagaagatgtgtatttttatatgttttttttatatttgtaaagaggggttgtaaataaaaatagttggtgttttattattttaaatttttttttaaaattgtaattttaaatatttttgtggtttttaaagttttagatttttaatttttttggtagttttttttagagagagataatttaagggtgttgggatggaaatggattttggtataggtttttcggattttatgggttagtttgttgttttggattgtgttttgttgtaggggaggtgtggagtgtggtagttatagtagaaattttttttgtttatttaggatttttttttattagggaggtaatgttttagggtgaatttaatacgtttttattttaaatagttttgataattttagagattttatttaatttaaggttttgatacgtattaataattattgatttttatgtaattatttttgtttgtgtatattttttttgtttaagtaatgaatttttttttttttttattttttttttgggtaaaattttttagaggataaatttagtaagttattagaatatttttgttttatgtataaatttatttttaaaattttattttaaggtaaaaataatgtgtattgtttaaggttattttttagggaaaaatatattttatattttgatagtattttttttttagattgtaggtgatatagtaggtgattagaagatttagtagagaagatttaggacgagtaagaagtgagaatgtagtgaatttttgttgtagagataaatataggttttttggattgattttgtttttaattagaattagaaattaggtttgggttttttggtattttttaattttttgagattaaggttaaggaaatgttattaattggtgttttaattttgtttttttggtattagtttttttttttgtaaaacgaaaggtttgaaatatatatatttttaaaattatttattattatagtatttttttaaatttaaaatttatgatgtttttagttaagaataaaaattatatgtttttttatgatgatatttgaaattttaaaataaatttgtattgtgattaatagatttttaatgggatttttagaattttttttttttttttttagatttagttttattttgttatttaggttggagtgcggtggtatgatttcggtttattataatttttattttttgggtttaagtgatttttttgttttagtttttcgattagttggggttataggtatgtattattatgtttgattaattttttatattttggtagagacggggttttattatattggttaggttggtttcgaattttagattttaagtgattcgtttgttttagttttttaaagtgttgggattataggtatgagttattgtgtttggttaggttttagaatttattttttaaaatgaatattttatttgttaatttttttttttaggtttgaggtttataaggtttttgtggtaatattattaattggtaattagttataatttttttaaatttagtgtttttttgagaaaatgtaatttattgttaatattaaaatatagaagtagagacgagagattaattttgttttgtttttgaaaatgtaagagatttggtcgtagatttgagcgtttttttgtggaaatgaatatttttttaggtttaatattttaataattttaggtaattgtttaattatagtggtttttgaatttgtataatattttataatttgtttaattttatgttgatttgttgagtttttaaaagatgtttttttttttttggatttagttgtaatgtattgggttggtggtagggtaataaagtgttttggtttgttttggacgaaaattaatagtgttttttagatgcgagttaaaattgggattttttcgggtaaattaggatgaattggttattttagttgattagagtgtgggagtgggatggtttgggggttttttataagttgtcgtgttttaattgattattgggtgggtgattgtttgtatatttgggttattttatttgttggtttaggtgattgagatttttgaattttagtaggtttatgagtttttttttttatttttatgtattttggtttttttgggtataatgtttagagattagtttcgagggaagattattgtttttaataatttttttggtttatttgttattatgttattttttttacgtaacgaattattgttgggattaaagtatatttttttaggaagaaaatagtagttttttattttgtattagaggtgagtgttttagttttaattgtgtagaatgggatgattttttttgttcgaattttagtttttttttttgtatgatgtggatatagacggggggttggggagggttagatttatttcgtagttttgttgtgaggacgaataaaattatgaatgtgaaggttttttgaaaattatatttttgtataaaagttaattattattagataataaaggtagaggaatatatttaaagagggtaaagttaaaatgtttttaaagttttgttgtggaagtcggtttttttaatttttttttaaaggagttttggagaggaaagggttagtgagttcgtgtttgtgggtgtaggcgtgggtgtaagggtagtagtggggtaggggtgtttgtgagggtagtaattaatattcgttgatttagagagaggggagagttaatggtagaaggttagtattttagtagaatttttagtagcgattttattattttgtagagggtagaagtgtttagggtattggtagttttcgttttattttttttttttatagatttgtttaattttgtcgaagttacgtgggattttaattttgtttttgtatttaggaaatggtcgatagtttgttttggggttttttggtggtagtgtttgaaaattaattattaattattttaggttttttatttttttaggttttgaaaatttagaaatagaaatataggttttggtaggtgaaaggaaaagagttattggttgggttgtcgagggtagtttggaagaaattattggtggtatttgtttagttggtttgggtagggatgtgttttgggtatttgttttttgggttttttgtttattttatagtttttggtagtagttgtttgggtttttggaaggagattttggtatttataaatgggtggaaaaaaaattttttggggatataaaaaggaaggtgatagagggagataaaaggattgacgtatatagtttaatttttttttttagtaattatagttttttttttttttttttttaagttagaaaaaatgagttagatttttttggtaatttattttgtagatgaggaaattggattttagggaaggtaagtagagagtaaggttatttagttagtagatagttaattaggtggttaaataaagtattagtgatttaggttttgttttaaatattataaattttatttattttagtttagtttttgttattttttatatttgttttttttttttaggaaggaagtttttggaatttag

SEQ ID NO: 1403 - DNA, 7625 bp, Artificial Sequence
  chemically treated genomic DNA (Homo sapiens)
ttatagtaaaaatagtttttttagtttttatattattgagtgggttttttttttttttttatttttttttatttttttatcggatgagtattttgagagtatgtatagagaggaagtagttagtgtgtgtaaatttttattttgtttgggttttttgttgttttagatcgatacgttagtttatatttggtttttaataatttgttaaaattgaattgatttttttttttttatttattttaatggaggttgtttttttttttaagtattgtttaagtgagttagattgtatattttgtttttttttggagggatttgtttttttggaatttaggatatttggttgttttgtgagtttatttttttggtgagtttaagaaaagtgatgattttgtagtgtatgtagtttttttttattgttaagtatgatagtaaggttttttgttttttggatggaaggtgaatattttttgttgtttttaagtttttttttttatcgttttttattatttatttttaatttaacgttatatattttaggttgtttttatagtaatattttatttttaggtattaaattttgtttttgttatttgtttttattgttgtagaataaattattatgttgagtggtttaaaataaaaattatgattttttatgtttttacgggttgattggttttatttggggttttacgtgggattgaagttagatgttttttggggttgaagttatttgaaggtttggtaggtttgagtatttaagagttttatttacgtggttggagaatgattaatagtttttagagtttttttggtttagttttagaagttatagttggatgtggtggtttatatttggaattttatatttgggaggttaaggtttaatatttgagtttaagaatttgagattagtttggtaatatagaaatgttttgtttttgtaaaaaatttaaaatattatttaggtatggtgattatttgggggagttgaggtaggaggattatttgagtttaggaggttaaggttgtaatgagttatgattgtattattgtattttagtttgggcgatagagtaagatattgtattaaaataaagttatatggtgatatttttgttatatttgattggttatattgggttattttagatttaatatgggtgagaattatgtagggtgtgaatattgggagttatggtttattgggggttatttttggagattaatattttgtttaatattatatattaaaagggattttttatatttaggttttaaatttatttaattataaagttaataaaagaaaagggagtatatttttgtagtagggtggggagaggatttattaaataaatttttaaatgtataaaattataaggtagagggaaaaaagataaattttattatattaaaatataagatttttgtttatagatattatggattttatgtaagaagttagtatatagatggtagaatgagaggagatatttgtaatattaaaattgataagtaattaatgtttagattttatataaatatttataaattaattaaaaaaagagagtattaaaaatttttaaaaattggtaaaggatattaaaaagtaatttataaatagtaatttttaaatggtaataagtatatgaagaggtttttaaaattattagttattagaaaataatgtagagtaaaataattgaaagcggtaggaggtagataattttttaggtagatgggggtgggtttttagtgaaattttatttttaagttaaaaatagtttggattgttggtttgggatgaaattttttaaattagggtgagaatttttgtttttgtttgtttatttttttttgattggttttttttgaataatgttttttaattaattaaatgttgttttttttaatattatttatagttcgtttttttttaattttgtgtttataaaattttttagatttagttatattgagatagataattttatttttttaatttttttttattgagagttgttttatcgttaataaaattttttatttttattattttttaattgttagtatgattttattttttttggatgtagaataagagtttaggatttattaaatgtgggtatttataaaggttgtaacgttggttttttatttttattggtggagggtagttgttttatagaatagaagttgtagtagggttaagttggtttaggagttacgggttagagtggagaaaggggtcgtttgagttgttaatatgtcgttgtttattaggttgtagatggtggagataaaagagttatttagtatattgtaatatttttttttggggttttaggtatttttgtttgggtgttgttatagtttttttggggtgatatatttgatttggttgtgggttttatatagagtttgtttttgtgttatggtttagtgtagttggttggattttgtatttattcggttatatgttttttttcgttaggggttgagtatatagtcgtagtggttttgtgagttatgggttgtaatataagttagatggggtttggtaagttgagtagataaggtattttttgttgtaattttagtaaaggggttaagaaaaattttgtattataataagtttttattttatagttattagtttgataaaaaaataaaaagttggttaatgggaagtgtgagtatgtatgtgtaagatgtatatggaaatagtatttttttatattatgtaggagagaatgaggattggtgtttttattttggatattatttagaattattttgagatatatatttatggggggaattgttggatttatagggtatggatatatttaagttgtttaagaaattgtttatagtttagggagtaattagagatgtttattgtagtagtattgttgtttaattttgtgtacgtatgtgtttgtgtgtttatatgtttacgggtttgggaggtggtggtagtagtagaaagttgaagggaatttgagtgtttattattgatagaataagaaatttatggtagatttttattataaaatattaggttgtagttaaaagttatagattgaatatatatatagtaatatgggtagattttaattttttattaaatattttgttttgtaagaaatagattgagaaatgtaatatatttatataatattatttatataaatttaaaaatatatatagacgaaataatattatatattttgtaagaatttgtgtaaataaaaatatatattaatatattagagaggttgttatgggcggtggtggggggcggggaataaaagtggagtataagaataaaagttaatagaaaaatgtgaaatgtgagaggatttttttaatttgattttaagatttattataaagttataataattaagataaggtagtgttttgttatgatagataaatagattaatggaatagaagaaagggtttagaaataaatttatatgtatatagttaattgatattttataaaggtgtaaagataatttagtggagaaaggaataattgagtcgttatgtgtaaaagtgtatttggatttataatttgaagtatataaaaatatttatttaaagtggattatagattaaatgtaaaattaaaagttataaaatataggagaaaatttttgattttgggttaggttaagatttttatgtgtataatattaaaatagaaatttataaaagaaatatttgatatattggattttattaaaattaagaacgtttgttgtttgaaaggtattataagataatgtaaagaaaatatttgtaaattattgtttgattatgtttttatatttagaataaaatatttttaaaattcgataagaagataatttaatttttttttttatgggtaggaaaaataaatatgttatttaataaaaaaaatttatttttagtaaataagtatatgaaaagatatttaatttaattattaattaaggaaatttaaaattataatgagatatgtatatattaattaaaatttaaaaggttgattatattaagtgttggtgaggatagagaattgtaatttttatatattgttgttaggaatataaaatgatataattattttgtaaaatagtatggtagttttttaataagttataaaagtttatttattatatgatttaggttttttatttttaagtgtttatttaaggaaaattaaaatatacgtattttcgaagatttgtgtattatattcgtagtagttttatttgtaatagttaaaaggtaaataacgtaaatgtttaatagtgaatcgttaaataaattgtagtttatttgtataatgtaatattataaaataaattttatttagttataaaaggaagaaattattgatataggtaataatatggttgaattttaaaatagttattttgtttagtatatattttatggtttatttatataaaattttagaaaatgtaaattaatttatagtgatttaaagtatattagtgtttgtttggttaggtggtttcgggaggaaggggttattaaagggtaagggaaaatttgtagggatgatgatatgtttataatgttgatttcggtgatggttttacgagggaaatattaaaatttattaaattgtatacgttgaatatgtgtaatttattgtatgttaattatatttaaataagagatttttataaagaaaaaaataggtattttggcgtttagggttatttagttgtaagcggcggggtgggattttaatttagaagcgggtatttggagtttttatgttttattttagttttttgaaataagtacggaggatggttttgagtagcgaggaaagtgttggaagtaagtaggtcgagcgcgtttttggttggggacgttaattattatcggagggcggttcgagcgcggtttcgtttcgggacggtagtttgcgcgttcggtcgtcgtttgtttttttcgttggttatttgttgtcgttcgcgttatggtgagtttaggggtgcgcggtcgcgatcggggtagcggggtcggggtagtcgcgggcgaggtgggagcgggaaggggcgggggaaagttttttcgagttttttgcggagtcgtcggggttcgaaagtggggtttttgttcggttttttgtcgttggcggcggggaggggaagttgaagttttgagaggggcggtggcgggttcgaattttatttagttgggaggttaggtttgttttgatttcggttagtgtttgtttcgggattttttcgggggcggggtttacgatttttttgggtcggggaagatagtcgtggaggagtttacggatttcgtttttttggtggttcgattttgttttatattggggtgggagcgagagggaggttgagtttgcgcgttcgtgtgcgtgtttgttttttgttttttttcgttggtattttgggtacggggtttgtttgggatttacgttttgcgtcggtatgttggttttagagttatttttcgcgtcggtttgaggttcgtgttaggttacgggggtttggtggcgttggagtagtttttttttcgtgagttttttttatttattttcggggcgggggcgggggcggggtttttgttttgttgtaagttcgcgagttttattagattatttttggtttataggttttcggagtaggtaagattgggagggttttttgataggagagggatttgggggagggaggatgagtggggttgtttgtgaggggcgttgaggttttagagatgtaggtttgggaaatcggtaattattttttatatttcgttagaggaggtaaacggggtagcgtttttttttttgtttttagagtcggtatttggaaggtttgttagtttagtcgtaggttgtgcgatttggggggttttagaaggttttatcgagaaagggaagttttttaagagtttatttggatttatttatttttttaagagttaaggaagtaaatagtgggttttgatgttttggttgatttttggttgtttagatatacggattaggcggttagttacggggagaaggttagttttggagtagagatttatttattgggtagatgatgtaaatcgttgttgttatttaatttttatagttatttagagtcgaggggaagagaggggttaagttatattagtttagagagagtttacgtttttaggagggaaaatagtagggaaaaaagacggatttaggaaagtattgcgatgttttagttattttaaatgttattaggtttattataagtttgtttgttttaggaagttttttttttgtaatgtagatgatatttgttttatagtagtggagttttttaaagtgttttattggtattttatgatgatttgtggaggtggaggttttgttaagagaggtatagttatttggttggtaaatggtgaaagcgggttttaaaatttttgttaattaatatatggtgtttagtttgtaggttgttttataaaagttaaattaattttttttatattttttttttatttttaagggtatttttttaatttagtattttatttttgttttggggtggtgttattttagaagtttaggttttgggatttgttaagtttttagatttggatttttttaggatgaaattgatttttgtttttttgttttttttgaggttttatttatggtttgaattgtgttaatttgggttgttttgagggtatttcgtatattaggtaaataggatggggtattaggtttgttagttgtttttggttaagttttttttattttggtttgagttttttaattagttagaaaagtagacggaaaattagagaaatttagttttggcggtttaggattagaggttgtttgggagtatgattgaggatttattagaggtagtgttaacggcggttagttgtagtgtggttaagaatgggatggatatttattttaaatgtagttttttcgtttagttttagtaatgttgatatatagataatattgcgttattattggttaggggtgggcgggaaagaatagtagataagtcgttttttttttttaggtttgttttttttttaatatacgtgaaagttacggtagggacgtggggtgtatatgatgaagtatataataggaaaaggaaggggggagagttatgggtattttttttgagaggttgtggagtaatatatttgtatttgggatttattttgtttttacgtttttattgatgtaataattttatggagggaaggttcgtaaggttttgagggtagggtgggggaagagtgtttttttgttttcgttatatgaattatattgtttttgtgattttttttgtgtgtgtgtggagtgttaaaatttaagatttgagggtttatcggtagacgagtttggattttattttttgggtagggtgttatttttgaggttttttagtttattgtttaaagatttgttgttttttggttatttacgtttaaagtagttagtggaagttaagtttttttaaaggttggagtttttttgttttgatttataaagagaaatgtttttgggtttttgttttttttttttttttagg

SEQ ID NO: 1404 - DNA, 7625 bp, Artificial Sequence
  chemically treated genomic DNA (Homo sapiens)
tttagaagagggaaaaaaatagaggtttaagggtatttttttttataggttaaaatagaggggttttaatttttaggggaatttagtttttattggttgttttggacgtgggtgattaaagggtagtaggtttttgagtaataggttgggaggttttaagggtggtattttgtttaggaggtggggtttaggttcgtttgtcgataggtttttaggttttgggttttaatattttatatatatataagggaaattataaaagtaatgtaatttatatgacggggatagagaagtattttttttttattttgtttttaaagttttacggattttttttttatgagattattatattagtgagggcgtaaaagtaaaataaattttagatgtaaatatgttattttataattttttaggaagagtatttatgatttttttttttttttttttttattatgtattttattatatgtattttacgtttttatcgtaatttttacgtgtattgaagaggaaataggtttagagaggggaaacgatttgtttgttgttttttttcgtttatttttagttagtgatggcgtagtgttgtttgtgtgttagtattgttggggttggacgaaggagttatatttaaaataagtgtttattttatttttagttatattgtagttgatcgtcgttggtattatttttagtaggtttttagttatgtttttaggtagtttttggttttgagtcgttagggttaggtttttttggtttttcgtttgtttttttggttggttgggaagtttaggttaaagtggaaggaatttggttaaaggtagttggtaaatttagtgttttattttatttatttaatgtgcgaagtgtttttaaggtagtttaaattggtataatttaggttatgagtggaattttagagaaagtaaggaagtaagggttagttttattttaggaggatttaggtttaggagtttaatagattttagaatttaggtttttagagtagtattattttagggtagaaatagagtgttgaattgaaaagatatttttaggggtggggagggaatgtgagggaggttgatttagtttttatgaggtagtttgtagattggatattatgtgttgattggtaggagttttgagattcgtttttattatttattagttaggtggttgtattttttttggtagaatttttatttttatagattattatgaggtgttaatgggatattttaggaaattttattgttataaagtaaatgttatttgtattataaaaaaaaaattttttaaggtaagtaggtttgtgatgggtttggtagtatttggggtagttgaagtatcgtagtgtttttttaagttcgttttttttttttgttgtttttttttttgaaaacgtgagttttttttggattgatgtagtttggtttttttttttttttcggttttggatgattatagggattgaatggtagtagcgatttgtattatttgtttagtaggtaggtttttattttagagttggtttttttttcgtggttgatcgtttggttcgtgtatttagataattagaagttagttaaagtattagagtttattgtttatttttttggtttttaaaggggtgggtgagtttaggtgagtttttagaaggtttttttttttcggtagagttttttggaattttttaggtcgtatagtttgcggttgaattgataaattttttaggtgtcggttttggagatagagagggggacgttgtttcgtttgttttttttggcgaggtgtggggagtggttatcgattttttaagtttgtatttttgggattttagcgttttttataaatagttttatttatttttttttttttaagttttttttttattaaaaggtttttttagttttgtttgtttcgaaggtttgtggattagaaatggtttgatgaagttcgcgagtttatagtagagtaagggtttcgttttcgttttcgtttcgggggtgggtgggggaagtttacgggaggagggttgttttagcgttattaagttttcgtggtttggtacgggttttaagtcggcgcggggagtggttttggggttagtatatcggcgtagagcgtgagttttaggtagatttcgtatttagagtgttagcgggaaggggtaggggataggtacgtatacgagcgcgtaaatttagtttttttttcgtttttattttagtataaagtagaatcgggttattaaggggacgagattcgtggatttttttacgattgtttttttcggtttaggaaggtcgtaggtttcgttttcggaagggtttcggaataagtattggtcggggttagggtaggtttggttttttaattgggtgggattcgaattcgttatcgttttttttagggttttagtttttttttttcgtcgttagcgatagagagtcgggtagagattttattttcggatttcggcggtttcgtaggggattcgaaaagattttttttcgttttttttcgtttttatttcgttcgcggttgtttcggtttcgttgtttcgatcgcggtcgcgtatttttggatttattatggcgcgggcggtagtaggtggttagcggagagggtaggcggcggtcgggcgcgtaggttgtcgtttcggggcggggtcgcgttcgggtcgtttttcggtaatgattaacgtttttagttagggacgcgttcggtttgtttgtttttagtatttttttcgttgtttagagttatttttcgtgtttgttttagggagttagggtgaagtatgagggttttaaatgttcgtttttgggttggaattttatttcgtcgtttatagttgggtggttttgggcgttagaatatttatttttttttttataaaaattttttatttggatataattgatatgtaataaattgtatatatttaacgtgtataatttgataaattttaatgtttttttcgtgagattattatcgagattaatattatgaatatattattatttttgtaagtttttttttgttttttggtaatttttttttttcgaaattatttggttaggtaagtattgatgtattttaggttattataaattagtttgtattttttagaattttatgtaaatggattatagagtatatattaggtaggataattgttttggggtttagttatgttgttgtttatattaatggttttttttttttatggttaagtaaaatttattttatagtattgtattgtatagatagattataatttgtttagcgatttattattggatatttgcgttgtttattttttggttattataaataaagttgttgcgaatatggtgtataaattttcgaaagtacgtatgttttaattttttttgagtaaatatttaggaatggaaggtttgggttatgtggtaggtggatttttataatttattaggaaattgttatattgttttgtaaaatggttgtattattttatatttttagtagtagtgtatgaaggttgtagttttttgtttttattaatatttgatatagttagttttttaaattttaattggtgtgtatatattttattgtggttttgagtttttttgattagtaattgaattgaatgtttttttatgtatttatttgttaaggataagttttttttattgaatagtatgtttgttttttttgtttataaaaaaagaaattgggttgtttttttatcgagttttgagggtgttttattttggatataaggatatgattaggtagtgatttgtaaatattttttttgtattattttatggtgttttttaaatagtaaacgtttttaattttgatgaaatttaatatattaaatgttttttttatggatttttattttgatgttgtatatatagaaattttggtttaatttaagattaaaagtttttttttatgttttatagtttttggttttatatttagtttgtgatttattttgagtaaatatttttatatgttttaagttatagatttagatgtatttttgtatatggcgatttagttatttttttttttattgagttgtttttgtatttttgtaaaatattaattgattgtatatatgtgggtttatttttgagtttttttttttgttttattgatttgtttgtttgttatgatagaatattattttgttttgattattatagttttataataagttttagagttagattagaaaagtttttttatattttatatttttttattaatttttatttttgtgttttatttttatttttcgttttttattatcgtttatagtagtttttttaatgtgttaatgtgtatttttgtttgtataggtttttgtaaaatgtgtggtgttgtttcgtttatgtgtatttttaaatttatgtaaatggtattatgtaaatatattatattttttagtttgttttttataaaatagagtatttagtggaaaattaagatttatttatgttgttatatgtatatttaatttgtagtttttaattgtagtttagtattttgtaatgagaatttgttatgggttttttgttttattagtgatggatatttaggttttttttaattttttgttgttattattattttttaagttcgtgagtatgtgggtatataaatatatacgtatatagagttaaataataatgttgttgtagtgaatatttttaattgttttttgggttgtgggtagttttttaggtaatttaagtatatttatattttataaatttagtaattttttttatgggtgtgtattttaaaatagttttagatgatgtttaggatggggatattagtttttatttttttttgtatggtgtgagggggtattatttttatatgtattttatatatatatatttatattttttattagttagttttttatttttttgttaggttaatagttataaaatgagagtttgttgtgatgtaggattttttttgatttttttgttgaggttgtagtagggagtgttttatttatttagtttgttaggttttatttggtttgtgttatagtttatggtttataaggttattgcgattgtatgtttagtttttggcgggagggagtatgtgatcgagtgaatgtagggtttagttagttgtattgagttatgatataggaataggttttgtgtggggtttatagttagattaggtgtgttattttaaggagattgtggtagtatttaggtaggggtgtttgaagttttagagaggggtgttatagtgtgttaaatagtttttttatttttattatttgtagtttgatggatagcggtatgttggtagtttaggcggtttttttttttattttggttcgtggtttttggattagtttggttttgttgtagtttttgttttgtggggtagttgttttttattagtgagggtagagggttagcgttatagtttttgtgggtgtttatatttggtgggttttgagtttttgttttgtatttaagaagaatgaggttatgttgatagttgaagggtgatgaggatggagaattttattgacgatgaaatagtttttagtggagagggattgagaaggtggggttgtttattttagtgtggttgagtttagggggttttataggtataggattggggaggggcgggttgtaggtagtattagaaaaggtaatatttgattggttaaaaagtattatttagaaagaattaattaggaaagggtgggtaaataggaatagaagtttttattttggtttgaggggttttattttaaattagtagtttaggttgtttttggtttgaaggtggggttttattggggatttatttttatttgtttaggaaattgtttgttttttgtcgtttttaattgttttattttatattgttttttgatgattaatgattttgagaatttttttatatgtttgttattatttgggggttattatttgtgaattgttttttaatattttttgttaatttttgagaatttttagtgttttttttttttagttggtttgtgggtgtttatataaaatttagatattaattgtttgttagttttgatattgtaaatatttttttttattttgttatttgtatattgattttttgtatgagatttatgatgtttgtgggtagaaattttatattttggtgtaataagatttattttttttttttttgttttataattttgtgtatttgaaaatttatttgataagttttttttttattttgttataaaaatatattttttttttttttgttaattttatagttagatagatttaagatttaaatgtgaaaggttttttttggtatgtagtgttaggtaggatgttagtttttaaagatagtttttaatgaattatgatttttaatatttatattttgtatagtttttatttatgttgaatttgggatggtttagtatgattagttaaatatggtagaaatgttattatgtgattttgttttgatatagtgttttgttttgtcgtttaggttggagtgtagtggtgtaattatagtttattgtagttttgattttttgggtttaagtgatttttttgttttagtttttttaggtagttattatgtttggataatgttttaaattttttatagagataggatatttttatgttgttaggttggttttaaatttttgggtttaaatgttgggttttggttttttaagtgtgggattttaggtgtgagttattatatttagttataatttttaagattaagttaaagaaattttgggaattgttaattattttttagttacgtgagtgagatttttggatgtttagatttgttaaatttttagatgattttagttttaggagatatttgattttaattttacgtgaggttttaagtgagattagttaattcgtggaagtatgagaaattataatttttgttttaagttatttagtatgatgatttgttttgtagtaataggaataaatggtaggaataaaatttggtgtttgaaagtggaatgttgttataaaagtaatttaaaatgtgtagcgttaggttgagaatgggtggtgagagacggtggaaggaaagatttaaggatagtaagaagtatttattttttatttaggaggtagaaagttttgttattatatttaataatgagaaaagattgtatgtattataaagttattattttttttgagtttattagggaggtgagtttatagggtaattaagtattttgaattttaagggggtaggtttttttaaggagaggtaggatgtgtagtttggtttatttgggtagtgtttggaggaaggggtagtttttattaaagtgggtaagaagaaagaaattagtttagttttaataaattgttggaagttaggtgtgggttggcgtgtcggtttgagatagtagggggtttagataaggtgagagtttgtatatattaattgttttttttttgtgtatgtttttagagtgtttattcggtgagggagtggggaaggatgagggaaggagagggatttatttagtagtgtgggggttgaaggggttgtttttgttgtgg

SEQ ID NO: 1405 - DNA, 17527 bp, Artificial Sequence
  chemically treated genomic DNA (Homo sapiens)
ggaattagaatagtcggtttatttattttattattttattattatatatttttaaaggattttttagatattttgtaagaaataatgaaatttatttttattttataattttaaatagattttttggtagtagtgattttttaaaatcgttaaggtttagttttttttattgttgaaaaaggaggattttgtatttttttaggggaagagtgttgtttttatattaattagtcggggatagtatgaggtgtcgtttagtatttataggaaaaggtttttgaaattagatgttttttaaatttttatattaatttttggagttgggtaatatggttttttttttttttaggttttgtggtagttattttgttgttattcgtttttgggttttgtatttttaatttttttgttaaatttgttttttttagaatcgaggttattaagttatagatggttttataaatggatttttaaattagtttaattaataatttttatcgaggatttttggattgattcgttggtagtttttttggtttagagattttttttttggaggatattataattgtagggttttattatcgtttttatatagtaggaagtagttagagcggttattggttaaatttttaatagtagttggggtgttttgtttagaggggggattgagaggtgatagtttgttggtagtttttatagttttcgttcgtttttagtattttttttgtttgggtttttattttggcggtatttgaggagttttttagtttattattgaaatatttttaaataaggaagaggaataggttatgatttaatgtttgtttggattagtataagtatgttagggtaaatatttatgttaaattgtgggagttaggaatataaagtatattgatttattaaagttagtagatatttaagaatgttagtataggtttttgaataaattttgtttttaagagaagttattatttatttttaattagatggggaggaaagtttttgaagaagaatttttattttatttttttttttttttttttgagatagagttttttttagttatttaggttggggtgtagtagcgcgatttcggtttattgtaagtttcgtttttcgggtttacgttatttttttgttttagtttttcgagtagttgggattataggtgttcgttattatgtttggttaatttttttgtatttttagtagagatggggttttatcgtgttagttaggatggtttcgattttttgatttcgtgattcgtttatttcggttttttaaagtgttgggattataggcgtgagttattgcgttcggattaatttttgtatttttagtagagatagggtttttttatgttggttaggttggttttaaatttttgttttaaggtgatttgtttatttgggatttttaaagtgttggggtgagaggtgtgagttatcgtgtttggttatttttgatattgttaatgtatgtttttattttgaaaaaggttttttgttgtttatttatttatttttgagatagagttttattttgttgtttaggttggagtgtattggtataattttggtttattgtaattttcgttttttggtttgaagatttttttgttttagttttttgagtagttgggattataggtacgtgttattatgtttggttaattttcgtattttttgtagagttggggttttattatgtcggttaggttggttttaaatttttgatattaggtgatttgtttatttcggttttataaattgttgtgattataggtataagttattgtgtttggtttaattgttttttattaatattgtattaggttgggaagattaattgttttagtaatttttaaattttaatggtgtaagaaaataaaaattttattttttgtttatgttatagttcggtgtaggatagtgagaaggatttgtttttttttgttattggagatttaggttgtttttgtgtagtgtttagaaaagttttagtagttgagaggtgaaaaggtgtggaggattgtatggaaggttttataagttaagtttaggggttgttgaattttatgtttttttatattttattggttagaaattaggtatagtattatatcgaattggaaaggaggttaggatatgttgtttaataggatgtttcgagtagtgtatttagaagaatgaataggtttggagatagtttaagtttgttgtgtttttaatttttttgggggtattttttttataatttataatttttttttttttttttttgagatggagttttggtttgtcgtttaggttggagtgtaatggtgtagttttagtttattgaaatttttgtttttcgggtttaagtgatttttttgttttagtttatcgagtagttgggattataggggtttattattatgtttggttaatgtttgtatttttagtagagatggggttttattatgttggttatgttggtttcgaagtgttgatttcgtgatttgttcgtttcggttttttaaagtgttgggattataggcgtgagttattgttttcggttataatttataattttaaatggaaaaggtaaagataaatattagttttttattagtaaggatatatatgtagttgttgtaataaaggtaaaataaaaaaatataatgtaataatttaaataagatatagtattttttttgtttgtataaaaatttgaataaagtattttagggttgacgtggcggttttatagaattaggtattaaaggtttttggtatattgttttgttttttcgattatttaattttttttttattatttgagatgataattttatttttattgtagtgtttatattttggtaaattggaaagaggagaagggtaagtggaaagtaagtttttttttttaaaggtataatttaaaagttgtttatgttatttgtgtttatgttttattggttaaaatttagtaattaaattttggtaagtatttttgttgtagtgggagttgggaaatgtagatttttgtttaggtaagaaagaagagggtatggagggtatagtttttatattttagattttagttatggcgttatatttcgttgtaagggaggttagttattgtagtttttcgttgggtggttatgtatttagttagattttaggggtatttttattaaagtaatgtatggagaatggatagtatgagaagtagtttttgttataagtgttttttataaaaagaatttttataagaaaaataaatagggtttaaggaaaattaatttaaagggtaaaatatggggaaaagataaaaaataaaagaaaaaagaaaagtaagttttttaggtagaaaatgaatgaagattgaggtatataagtgagaagttttgtaaaattgataattttttttattttgttataaaagtttttatttatattttaaaattttattaaatgttatttttttgatatttttattttatttttttttttttgggtatttattatgttgtagtgtattttaggttatttttagttttgtaatttttttaaggtgattttgtaggagatgtaaagtagttaagaggagaatttttaatattgatgtgtttataggtgaggtggtttgatgttttagatttgttttaaaatatttttgtataaaataaaaaggggaatagatgaaataagattgataaaatgttgatttattgacgcggtgtaatgggtatttgggtgattatagtataattttattttttttgtatatattttaaaatttttataatatagtaaaatatgagtttagttttttaaggtagttagatttgggtttaaattttagtttgattttttattcgttgagtgattttattttgttatagttttagtttttttaaatggaaataatatatattttattaaggtttttgtaaatttttaagtaagagggaatttgaggttttagtatacggttcggtttttaatagttgtattaatttttattttatttttcgaaacggagtttgttttgttatttaggttggagtgtagtggtatgattcggtttattgtaatttttatttttagggtttaagtaatttttttgttttagttttttttcgagtaattgggattataggagtgcgttattacgtttagttaatttttgtattttttagtagagacggggtttcggtatgttgtttaggttggtttttaatttttgattttaggttattttttcgtttcggttttttagagtgttgggattataggcgtgagttattgcgtttggttagtagttgtattaataagggtttttgtttgcgagtaataaagattgattttagttgtggttaattttttttatatatatatattaagtgttagaggtaggatttgagttcggatttttgatttttagatttagaattttttatgtgttattatagtcgttaaaaattttatttggatttgtgttttgtaatttacgttttcgaatatgtaggaatgtagtttgggtatttgtttggaatttcggattttcgggattttagggtggttaaggcgcggaggtgatttaatgatattgatcggtttggatgtacgtgggttgttgagtcgatgttgggaaggtacggggtttgttcggtgtaggtcgtcggaatttacgtacgtttttgttttttttatttttggggtcggttttggtcggtggtttttagtttagttagcggtcggacgcgtagttcgtcgattagttttttaggttttagcgcgattttcggatttcggattcggcggatttggtcgattatttattttttttttttcgtaagttagggggcggggtatcgggtttttggttcgtgatttgtcggagtttttgcgttttttttttttatttttttcggttgtgtgagaggttagtagaggggcggtttgcggggataataatggcggggttttgggtcgggatagtatcgttggtcgttgtcggacggcgtgggcggtggtcgtcgtagtagttgatgttgagcgcggcgttgcggattttgaaggtgaggagtaacggggtttcgcgggttcgggttttattgggtttttagtcgtgtcgtttttgggcggttggcgtcgggagagcgttggttgggttcggttgttttcgcgtttcggtttcgtattagttatatcgtttgtttttttttttttcggagttcgcgtggtagcgggtttaggaggtatttttcgttgtagttgtttttcgcggggattttgcggagtagagaggtttagggtagaggtagttgggtgttcgtacgtttttcgaggcggttgatggttttgggtaggtatattgttcgaggtttgtttttagggtttcgcggtattggttttgttttaagttttttagggtgtttttttaggtgtttttatagttttcgtgttttgttgtttttttttagtatttttgaagggatattgtgaattgttgtttaagtagtgttagggttgtgagtttgttttattttttaaagtattatattatgttaggattgttaatagattttacgttttatttgaaagtttgttttaattgtatgatattttagtttattgtgtattaaatgtatttcgtgaatttattttttttttcggtatagtggtgagtttgattttggtattgttttaaatatattttatgattgttttgtatatttaggttgttatgatggtagattgataaataggttggagtgtttgtgtgtgtttttgagttttgtttttagttaatgtcgagtttgtcgttaattttggggtatagattatttaatttattttataaggtttgttgaggtatttgaatatattttttaaaatgaaggttttttgaaaattatttgttagttggtttagtgtgtttgttaaatttttttttaaaaaataattattaattggttttttttttttaatgtgttggtagagattgtattttgtttatttttgtgtttttagtataatgtttgatataataggtgttgaatgtgtaataatagagtagtattatgtttgtgtcggtaaagaatttttttttggggtgggaagtatttttgaagtttattattattttaggggaatttgagttgttgtttagtttttttttgcgttttttttttatgaatttgaaatatgttttattgagtttgtttgaagttgaattttttgaagattttaattttttttatttttttttttatttttgtaaattttttggttggttgaaaagtagttagttaattttagggtttagtttagagaattttgattatttttttagttagttaatagagtttatttatttttagggtatatgtagagtttattttttagttttatttgttttgtgtattagttttttaagtatattttgttttaatgtttagtttttttttttgcgtaaatgtttttagtggttttaggatgttggttttatggtaattgttatagttattattgaatttttatatgttttgtatgatttttttttgtttttttttttttttgagatggggtttcgttttgttgttaggttggagtgtagtggcgcgattttagtttattgtaatttttattttttgggtttaagtgatttttttgttttagttttttaagtggttgggattataggcgtacgttattattatcggttaatttttttttgtattttagtagagatggggttttattatgttggttatttcgattttttgattttttgatttattgttttggttttttaaagtgtttggaattataggtatgagttatcgagtttaatggtgtgattttttatatattttttatttttataataattaggtaaaaaattttaattttatagtagaggaaataaagtttagggtagttaagtagttgtttaaaagtataattggttgaagtagaatttgaattttagataatatgattttgaaggttttttttttttttttttttttttttttttgagatggggtttggttttgttggttaggttggagtgtagtggtatgattttggtttattgtagtttttgttttttgggtttaagttatttttttattttagttttttaagtaggtgggattataggtacgtacgattatatttggttattttttaattttaatttttattttttgtagagatggggttttgttatgttgtttaggttggttttaaatttttgaatttaagtaatttatttattttagtttgtttttttaattataaattgttttatttgaattatggttttattgtgtgatgtatttatgaaatttgaatgtttaagttttgtgttatttgatatttattatttttttttgtaattagtaaatatggaaaagaatgtttaggtttatatgaatgttttagaattgtttggaggttaatgtttttaatatgttgataaatttttgataaattatttgggaaaagaaatttttgagattattatagaaattagtttttggtgtaaaaaaatgtttatagatatttatatatttatatatttattatttggattttattttgtttttgagaggtttagaatagaggtaaaaattgttttagtttttttttaagaggaaaagatgtgatatttttgatgaagagtgagggaaaaggatttgtttaaatgattttaaattttaaaaaatgtaggtgggagaataaggatgaaaaaggaatttgggaagaaatatttttttggtggggttggaaatatagtgttttattgtaggtatttggagttagatgttcgtaggagttatgttgaggtgttgggtattagtggttggtttttgggttagggatacgaggttagagttagagttagaattgtgagttttgacggatatagtgagttagttaatatttaattgaataaatgtttcgttttataattttaaattaggatttggaagaaggaagaagagataagaggagttagaggtatggtttgagaggagttaatgtagtgtagtgttattaaatttaggaaagaaattttaagaagtagttagtatttatttatttatttgtttagagatttagttttttatttagaaagtgtttgtggagtattttttaagttttaggtattatggtacgtatagaggagagaaaaagaaattaaaatatattttttaattatgttttaggtgtagagaggttaaggaataaaagattgatgaggttaggtgtggtagtttacgtttgtaattttaattttttgggaggttaaagtgggaggattttttgagtttaggagtttgagattagtttaggtaatataatgatattatttttattttcggttatttttataaaataaaataaaataaaataaaaattagttgggtgtggtggtacgtgtttgtggttttaggtatttgggaggttgaggagggaggattatttgagtttaggaggttaaggttgtagtgagttgtgattatattaatgtattatagtttgggtgatatagtaagattttgttttaaaaaaaagtttgggtacgatggtttatgtttgtaattttagtattttgggaggtcgaggtaggtagattatttgaggtcgggagtttaagattagtttgattaatatggagaaatttcgtttttattaaaaatataaaattagtcgggtatggtggcgtatgtttgtaattttagttatttgggaggttgaggtaggagaattatttgaatttaggaggtggaggttgtagtgagtcgagattgtattattgtattttagtttgggtaataagagcgaaaatttgttttaaaaaaaaaaaaaaaaaaaaaagattggtgaaagaatttgaaaagatttttgatttttaatgagaataattttagtagtatggtaaagtgttatatataaaaaatattgtttttgataatatttttgaatagttgaagtaaaattatattttttgaaagataagtatattgtataatttttaaaaattagtttttttattttaaatgtttattgatattttcgttagaaaaaattttataaattgatgggattaatttaataagattaaaataaaagtgaatttaaagaatgttggaagatatagttttgtgattttatttataaaatttaatatagtatttatgtggtatattttttttggtattgtttgtttgtttttgagatagagttttatgttgtttaggttggagtttagtggtgtgattttcgtttacggtaattttcgttttcggggtttaagtgatttttttgttttagttttttgagtagttgggattataggtatgtgttattatgtttagttaatttttatatttttagtagagacggggttttattatgtcggtttggttggttttgaatttttgattttaattgattcgtttgtttcggttttttaaagtgttgggattatagatgtgagttatcgtgtttgttttttttttggtattatttatttaagaaatttttggttttttagagttgttgtataaatgattatggatttggtggtttaaaataataaatttatttttttatagtattaaaggtttgaagtttgaaattaaggtatgagtagggttatgtttcgtttgaaggttttaggggagaatttttttttgtttttttgagtttttggtggttgtatttattttttggtttgtggttgtattattttagtttttgtttttgtttttatatggttgtttttttttttttttttttgtgcgttttttttttttatttttttataaagatattttttattggatttagggttatgataagatttaggatgattttattttaagattttttattttgttgtattggtaaagatattttattataggttttaggacgtggatatattattttaggggttatcgtttaatttatttatacgtagtatgtgttagatattatttagagttgggaatataattgtgattgtttttgtttttattgtggttatatttgagtaaggagattgtgttcgtataaatagaaaagtttagagagtgagaagtgttttcgaaggaaaaagataggttaatgggatagagagtggtagtggtgttgagttggggatgttatttaatgagattatgggggatatttttgagtatgtggtatttggataggaaattgagttagttagttatgtgattatatgggggtttagtattgtagattaaggagtgttagggtaaaagttttgaggggagattgtatttggtataattaagggatgaatgtggttgttgtggttggagtgaattgaatgagggggtgattttaggagatgagggaggaggagtgggtaggcgggatagagttattaggggtttgtatttggaatttagtaatgagagtttagttggaggtatttaagtatattgaatttatgtttggaaaagacgtttgtgattagtacgtagcgaatgttttagtaggggtgggagtaggattggggattggggtgggaagagtggaaatagagagatttattaggaagttgttgtagaagattaagttagagatgatggtaatttgtgttagggtattggagttgttgagaattggttagatttggaatgtattttggagttagagttagtattttgttgtggggtttgaaggtagatatagatgtattttatattttggttttattgattttgtagatattgttttttttttgttgtttttatagattgagggtttgtggtaattttgttttgagtaattgtattggtgttatttttttaatagtatatatttatttggtgtttttgtgaaatattttgataatttttttattattattatgtttgttatggtgatttgtgattagtgattttcgatatttttattgtaaatattttggggtgtcgtgaattacgtttatataagttggagaaatataattgataaatgtgtgagttttgatttttttaagtagttatttttttatgtttttttttttttttaggtttttttaattttttgagatataataatattgaaattaggttaattaataattttttaagcgttttagtgaaaggaagagttatatattttttattttgaattaaaaattagaaattattaagtttagtgaggaaggtttgttaaaagttaagatagattgaaagttgggttttttgtgttaaattgtaaatgtaaaggaaaagttttggaaggaaattagaagtgttattttagtgagcgtataattgattaaaaaaagtgaaatagttttattgttgatatggcgaaagttttagtggtttggatagaagattaaattagttataatatttttttaagttatagtttaatttagcgtaaggttttcgttttagttttgcgaaggttgagagaggtgaggatgttgtagaagaaaatttggaagtagaggttggtttatggggtttaagaaaagaagtgaggtcgggcgtagtggtttatatttgtaattttagtattttgggaggtcgaggcgagtggattataaggttaagagattgagattattttggttaatatggtgaaggattagatgattgttagtatttttgagtaataattgttttgaataataattaattggatttgaatttatagtatttgtaaggtatgtataaatagggaaaggaaggaattaagagtgatttttgaagggtagatatataaggtcgttattgtgtgattttgtgtttatatgtagtttttagaatagattgatttatgaagatagaaagtagattagtggttgtttagggtttggaggagaggggatgggagtgattgcgaatagttaagggttgtttttttggggtgataaaaaatgttttggaattagtagttattatggttttatgttttgtggatatattaaaaattacggagttgtatatttttttaaaagggtgaattttatggtatgtgaattatattttaattaaaaaataaaagaatggttcgggtgtagtggtttatatttgtaattttagtattttgggaggtcgaggtaggtggattatttgaggtcgggagttcgagattagtttgattaatatgaagaaattttatttttattaaaaatataaaattagttaggtatggtggtatatgtttgtaattttagttattcgggaggttgagacgggagaattgtttgaatttgggaggtagaggttgtagtgagttaagatggtattattgtattttagtttggcgatagagtgagatttcgttttaaaaaataaataaatataaattttcgaatatttatgttaataaagtaaagtaaagaggttaaggtgggaggattatttgaggttagtagtttaagattagtttggggaaaatagtgagaattttttagtcgtttagtttttataaaaaataaaaaaattagtggggtatggtgatatgtatttatagttttagttatttaggaggttgaggtgggaggattgtttgaatgtaggagtttaaggttgtagtgagttatgattttattattatattttagtttgggtaatatagtgagattttgttttaaaaaaaaaaagtataatgaagttaggtgtggtggtagggatgtgtagttttagttatttaggaggttgaggtgggaagattatttaagtttaggagttagaggttgttatgggttataattgtgtttgtgagtagttattgtagtttagtttgggtaaatatagtgagatttttattttttaaaaaaataaaaaaagtaaaataaggtgaaattaatatattttatttaatatatttaaatatttaaagtattatttgaatatgtaaatgtaaaaatttattaatgaggttttttatattttttgggtattaagtttttaaaatttagtgtgtagtttatttttagagtatatttgaatgtggttcgtggttgttatattggatggaatagttttagggtatagattgtgttattaattaagttttattttgaggtgttgggattggttttttgaatgtagtgttagttagtttttggttaggtagggtcgggggagtttttaggtttgatggagagttgtatagttgaggaatatggtcgagatgagggtgtaggtgtgagtcgttagttgttaatatagtagttagagaggatttgagtggttattgataatatttgttatagcgggatggggaagaatggtttggcggaagagttaagggtgggatgatggagttttagagttgatatgtatagttttttggtgtttgagtttagtatagaggtagagtttagagaattttgagttttgaatattttttttaaatattaggtgtttaatttggtttttggtagatattgaagattggaatggtttttaagattttgaagattaaatagtttatttgaaagaaaagttgtgtttttaggaaaaagttagatttaattaagtgtttttagagaagggtatgggttttgttataatgtatgatgaaatatcgtgttataatatatggataagatttttatttggaattttagagatgaagtaagatgaagtaaattaatgtttattttgattttggtgagattattttatagttttattaatttagttttgaggatagttttttttttgaagtagaatgtattttgataatgaatttattttataatgagttatttagtattatttatttgaatgttattgcgggtatgttaataatagtagttttggttttggtagaaatagtgtttagattgttttttaagatatttgttagtggatttattagttttaattgttacgtgaggttatattttgtttatgaaagtaggtgttatttaattttttttttttttttttttttgagatggagttttgttttgttatttagattggagtgtagtggcgtgatttcggtttattataatttttgtttttcgggtttacgttattttttcgttttagtttttcgagtagttgggattataggcgtttgttattatattcggttaattttttgtatttttcgtagagatagggttttattgtgttagttaggatggttttaattttttgattttgtgatttatttgtttcggttttttaaagtgttgggattataggcgtgagttattgtgtttagttggtgttatttaattttaagaaaggatttttttttagttattgtaaataggatttgtttttttgtttgtagtggttggaaggtatgtatttagtttgtttaaaagtttattatttttttcgttttttgtgtaagttattgtgtgttgatgataatatatgtaagattgtgttagttatgttagatatttttatttaatttttatagtagtattatgatttagataagtattattattatttttagtgtataaatgaagaaattttttatatatttaggaaatgttagagttaagatttgaatttaggttagaatttgagtttagattagaatttttattgattatattattttttaatggtaatttttaagtggttttggtataattttaagaaagaaggtgatagttatatatttggatttagtttttatgtaaaattttatattttttggtattttattgtttataaaaatttatttgatttttttaataattttttaggaaattagggaggtgttattatttatattttgtagatggaaacgggggtttagagaaatgattagtttaatgatttatagttgagagttgatttaagttttgtgattttgagggttaatgttattttttatgtgttaagttatttttaggtattttttttttatgtgtggaaaatataggaaattattatttttgtgggagagaattagtggtaatatgttattggggagttattttgtatacgttgattttttttattttggttgtgattggttagtttttataaatagaattgattaaagtttttttttagaatttttgttgttaggaaatattttataaagaattttggattgggcgtgtagttagtttgttatatgtttaataaaaataataaacgttaaaattttgtgtagaggtttaaattagtagatttttttaaacgtttttttttatttagaaaataaattttatgttgtggttttatataaatggtttgagtgttgatttgattttttatttttgattttttatgaatgttttttaggaggaaataggaatagagtttttatggggtttattttaaattagtttagatttgtcgtgggaatggtttatattggtagttgttttgttatagttgtgtttgtttgtacgagttttatttttttttttttttttttttgttgagatagtgtttcgttttttttgtttaggttggagtgtaacggtataaatttggtttattgtaatttcggtttattgtaattttcgtttttcgggtttaagcgatttttttgttttagttattcgagtagttgggattacgggtatgtattattatgtttagttaattttgtatttttagtagagatggggtttttttatgttggttaggttggtttcgaatttttaattttaagtgatttgttcgttttagttttttaaagtgttgggattataggtatgagttatcgtgttcggttcgagttttatttttagttattgggtaatcgggaggtatttatgttttttatagttttaggttatattattataagtttatatgtgtgtaagttttgtggaataatattatatttttgagtagatattagtgtttatttgggaattgttattgttttttttatttagaaataaaaaattttagaaagtttttgattaatttgtggttaaattttataattattatagttttagtttgtgatttttgaaaagttaaagtttttgggatttaattttgttataaaattggggataatatttttgtaatttatagttatgtttgaaggaatatatgagagatagttttgatttttaatagggatatagtaataatttttcgtttatagtttttttttgtttttggttttttatttggtaaaggttttattttataaattatatttttttgtattttttatttttatttttatatagagattatattttttaaattaattaaataattaattaattttttttgaggagtttcgtttttgttgtttaggttggagtgtaatggtaggatttaggtttatagtaatttttattttttgggtttaagtaattttattttagttttttgagtagttgggattataggtgtgtgttattatgtttcgttaatttttttgtgtgtgtttttagtagagacgggatttcgttattttggttagtttggtcgtaaatttttgattttaggtgatttatttgttttgattttttaaagtgttaggattataggtatgagttatggtgttcgattttttaaaaaatagttgtataaattttttagtttatttaaaaatgttgttataagaatattttgttttttatttgagtcgttattattttagaaagttttaagaggtggtatttgttggttgttttttgttggttttttttttttatttttttttttttagttttaatagtgattattgggaagttttttttttgtttttgtttgtttttttgtatttttttattttttttttttttttttttttttttttttttttttagtggggttttgttttgttgtttaggttggagtatagtggtgtgattttggtttattgttattttaaattttggggtttaagtaatatttttatttttgttttttgagtagttgggattttaggttgtattatcgtgtttggtttagttattttttttaatgtttttaagtattaagatacgttttttttataaatagtttaatgaatgagaaatatttttgattattgatattgtttttttatatttattagttaaattatttttgtattagaaaatgtgaaataagaaattatgttgaagatattagtaaatataaaaagaatattttattatgttttggttattgttaaatttgaagttttttgagattaagattttcgttttgtgtttttaaaagttttgtgtggtttgtgatatttttgattttgttttatttttttgaatgattagaaaggttttttttaaatttgtttggtttttcgataatttttgttttgtttttttggagatcgttttgatgtttttggttttttttatatattaaggggttgtgtttgtagatatgattttttttttgtaattatatttatggtatattgtttagaattatatttattgattagatacgttcgttagaatttaattggaagaaatattttgaaaaaatgttttaaagtttattaagtatttgtaatttattttgtttttttttttttgtagt

SEQ ID NO: 1406 - DNA, 17527 bp, Artificial Sequence
  chemically treated genomic DNA (Homo sapiens)
gttataaaaaaaggaaagtaaaataaattgtaaatatttgatgggttttagaatatttttttaggatattttttttagttaggttttagcgaacgtgtttgattaataaatgtagttttaggtaatatattataaatataattataaaagggaaattatatttatagatatagttttttggtatgtaagagaaattaaaagtattaaaacgatttttagaaaagtaaaataagaattgtcgaggggttaagtaaatttgaagaaagtttttttgattatttaaaaggatagagtagggttagaaatgttatagattatatagaatttttaaaaatataaaacgagagttttggttttaaggagttttaaatttaatagtggttagaatataataaaatattttttttatatttgttgatgtttttagtatgattttttattttatattttttggtatagaagtggtttggttgataaatatgaaaaagtaatattagtaattaaggatattttttatttattgaattgtttgtgaagaaagcgtattttaatgtttaaaaatattaagaaaagtgattaagttaggtacggtggtatagtttggaattttagttatttaggaggtagaggtgggagtattatttgagttttagagtttgaggtggtagtgagttaagattatattattgtattttagtttaggtaatagagtaagattttattgaaaagagagaaaagaaaggagaaaaagaaaagagatagagagatatagagagatagatagagatagagagagaattttttagtagttattgttaaagttagaaggaaaaaaatggaggaaaaaaattagtaaaaggtaattaataggtattattttttagaattttttaagatgataacgatttaaataagaaataaaatgtttttatagtaatatttttaaatgaattgaaaaatttgtataattattttttaaagagtcgggtattatggtttatgtttgtaattttagtattttgggaggttaaggtaggtggattatttgaggttaggagtttgcgattagattggttaaaatggcgaaatttcgtttttattaaaaatatatataaaaaaattagcggggtatggtggtatatatttgtagttttagttatttaggaggttgaggtagaattgtttgaatttaggaggtggaggttgttgtgagtttagattttgttattgtattttagtttgggtaataagagcgaaattttttagaaaaaattaattaattatttaattaatttaaaaaatgtaatttttgtataaaagtggaggtaaaagatataaaaagatatagtttataaaataaaatttttattaagtaaaagattaagaataagaaggaattgtgaacgggaaattattattgtgtttttattaaagattaagattattttttatatatttttttaagtataattgtgagttataagagtattatttttaattttatgataaagttgagttttaaggattttaattttttaaaggttataggttgaggttgtaatggttataagatttaattatagattggttaagagttttttgaaattttttatttttagataagaaaaatagtggtaatttttagataaatattaatatttatttaaagatatgatattgttttatagagtttgtatatatgtgaatttgtaataatgtggtttaaagttgtaaaaagtatagatgtttttcggttatttagtaattagaagtagaattcgggtcgggtacggtggtttatgtttgtaattttaatattttgggaggttgaggcgggtagattatttgaggttgggagttcgagattagtttgattaatatggagaaattttatttttattaaaaatataaaattagttgggtatggtggtgtatgttcgtaattttagttattcggatggttgaggtaggagaatcgtttgaattcgggaggcggaggttgtagtgagtcgaggttgtagtgagttaagtttgtatcgttgtattttagtttgggtaaaaagagcgaaatattgttttaataaaaaaaaaaaaaagaagaagtagaattcgtataagtaaatataattataatagaataattattaatgtgaattatttttacgataagtttgaattggtttggaatgagttttataaaggttttgtttttgtttttttttgggagatatttatggaaggttaaaaatgaagaattaggttaatatttagattatttgtgtaaagttataatataaagtttattttttaaatgaaggaaaacgtttgaagaagtttgttaatttggatttttatatagaattttaacgtttgttgtttttgttaagtatgtaataaattggttatacgtttagtttaaaattttttgtaaggtattttttagtaataaaggttttgagaaagaattttaattaattttgtttataaaggttagttaattatagttaaaatgagagaggttagcgtgtgtaaaatgattttttagtaatatattgttattggtttttttttataggaataatgattttttgtattttttatatatagaaaagaaatgtttgaaaatggtttggtatataggaagtggtattgatttttagagttataagatttgggttaatttttagttgtgagttattgagttaattatttttttgggttttcgtttttatttataaaatgtaggtgatgatatttttttgattttttagggagttattaaaaggattaaatgagtttttataaatagtaaagtgttaaaaaatgtaaggttttatatgaaaattaaatttaaatatgtaattgttatttttttttttaaaattatattagaattatttgggaattattattagagaataatatagttaataagagttttggtttagatttagattttgatttggatttaaattttggttttgatattttttagatatatagaaagtttttttatttgtatattggggataataatagtatttatttaggttataatgttgttatgaggattaaatgagaatgtttaatatggttagtatagttttgtatatattattattagtatataataatttatataaaaagcgggggaaatggtaggtttttagataaattggatgtatgttttttagttattgtaaatagggaaataaattttgtttgtagtggttggaaaaaaatttttttttaagattagatagtattagttgggtatagtggtttacgtttgtaattttagtattttgagaggtcgaggtaggtggattataaggttaggagattgagattattttggttaatatagtgaaattttgtttttacgaaaaatataaaaaattagtcgggtgtggtggtaggcgtttgtagttttagttattcgggagattgaggcgggagaatggcgtgaattcgggaggtagaggttgtagtgagtcgagattacgttattgtattttagtttgggtgatagagtaagattttattttaaaaaaaaaaaaaaaaaaaagattagatagtatttatttttataagtaagatgtggttttacgtggtagttaaaattggtaaatttattggtaaatattttaaagaataatttgaatattatttttgttaaaattaaaattattgttgttaatatattcgtagtagtatttagatgaataatattaaataatttattatgagataaatttattattagaatgtattttgttttaaagaagaaattatttttaaaattgggttaatggagttataaaatgattttattaaggttaaagtaaatattagtttattttattttgttttatttttaaaattttaggtgaaggttttatttatgtattatgatacggtattttattatgtattgtaatagagtttatgtttttttttgaagatatttaattaggtttggtttttttttggaagtatagttttttttttaaatagattatttagtttttaggattttagagattattttaatttttagtgtttgttaaaagttaagttgaatatttaatatttgagagagatgtttaagatttaagattttttgggttttgtttttgtattaagtttaagtattaggaaattatatatgttaattttagagttttattattttatttttgattttttcgttaggttatttttttttatttcgttgtagtagatgttgttagtggttatttagattttttttaattgttgtgttgataattaacggtttatatttgtatttttatttcgattatgttttttaattatatagttttttattaagtttgagagttttttcgattttgtttggttaagggttgattaatattgtatttaaaaggttagttttagtattttaaggtgggatttgattagtagtataatttgtgttttagagttgttttatttaatatggtagttacgagttatatttagatgtgttttaagagtaaattatatattggattttgaaaatttagtatttagaaaatgtaaaagattttattagtgaatttttatatttatatatttaaataatattttgaatatttgaatatattaagtaaaatatattaattttattttattttattttttttgtttttttaagagatgggggttttattatgtttgtttaggttggattgtagtgattatttataggtataattatagtttatggtagtttttaatttttaggtttaaatgatttttttattttagttttttaagtagttgagattatatatttttgttattatatttagttttattgtattttttttttttgagataggattttattatgttgtttagattgaagtgtagtgataggattatagtttattgtagttttgaatttttgtatttaagtaatttttttattttagttttttgaatagttgggattatggatgtatgttattatgttttattaatttttttattttttgtagagattgggcggttggggggtttttattattttttttaggttggttttgaattgttggttttaagtgatttttttattttggtttttttgttttattttgttaatataagtattcgaagatttgtgtttgtttgttttttgagacggagttttattttgtcgttaggttggagtgtagtggtgttattttggtttattgtaatttttgttttttaggtttaagtaattttttcgttttagtttttcgagtagttgggattataggtatgtgttattatgtttggttaattttgtatttttagtagagatggggtttttttatgttggttaggttggtttcgaattttcgattttaggtgatttatttgtttcggttttttaaagtgttgggattataggtgtgagttattgtattcggattatttttttattttttaattgagatgtaatttatatattataaaatttatttttttaaaaaagtatataatttcgtggtttttagtatatttataaggtatggaattatgatggttattgattttaggatattttttattattttaaaaagataatttttaattattcgtagttatttttatttttttttttttaggttttgggtaattattaatttattttttgtttttatggattagtttattttggagattgtatataaatataaaattatataatagcgattttgtgtgtttattttttaaaagttatttttaatttttttttttttttgtttgtatatattttatagatattgtaggtttaggtttaattaattattgtttaaaatagttattgtttaaaaatgttaataattatttgattttttattatgttagttagaatggttttaattttttgattttgtgatttattcgtttcggttttttaaagtattgggattataggtgtgaattattgcgttcggttttatttttttttttaaattttatgaattaatttttgtttttaagtttttttttgtagtatttttattttttttagttttcgtagaattgaagcgaggattttgcgttggattaggttatggtttaaggaaatgttgtggttggtttgattttttatttaaattattaaagttttcgttatattagtaataaagttgttttattttttttaattagttgtgcgtttattggagtagtatttttaatttttttttagaattttttttttgtatttataatttggtataagaggtttaatttttagtttattttggtttttgataggttttttttattaagtttaatgatttttagtttttgatttaaagtgagagatgtgtgatttttttttttattagaacgtttagaagattattaattggtttaattttaatattgttgtattttagagaattagggaagtttgaggagagggagagatataggggaataattgtttggagaagttaaaatttatatatttattaattatgtttttttaatttatatgggcgtggtttacggtattttaaaatatttataataagaatatcgaagattattgattatagattattataatagatatagtaataatgaaaaaattattaaaatgttttatagagatattaagtaagtatgtgttattggaaagatgatattaatatagttgtttaaagtagggttgttataaatttttaatttgtaaaaataataaaaaaaaagtagtatttgtagggttaataaagttaagatatgaggtatatttgtatttgtttttaaattttatagtaagatattggttttagttttaaaatatattttaagtttgattagtttttagtaattttagtgttttagtataagttattattatttttagtttggttttttataatagttttttgatgggtttttttgtttttattttttttattttagtttttaattttatttttatttttattaagatattcgttacgtattagttataaacgttttttttaaatataaatttaatgtgtttaaatgtttttaattggatttttattattaaattttaaatataagtttttgatgattttgtttcgtttatttatttttttttttttattttttaagattatttttttatttagtttattttaattatagtagttatatttattttttaattatgttaaatgtaatttttttttagagtttttgttttggtattttttggtttgtaatgttaggtttttatatagttatatggttggttggtttagttttttgtttaaatgttatatgtttagaaatgttttttatggttttattaggtaatatttttaatttagtattattattattttttattttattaatttatttttttttttcgagagtattttttattttttgaatttttttatttatacgagtatagtttttttatttaaatgtaattataatgggagtagaaatagttataattatatttttagttttaagtagtgtttgatatatattacgtgtaggtgaattgaacgatagtttttaaaatgatgtgtttacgttttggaatttgtgataaagtgtttttgttaatataataaagtgaaggattttgagatgaaattattttagattttgttatggttttaaatttaatgaaaagtgtttttataaaagaatgagagggaaagacgtataagaaggaggaggagaaggtagttatgtgaagatagaggtagagattggagtgatgtagttataagttaaggaatgaatgtagttattagaagtttaaagaggtaagaaaggatttttttttagagtttttaggcgaagtatggttttgtttatgttttgattttagattttaggtttttagtattgtgggagaatgaatttgttgttttaagttattaggtttatggttatttgtatagtagttttaggaaattaaaggttttttgaataaataatattaaagagagggtaggtacggtggtttatatttgtaattttagtattttgggaggtcgaggtaggcggattaattgaggttaagagtttaagattagttaggtcgatatggtgaaatttcgtttttattaaaaatataaaaattagttgggtatggtggtatatgtttgtaattttagttatttaggaggttgaggtaggagaattatttgaatttcggaggcggaggttgtcgtgagcggagattatattattgaattttagtttggataatatgagattttattttaaaaataaataaataatattaaagagagtatgttatatggatgttgtattaggttttgtgaatgaaattataaaattgtattttttaatattttttaaatttatttttattttgattttattaggttgattttattagtttgtggggttttttttaacgaaaatgttaataggtatttaaaataaagaaattaatttttgaaagttatgtaatatgtttattttttaaaaaatataattttgttttaattatttaagagtgttgttaaaagtagtattttttgtatataatattttattatgttattaaaattatttttattaaagattaaagatttttttaaatttttttattaattttttttttttttttttttttttgagatagattttcgtttttgttgtttaggttggagtgtagtggtgtaatttcggtttattgtaatttttattttttgggtttaagtgatttttttgttttagttttttaagtagttgagattataggtatgcgttattatgttcggttaattttgtatttttagtagagacgggatttttttatgttggttaggttggttttgaattttcgattttaggtgatttgtttgtttcggttttttaaagtgttgggattataggtatgagttatcgtgtttagatttttttttgagatagggttttgttgtgttatttaggttgtagtatattggtgtgattatagtttattgtagttttgattttttgggtttaagtgattttttttttttagttttttaagtatttagaattataggtacgtgttattatatttagttaatttttattttattttattttattttgtagagatagtcgggggtgggggtggtattattatgttgtttaggttggttttaaatttttgagtttaagaaatttttttattttggttttttaaagggttgagattgtaggcgtgagttattatatttggttttattaattttttattttttagtttttttgtatttgggatatagttagggaatatgttttaattttttttttttttttttgtacgtgttatagtatttggaatttagaaaatgttttataaatattttttgagtaaagagttagatttttagataaatgaatgaatgaatgttaattattttttgaaattttttttttaggtttggtaatattatattatattggttttttttaaattatatttttaattttttttgttttttttttttttttttaaattttaatttagggttataaaacgaagtatttatttaattaaatattaattgatttattatattcgttagggtttatagttttaattttaattttagtttcgtatttttggtttaaaagttagttattgatatttagtattttagtatggtttttgcgggtatttaattttagatatttataatgaaatattatgtttttagttttattaaaaaagtgtttttttttaaattttttttttatttttgtttttttatttatattttttaaagtttggaattatttaaataaattttttttttttattttttattaaaaatgttatattttttttttttagaaaaggattagagtagtttttatttttgttttgaattttttaggaatagaataaaatttaaatggtagatgtataaatatataaatgtttataaatatttttttatattagaaattagtttttgtaataattttagaaatttttttttttaaatgatttgttagaaatttattagtatgttggaaatattaatttttaggtaattttaaagtatttatataagtttaaatatttttttttatatttattgattataaaagaaaataatggatgttaagtaatatagggtttaaatatttaaattttatgaatgtattatataatgagattatgatttaaatgagataatttgtaattagaaaagtaagttgaggtgggtggattgtttgagtttaggagtttgagattagtttgggtaatatagtaaaattttatttttataaaaaataaaaattaaaattaaaaaatagttaggtgtggtcgtacgtgtttgtggttttatttatttgggaggttgagatgggaggatggtttgagtttaggaggtagaggttgtagtaggttaagattatgttattgtattttagtttggttaatagagttagattttattttaaaaaaaaaaaaggaagaaagaaaagaaagtttttagaattatattatttaaggtttaaattttattttagttaattgtgtttttaagtaattatttaattgttttgagttttgttttttttattgtaaaattgggattttttatttagttgttataaggataaaagatatatgaaaaattatattattgggttcggtggtttatgtttgtaattttaagtattttgggaggttaaggtagtggattaagaggttagaagatcgaggtggttaatatggtgaaattttatttttattaaaatataaaaaaaaattagtcggtggtggtggcgtgcgtttgtagttttagttatttgggaggttgaggtaagggaattatttgaatttaggaggtggaggttatagtgagttgagatcgcgttattgtattttagtttggtaatagagcgagattttattttaaaaaaaaagaaaagtaaagaaaaattatgtaaggtatataagagtttaataataattatagtaattattataaaattaatattttagagttattgaaaatatttacgtagaagaaaaaattaggtattaaaatagaatgtgtttaaaaagttgatatataaaataaataagattaaaaggtgaattttatatatattttaaaaataaataaattttgttgattggttaaaagaatggttagaattttttagattagattttagagttagttggttgttttttaattaattaaaaggtttgtagaggtggagggagggatgggaggggttaaaatttttaaaagatttagttttaaatagatttagtagagtatattttaagtttatagaagagaagcgtagagagaagttaagtagtagtttaagtttttttagagtgatagtgaattttagagatgttttttattttaaggaggaattttttatcggtataaatataatgttattttattgttatatatttagtatttattgtgttaaatattgtattaagaatatagaaatagataagatgtagtttttgttaatatattaaaaggaaaaaattagttaataattattttttaaaaggaagtttaataagtatattgaattagttgatagatggtttttaggggatttttattttaaagaatgtgtttaagtgttttaataaattttataaagtaggttaggtggtttgtgttttagaattaacgatagattcgatattgattggagatagagtttagaagtatatataagtattttaatttgtttgttaatttgttattatgatagtttaggtatatagaatagttatgaaatgtgtttagaatagtgttaaaattaggtttattattatatcgaaaaggaaagtaagtttacgggatgtatttggtatatagtagattggggtgttatataattaaaataggtttttaaatgaaacgtaaaatttattggtagttttgatatggtataatattttaaaagataagataaatttataattttaatattatttaagtaatagtttatagtgtttttttaaaaatgttggaaagaggtaatagaatacggaaattataaggatatttaaaaagatattttggaaagtttaagataaagttaatgtcgcggggttttggaagtagatttcgagtaatatgtttgtttaaagttattagtcgtttcggagggcgtgcgggtatttaattgtttttgttttaggtttttttgtttcgtaggattttcgcgaggaatagttgtaacgagggatgttttttgagttcgttgttacgcgaatttcgggagggaggaaagtaagcggtgtagttgatgcggaatcggggcgcgggggtagtcggatttagttagcgttttttcggcgttagtcgtttagaggcggtacggttagaagtttagtgaagttcggattcgcgaggtttcgttgttttttatttttagggttcgtagcgtcgcgtttagtattagttgttgcggcggttatcgtttacgtcgttcggtagcgattagcggtgttgtttcgatttagaatttcgttattgttgttttcgtagatcgtttttttgttgattttttatatagtcggagggggtggagaaggggagcgtaggagtttcggtaaattacgagttagaaattcgatgtttcgttttttaatttgcggaaaggggagggtgagtggtcggttagattcgtcggattcgggattcgggagtcgcgttaggatttggagggttagtcggcgggttgcgcgttcggtcgttagttgagttggaggttatcggttagagtcgattttaggagtgagagagataggggcgtgcgtgagtttcggcggtttgtatcgggtaaatttcgtatttttttagtatcggtttagtaatttacgtgtatttaggtcggttaatgttattgagttattttcgcgttttggttattttggagtttcgagaattcgaagttttagataaatgtttaaattatatttttgtatgttcgaaagcgtaaattgtaaagtataaatttaggtaaggtttttaacgattgtaataatatataaaaagttttaggtttggaaattagagattcgagtttaagttttatttttggtatttaatatgtgtgtgtgaaagaaattagttataattagagttagtttttgttgttcgtaagtagaaatttttgttagtataattattggttaggcgtagtggtttacgtttgtaattttagtattttgggaggtcgaggcgggaggataatttgaggttaggagttggagattagtttggataatatgtcgaaatttcgtttttattaaaaaatataaaaattagttgggcgtggtggcgtatttttgtaattttagttattcgggaggaggttgaggtaggagaattgtttgaattttggaggtggaggttgtagtgagtcggattatgttattatattttagtttgggtgatagagtaaatttcgtttcgaaaaataaaataaaaattagtataattattaagggtcgggtcgtgtgttagagttttagatttttttttatttgagagtttataagaattttaatggagtatatattatttttatttggagaaattgaagttgtagtagggtaaagttatttagcgagtaaaaggttaaattagggtttgaatttaaatttggttgttttgagggattgggtttatgttttgttatattatggaaattttaaaatatatataaaagagataaaattgtattatgattatttagatatttattatatcgcgttaatgaattaatattttgttaattttgttttatttatttttttttttattttgtgtaggaatattttaaagtaaatttaagatattagattattttatttataaatatattagtattgggggttttttttttaattattttgtattttttgtagagttattttgagagagttataaagttaggaatggtttagagtatattatagtatggtaaatgtttaaagagagagaaataaaatggggatattagaaaggtgatatttaatggaattttagaatgtaagtagggatttttgtgataaaatgaaaaggattattaattttataggattttttatttatgtattttagtttttatttattttttatttgggaaatttgtttttttttttttttttgttttttgttttttttttatgttttattttttggattagttttttttaggttttgtttgttttttttataggagttttttttatgaaaggtatttgtagtagaaattgttttttatgttatttattttttatgtattattttagtaagagtgtttttgagatttagttgggtatatggttatttagcgaaaggttgtaatagttagttttttttataacgaggtgtagcgttatgattaaggtttggaatgtaaggattgtgttttttatgttttttttttttttatttaaataaagatttatattttttaatttttattgtagtaagggtgtttattaagatttggttattaagttttggttaatgggatataagtataagtgatatagataatttttgggttatatttttaaagggaaaggtttgttttttatttgttttttttttttttttagtttgttagaatgtggatattatagtggaggtaaagttgttattttagatgataagaaggaagttaggtgatcggggagataaaataatatattaggagtttttagtgtttgattttgtggagtcgttacgttaattttggagtgttttgtttagatttttatgtaagtaagaaaaatattgtattttgtttaagttattgtattgtgtttttttgttttgtttttgttatagtagttatatgtgtgtttttattgatagaggattaatatttatttttgttttttttatttgaagttgtagattgtggtcgggagtagtggtttacgtttataattttagtattttgggaggtcgaggcggatagattacgaggttagtatttcgagattagtatggttaatatggtgaagttttatttttattaaaaatataaatattagttaggtatggtggtaggtttttgtaattttagttattcggtaggttgaggtaggagaattatttgaattcgggaggtagaggttttagtgagttgagattgtattattgtattttagtttgggcgatagattaagattttattttaaaaaaaaaaaaaaaaaagttatagattgtaaggaaaatatttttaaggaagttgaggatatagtagatttggattgtttttaaatttgtttatttttttgagtgtattgttcggagtattttattgggtagtatattttggttttttttttagttcgatgtggtattatatttgatttttggttaataaaatatgagaggatatgaaatttaatagtttttgggtttggtttataaaattttttatgtaattttttatatttttttattttttagttgttgagatttttttaggtattatatagaagtagtttgggtttttagtagtaaaggagagtagattttttttattattttgtatcgaattgtgatatgagtaaaaaataaagtttttatttttttatattattgagatttgaggattgttagagtagttagtttttttagtttaatatagtattagtagaggataattaggttagatatagtagtttatgtttataattatagtagtttataaggtcgaggtgggtagattatttgatgttaggagtttgagattagtttggtcgatatggtgaaattttagttttataaaaaatacgaaaattagttaaatatggtggtacgtgtttgtgattttagttatttaggaagttgaggtaggaaaatttttaagttaggaggcggaggttgtagtgaattaagattgtattagtgtattttagtttgggtaatagagtgagattttgttttaaaaataaataaataaataataaaaaattttttttagaataaaaatatatattaataatattaagaatggttaggtacggtggtttatattttttattttagtattttgagagttttaggtgagtagattattttagggtaggagtttgagattagtttggttaatatggggaaattttgtttttattaaaaatataaaaattagttcgggcgtagtggtttacgtttgtaattttagtattttgggaggtcgagatgggcggattacgaggttaggagatcgaggttattttggttaatacggtgaaattttatttttattaaaaatataaaaaaattagttaggtatgatggcgggtatttgtaattttagttattcgggaggttgaggtaggagaatggcgtgaattcgggaggcggagtttgtagtgagtcgagatcgcgttgttgtattttagtttgggtgattgagggagattttgttttaaaaaaaaaaaaaagaaggtaaagtagaggtttttttttaaagatttttttttttatttaattaggaataaatagtaattttttttagaagtaaaatttatttaaagatttgtgttaatatttttaaatatttgttagttttaataaattaatgtattttatgtttttagtttttataatttagtataaatatttgttttggtatgtttatattagtttaagtaagtattaggttatagtttgttttttttttttatttgaagatgttttagtggtgggttgaagggttttttaagtgtcgttaaagtgggagtttaggtagaggaggtgttgagagcgagcgagggttgtgaggattgttagtaggttgttattttttaattttttttttaaataggatattttaattgttgttgggaatttggttaatgatcgttttagttattttttgttgtataggggcgatgatggggttttgtagttgtagtgttttttagaggggaggtttttaggttagggaaattgttagcgggttagtttaggggttttcggtagaagttgttagttgaattgatttgggggtttatttgtaagattatttgtagtttgatggtttcgattttagaggaaataaatttgataggaaggttaaaaatatagggtttaaaggcgagtaatagtaagatggttgttataggatttagaaaggggagaagttatgttgtttaattttagaggttggtataagaatttgaaaggtatttgattttagaagtttttttttgtaaatattaggcggtattttatattattttcgattggttagtgtaaaaataatattttttttttaagaaggtgtagagttttttttttttagtagtgaggaggattaggttttggcggttttggagagttattgttgttaaagagtttatttgggattataaagtaagaatagattttattattttttgtagaatgtttgagaaattttttgagagtgtgtggtagtaggataatgaagtagataaatcggttattttggtttt

SEQ ID NO: 1407 - DNA, 7703 bp, Artificial Sequence
  chemically treated genomic DNA (Homo sapiens)
gaaggtaacggacgtgtttatggtgttgacggtgatgataagtgatagatgtagatttatttttaaatttgttaggttatagatattaaatatgtgtaattttatgaatagtagttatgttttaattaagtggttttaataaagaaataataggaagttagagttgagagatagggagggagttgtttaaggttatttggtaagtgagtttcggggcggggagagtttagttttgggtggttagtttggttttttttattgtttagtgtttagtttgtagtttaatgtttttgaattatagagaaggagattggttagtttatttatttatttattttataaaggtttatggagtattttttttgattgtaagtttttgaaggtgagagtagtataaatgagggttttatggagagagaggtcggaatgaaaaatgttaatgataaatgtatatataaaggtatatgtgtaattgaaagagttttgagagaaagagttaagggattgttttagagaatagttatggaaggggaaaaggtttagtgtgataaggtattgtaaagaagtgatatttaagtaaaagtttgtagtttatgtagaagttggttttagtgagaaaggttgggggagggttttagtagagagggaaggtatgtaaaggtttagagttaggatagaatttgttgtgtttgagaaattgggaaaagaagagtgagtttgggggtattacgtgatttagggtagagtaggtttaggttaggtgtagttaggttatagtagttttagtgggttagagtataaattaaagtttagtatttatttgaaatataggagttggttatgagttttttaggcgaggaagcgttgtgattatatttatgattgaaggagatttttttatatgttgtatatagaaagttttttagggtaaagaaaggaagttattggggtagttttgggggagatgaagggagtttttattgggggtagtaagaaagttagggaaaggcggtagttttaagatttgttttggagatagaacggataagttttgttgatgggttggagtggaataggaagttaagattattttttttgggaagttttgtttttgggtttttaggatttagaggaagttgtgattttgttttttatttttgtttgggttttaagttttatatttttttttgtaattagaagatattggatagatcgtttttattaatataatttttatagttgagtttagggtagaattgggtaggattttattgtttaatacgggaaatattagttagtagatttgggtttcggggatggtggtgggttagcgggaagattgattagggtttatttattatatttttattattttttattttaatttattttggtttgagatgataggtgaatatgattgatttttttttttttttttgtagaaatattaaagttagggattaggagaggggtagtttaattaagtttttaaagtatttagtagaggttggtttgggggatgggaggtttttagggttttatttgtttttgttaaagttatgtatttttattagaggtttaagagtgcgatggtaaattttggatttgaaattaagaaacgtaaaataagtattgaggattttattgttttttgagtgatttttttgattttttgttttttttgtattgttaggataatgatattaattttatgttgttgtagagaagtataaatgagttaatataggtgaatcgtttggggatattaggaggtgaggtcgaggaggaacgaggtattattttttagagttatttagagataggttgtgtacgagttagaggaatttggattttaatttcggttttattatttagtagttgaaataagttattttattttatttagttttagtttatttaatttgtaaaatagagtgagtttatttttggaaaattttgtaaaatagagagtttatttttggtgaaggttaaatatagtaatatttatggagtgtttagtatgtttttaataattagtggttttattgaaaagtagagagagttggtttagagggagtaagatttttgggttttaaatatgtagtttaggagagtttaagtgaatttggggttttttttaaatagattttgggggagatttagtgtatattcggagaagtagtttttttttatcggatttttagtgtttggtagggggcggggttttgagggggtgtttataatatatggtagattgtagatgaagaaattgaggtttagagggggtgaggtttgtttagggtgatttagtagttgaatagatgggagaatggaggttagggttttattgagattttttggttagttgtttttgggttgtatttaataaggaaatttttttgtttttgaagttgttttcgaaattattagtttagtgtgattttgtggggggttgagttatattgtttttttagaagtatttttatatatggttggttttaatttttggtaggagggattatattgtgttgtaaaatagatttatttagagaagtcggagattaaagtatttatttatgttttttaaagttttttaggtaagtgttatggtgggaataggtagggagtgttagtggggggaagtttagattttgtttatttattatttgtagattagggttattgttggtggttattaagttagggattttaaaattaggaagatgtagttaggaaaagaggaggtaggattttgtagaggaggtaggattttgtagagttagagtgataatcgagtttgagtttaagttttgttagtgttagtaagcgattttatttttttgaatttcggattatttatttgtaaaatagagttagtagtaagatgtatttttttgggtggtgtagggttgaaggagttggtatagtgtttgaaagagggtgcgggtaatgcgtttaattgttgtggttgttgggtttggtgttaggttcgattttgtaggtagaaatttttatatgaggttttttttcggaaggagtttaggatataatttggaggttgggttggtaagggtgatttgttggagttatttaattttatttaaagataggtttgtagtttaagtttgtttaatttttgagattattttttttttattgttgagttttacggttattttgtaagggattttttatttatttgtttggggttttttggagtttggttttaattgggttacgggatgttgtgataggttgtttttgtttggtggggatttggggttattgatgatattgtgtttatggagagagtttagtagaaagggattttttttaaggcgatatatagggtaaagtttatattagaagttaggtaggttttttgtatttggtaattagttagtttgggtgttgttaggtttatacgtgtgtgtgtgtgtgtgtgtgtgtgtgtgtgtgtgtgtgtaaagtatgtattttatggtatagttgagaatatggaggttttagatggggtttttgttagaaattgttatgtttattgtttatatttttatagtacgtgtttttaagtattttatggtgtaggtgttgttattattattattttatagttatggagtagtggtttaaggtgtaattgatttgtttaaaattatattataaggatatagtagggttgagatttgaatttaggtagtggttttagagtttgagttgttttttattgtagagggaggaggtaagatttttattcgtagttagatggggaggtatgggtataggaacggtttttgggtgaagtggagggaggaagaggaggattgaaggttaaggttacgttaggagtgatgggagattttataaaggtttttttgagaagagttagagataaagatgagtgtttttttatttggaagatgaaaagatgtttttgtttgtatgggttgttgttataaagttttaggggttagggggttttaataatagaaatttttttttttataattttggaagttggaagtttgagattaaggtattagtaggatttgttttttttaaggtttttttttttggtttataggtggttgttttttttttgtttttatttggttttttttttgtgtatgtttttattttgattttttttttttaatttttgtgtaaggacgtagttatattgggttggggtttattttagtgattttattttaatttagttttttttttaaaagttttatttttagatatagttatattttggggtattgaaggtaaggattttagtatatgtattttgggggtataatttagttagaataggaggacggtggggatgtttatatgaagaggtttaggtagaatttttttaggaggggaagatgtttttttgtgggataagggtggtatggagtagtttttgggggaaggagaaggggatagtttgtatattggtattttgtttattttagggtggatatttatttagcgtttgttgaatgaatagggtaaggttagtagtgttgatggttttaggtatgtagttggtttgagtttatagaaggattatagcgttttgttatgtgttaaattaggatattagagtgaaggttagaagtttatatggaagtagtttagttttttggtaatttcgagatgttgatgagatagagtagagtagagggaattttttttttttatattttattttttaaaatgtgttttttgatgtggatgggtagataggatttttgttttggtagttagatttttgttttgggtttgtattttttttttttttttttttttttcgttatttttaaattttgttttcgagttattgttattttgtgtaaatttttatgtttagttttgcgggtgttattttttttttttgaagttgaatggattaaatatatttattgagtgttgggtggggatatttttggaaagttagtatttggattagttttatttttttttgaggatatttttttttttttttagaataaagaatagttattatgtagttttttttttttttgtgtttggtgttttttagtttttagggggtttttttttatcgttattattttcgggagatgaagaagagagtcgaggatttttatgtaggtgttacggtggtttttagtagtagaagggattttatttttgatttttatagggttttggttttcgttgtttttagttagagtattttttttttttttgtgagtatttttatgagtttggttatgttttttttgggggttgggtttagtataaagatgtagattttggagggtttgggttttaatttttagaaaagtttagagaaggagttgtatagaggtttttagtagtttttttaggaatttaattagtttagagatggtttttagttgagtttcggtaatgttttttttatcgatttggtggtagatttgtaggatattttcgtaagtgttatgaagacgttgtatttggtagatattttttttattaattttagggattttgtaggggttatgaagtagattaatgattatgtggtaaagtaaacgaagggtaagattgtggatttgtttaagaatttcgatagtaatgcggtcgtgattatggtgaattatattttttttaaaggtaaggtttttgggtttaaatttgtattttttttggtttttttgttgtttttatttaaagaatatttaatttttttatatatataaaagacggggagtacgttaagtttttttgggtgtttgttgagaaaaattaagtaaataagtagttagagaaggtaagatgaatgtttttttgttgtggatgggattagtgaggttgagatgttgttttttttacggaggaagagttggttgttgttttcgggtttttggggatatttgaagttttagttttttataggttttgaagtatgaatttattgtggttattatggtaaagatattaatattttagttatttagggtaggatatagattttagaagggtttaaagggtattttttagtttttcgtattttttagattttggtttttttgtttttatagaggttaagatttttttagataaatgtttgtttttttgaaatgtttttttttgattttttagtaagagttgatttttgtttattttttcgatattttttgtaagtatttttgttcgtttttgtagtttttgttagttgttgattttggggaaagtaagagtggatagagaggagaagagaggagaggagagggtgggaagggttgcgaaggaaggtaaattgttaatattttttttttttatggttatagattatgagtatttttggttatttgggtggttataataaaatattataaattgggtggtttagtaataataaatatatattttttatagttttggaggttgagaagtttaggattaaggtattggtagatgtagtgtttattttttggtttatagagagtgtttttttagtatatttttgttggaaggaggaaggtagttttttgtggttttttttgtaaggatatcgattttgtttatgatagttttatttttatgatttaattaatttttaaaggttttttgttttaatattattattttgggggttaggttttaatatatgaataatgtggggatataaatattgagattatagtagtgagtgtcgaatttggattttgagattttttattttttggtgtagggtagtttttattatattagattgttgagggtagttgggaaataagttaaggacggtattgattggggttttttttcgataacgattaagaagttggaaataggttaggtatggtggtttacgtttataattttaatattttaggaggtcgagatgggtagattatttgaggttaggagttcgagattagtttggttaatatagtgaaatttcgtttttattaaaaaatatagaaattagttaggtatggtggtgggcgtttgtaattttagttatttgggaggttgaggtaggagaattatttgaatttgggaggtgggggttgtagtgagttaaaattgcgttattgtattttagtatgggttatagagcgagattttattttaaaaagaagaaaaaaagaaaaaaaagaaaaaaagaaataaaataaaataaaaagaagttggaaataattatttgtagcgttttgtttagaagtttttataggaaggttagagaagggttattgaagattttttaatgggaaaaattatttatttttaggatttatattaatttttttttaaaatttaaattaaaatattggaatgaaagtgtaaatagagaagtttatttagatattaggtagtatttatagttagttatattttttattttttttatttggagatttggttttgagtaaaacgttagagaattagagaatattaggggtttagggtttttgaagatgtgaaaattaatttttttgttttgtaaatgtggaaggaaaagttttacgaaaagtttaagaatgtgtttaatgttataaagagatttgtttttatatttaagaggtttaatagttattgttttggggttgttataaagatggttttcgttggttatttttattgtttttattttttttatttgtagttgagaatttttaattttgatataaaatttttttttatttttttttttttttatttttagt

SEQ ID NO: 1408 - DNA, 7703 bp, Artificial Sequence
  chemically treated genomic DNA (Homo sapiens)
gttaaagatgaaaaaagggaaaaatgaaaaagaattttgtgttagaattagaaatttttagttgtaaataaaaggagtgaagatagtaaagatagttagcggagattatttttatggtagttttagagtagtgattgttgaattttttgaatatgaaggtaagtttttttataatattgggtatatttttggatttttcgtgggatttttttttttatatttgtaaaataaggaggttggtttttatatttttagaggttttggatttttgatgttttttgattttttaacgttttatttaagattaaatttttaagtgaagagggtgaaaaatgtggttggttgtgaatgttatttgatatttgggtgaatttttttgtttgtatttttattttaatattttgatttaaattttagaaagaagttagtatggattttggaaatgaatggttttttttattgggaagtttttaatgatttttttttgatttttttatgggaatttttgaataaaacgttataagtgattgtttttaatttttttttattttattttatttttttttttttttttttttttttttttttttttttgagatggagtttcgttttgtgatttatgttggagtgtagtggcgtaattttggtttattatagtttttattttttaggtttaagtgatttttttgttttagttttttaagtagttggaattataggcgtttattattatgtttggttaatttttgtattttttagtagagacggggttttattatgttggttaggttgatttcgaatttttgattttaggtgatttgtttatttcggttttttaaaatgttgggattataggcgtgagttattatgtttggtttgtttttaattttttaatcgttatcgaaggaagattttagttaatatcgtttttagtttattttttagttgtttttagtaatttggtgtaatggggattgttttgtattaggggataggaaattttagagtttaagttcgatatttattgttgtggttttaatgtttgtgtttttatattgtttatatgttgaaatttaatttttaaggtggtggtattaggatagggggtttttgggagttgattaggttatgggggtggagttgttatgaataggatcggtgtttttataaaagagattatagagagttgtttttttttttttagtaaggatatattaagaaggtattttttatgaattaaggaatgggtattgtatttgttagtgttttgattttggattttttagtttttagaattatgagaaatatatgtttgttgttgttaagttatttagtttatggtattttgttatagttatttaaatggttaaagatatttatgatttgtgattataggaaggggaggtgttaataatttattttttttcgtaattttttttattttttttttttttttttttttttttttatttatttttgttttttttagggttagtaattggtaggagttgtagaggcgagtaggaatgtttataaggagtgtcggggagataagtagaggttagtttttgttgaggagttaggaggaggtattttagaggaataagtatttgtttgagggagttttggtttttatgagggtagaggggttaagatttgagggatacgggggattgggaaatgttttttaagtttttttggggtttgtgttttgttttgagtggttaaggtgttggtgtttttgttatggtggttataatgggtttatattttagagtttgtagaaagttggggttttagatgtttttaggggttcgaagatagtaattagtttttttttcgtggaggaaatagtattttagttttattaattttatttatagtaagaaggtatttattttattttttttggttgtttgtttatttaattttttttaataggtatttaaaagaatttaacgtatttttcgttttttatgtatgtgagggaattgggtattttttagataaaagtagtagaaaagttaaagaaagtgtaggtttgggtttaagggttttatttttaaagaagatgtaatttattatgattacgatcgtattgttatcgaggtttttaagtaagtttataattttgtttttcgtttgttttgttatataattattgatttgttttatggtttttgtagagtttttaaagttggtagggaaagtgtttgttaggtatagcgtttttatggtatttacgaaggtgttttgtaggtttattattaggtcggtgaaaagggtattgtcgaggtttagttggaagttatttttgggttggttgagtttttgaaggagttgttgaaagtttttgtgtagttttttttttgagtttttttggaggttgaggtttaggttttttaggatttgtatttttgtgttggatttagtttttagggagagtatggttaggtttatggagatgtttataggggagaagaagatgttttggttgggggtagcggaagttaaggttttgtagaggttaaaggtaaagttttttttgttgttgggggttatcgtggtatttatatggaggttttcgatttttttttttatttttcgggggtggtggcggtgaagggaggttttttgagggttgagaagtattaggtataagaggaggaagagttgtatggtggttgttttttgttttgaaagggaaagaaggtgtttttagagaggggtggagttggtttaggtgttgattttttagagatgtttttatttaatatttaatgggtatgtttggtttatttagttttaaagagaagggatggtattcgtaagattgggtatgagggtttatatagggtggtagtggttcgaggataagatttagggatgacggggagaggaaggagggagaggaggtgtagatttaaggtaggggtttggttgttagggtaggaattttgtttatttatttatattaagggatatattttggaggatgggatatggagggagagggttttttttgttttgttttgttttattagtatttcgaggttattagggaattaagttgtttttatgtgagtttttggtttttattttggtgttttggtttggtatatggtagggcgttgtggtttttttatgaatttagattagttatatgtttgggattattagtattgttggttttgttttgtttatttagtaaacgttgagtgagtgtttattttggggtaggtagaatattagtatgtaaattgttttttttttttttttttaggggttgttttatgttatttttgttttatagagagatattttttttttttaaaggaattttgtttgaatttttttatgtggatatttttatcgtttttttgttttggttgaattgtgtttttaaaatgtatatgttgaagtttttatttttaatattttagaatgtgattatatttggagatagggtttttaaagaggggattgagttagaatgaggttattagagtgggttttaatttaatatgattacgtttttatataaaaattaaaaagaggagattaggatagagatatgtatagagggaagattaggtgaagatagggagaaggtagttatttgtgagttaaggagaggggttttggaaggaataaattttgttggtgttttaattttagatttttagtttttagagttgtaaagaaagaaatttttgttgttgaagttttttagtttttgggattttgtgatagtagtttatgtaggtaaagatatttttttattttttagatgaggaggtatttatttttgtttttagttttttttagggaggtttttgtggggttttttattatttttgacgtggttttggtttttagtttttttttttttttttttattttatttaagagtcgtttttgtgtttatgtttttttatttggttacgggtagaagttttgttttttttttttgtagtaggaaatagtttaggttttgaagttattgtttgggtttaaattttagttttgttgtgtttttgtagtgtgattttgggtaagttagttatattttgagttattgttttataattgtaagatagtgataataatagtatttatattatggggtgtttgggggtacgtgttatggaagtgtgagtagtaggtatggtagtttttggtaaaagttttatttgaggtttttatatttttaattgtattatagggtatatgttttatatatatatatatatatatatatatatatatatatatacgtgtgagtttgatagtatttaggttggttaattattaggtgtagagggtttgtttggtttttgatgtgagttttgttttgtgtgtcgttttggagggaatttttttttgttgggttttttttatgggtataatgttattagtgattttagatttttattaggtaggggtagtttgttatagtatttcgtgatttaattaaaattaaattttaaagggttttaaataggtgggtgggaaattttttgtagagtggtcgtggggtttagtagtggagagagaatggttttaggaattgggtaggtttggattgtaggtttgtttttaagtgaagttgaatagttttagtaggttatttttgttagtttagtttttaaattgtgttttgagtttttttcgagaaggagttttatgtagaagtttttgtttgtagaatcgaatttggtattaaatttagtagttatagtagttgggcgtattgttcgtatttttttttaggtattgtgttaatttttttagttttgtattatttaaaaaggtatattttgttgttagttttattttatagatgggtaattcgaggtttagagagatggagtcgtttgttaatattggtaaagtttggatttagattcggttattattttgattttgtagagttttgttttttttgtagagttttgttttttttttttttggttgtatttttttgattttgaaatttttgatttagtagttattaataatagttttaatttgtagataatgagtgagtagagtttgggtttttttttattgatattttttatttgtttttattatggtatttgtttggagagttttgaaggatataggtgggtgttttaattttcggtttttttaaatgagtttattttatagtataatatggttttttttgttaagggttggaattagttatgtatggagatgtttttaaagaaataatgtggtttaattttttatagggttatattgagttgataatttcgagaatagttttagaagtaggggagtttttttattggatatagtttaggggtagttgattagagagttttagtgaggttttggtttttatttttttatttatttagttattaggttattttgggtaagttttattttttttgggttttagtttttttatttgtagtttgttatgtgttgtggatatttttttaagatttcgttttttgttaagtattagagattcgatggggaggagttgttttttcgggtgtgtattgagttttttttaggatttgtttggagagggttttaggtttatttaggtttttttgggttatatgtttgagatttagaaattttgttttttttgggttaattttttttattttttagtaaaattattaattattaaagatatattagatattttataaatattattatgtttaatttttattaaaagtaagttttttattttatagagttttttaaaagtaaatttattttattttatagattgaatagattgaggttaagtgaagtggaatagtttgttttagttattgagtgatggaatcggaattaaaatttaggtttttttgattcgtgtatagtttgtttttgagtggttttgaggagtgatatttcgttttttttcgattttattttttggtatttttaggcggtttatttgtattagtttatttatatttttttataataatatggagttagtattattattttaatagtgtagaagaaatagagggttagagaggttatttaagaggtagtggagtttttagtgtttgttttacgttttttagttttaaatttagggtttgttatcgtatttttgggtttttggtggaaatatatggttttgatagagataggtgaagttttgggagttttttattttttagattagtttttattgagtgttttgaaagtttggttgggttgttttttttttggtttttggttttagtgtttttgtagagggaagagagaggattagttatgtttatttgttattttaggttaaggtgaattgaggtgggaggtggtggggatgtgatgggtaggttttggttagttttttcgttggtttattattattttcgaaatttaaatttgttgattgatatttttcgtgttgggtagtgaagttttgtttagttttattttggatttagttgtgggaattgtgttagtgaggacggtttgtttaatattttttaattataaaaagggatgtgaggtttggagtttaggtagagatgagagataaagttatagttttttttagattttaaagatttaggaatagaattttttagaagaagtaattttgattttttgttttattttagtttattagtaaagtttgttcgttttatttttaaaataggttttaaagttgtcgtttttttttggtttttttattgtttttagtggaagttttttttattttttttagggttattttagtagttttttttttttgttttgaaaggttttttatatatagtatataaaagaattttttttaattataaatatggttatagcgttttttcgtttaagaaatttatggttaatttttgtgttttagataaatgttaaattttgatttgtgttttaatttattagggttgttgtgatttggttgtatttggtttggatttgttttgttttggattacgtgatatttttaggtttatttttttttttttagttttttaaatatagtaagttttgttttaattttgggtttttgtatattttttttttttattggaatttttttttaattttttttattgaggttaatttttgtataggttgtaggtttttgtttaaatgttatttttttgtaatattttattatattggattttttttttttttatggttattttttggaatagttttttgatttttttttttaaagtttttttaattatatatgtgtttttatatatgtatttgttattgatattttttatttcggtttttttttttatgggatttttatttgtgttgtttttatttttaagagtttgtagttaggagagatgttttataaatttttgtagaatgaatgaatgaatgaattgattagtttttttttttgtaatttagagatattagattgtaagttggatattgagtagtggaaaaagttaggttggttatttagagttgagtttttttcgtttcggagtttatttgttaggtgattttgaataattttttttttgttttttagttttggttttttattatttttttattaaaattatttgattgagatatgattgttatttataaagttgtatatatttaatgtttataatttgataagtttggagatgagtttatatttgttatttattattatcgttagtattatgaatacgttcgttattttt

SEQ ID NO: 1409 - DNA, 7201 bp, Artificial Sequence
  chemically treated genomic DNA (Homo sapiens)
gtaggaggttaggtttatagaggtagtttatggagatttttggaggggcgtattttatttttgttggttttggaggggttggattatttttgacgtagagtttaatttattttattttggaggttatttaattagaaatgaagttagtatgaaattaggttttattttttttttagatttgtggagggtgtgggttagggttatatgatttgtttggtgttatatatttttagatggtagttaggggttttcgttggtgttgttggatatgagtagattttggttttatgtttaagattttagtgttattgggcgttggtttacgtttgtaattttagtgttttgggaggttaaggtagaaggattatttgagtttacgagttggagattagtcggtataatataataagattttatttttataaaaaataataaaaaagggttaggtgcggtggtttatgtttgtaattttagtatttagggaggttgaggtaggtagattacgaggttaggaggtcgagataatttggttaatatggtgaaatttcgtttttattaaaaatataaaaaattagttaggcgtcgtggtaggcgtttgtaattttagttattcgggaggttgaggtaggagaattgtttgaaatcggaaggtagagtttgtagtgatttaagattgcgttatagtattttagtttgggtaataagagtaaaattttcgtttggaaaaaaaataaaaaaaataaaaaaataaataaataagataataaaagaatttggtttttgtttatagttattaatagtgatagttttgggagatatttaaatagttttgagtgtgtatagaataaaaattaggttaatttagttaagtaattgtatagagtatttttgatataagtgattttatttgagaaaaggattttattttatgtatttttttttgagatggagttttgttcgttgtttaggttggagtgtagaggtggagttattttagtttattgtaattttcgtttttcgggtttaagtgatttttttgttttagtttttcgagtagttgggagtataggtgtacgttattacgtttagttaatttttgtatttttggtagagatggggttttattatgttggttagattggtttcgaatttttgattttaagtgatttgtcgttttggttttttaaagtgttaggattagaggtgtgagttatagtatttggtttttgatgttttttaaattataagatagggttaggtaggcggaagttgtagtgagttaaggtggtattattattgtattttattttgggtaataagagtgtaattttattttaaaaaaaaaaaaaaaaaaaaaaaaagggtattaggttaatagggattagatgtttttttattagtagatattgtatttatttagataaagatataaataagatatttttattattagtttttattagagtattttatggttatgaaaagagtagaatattattaggttaaagtggtcgttttatagatagttttgttgttatttgtgagaagttttttatatttgttgttgtaggttttgtttatattagagatgtttttttgttagattttttttttcgttgaattggttaatttttttttttttttttttttttttgatgtggaatgtttataatatttatgtagtggttaagtatattattatgtatggtttgtaatattgattgatttaaggagagatttgagtttgtgtgtttatagttgtgattgttaagtgaatgggaagtattaagaattgttttttcgggatttttagtagtatatataatatgttttagagggtatggatttgttagattttttttttaaatagggtttttaagaatagttttagatttagagtaattgagaagatagtatatggagattttatatattatatgtgtggtttttttttttattaatattttattttagtgtgttatatatgttatatatatatatattttttttgagatagagtttcgttgcgacgtttaggttagagtgtaatggtgtaattttggtttattgtaatttttgttttttagttttaagcgatttttttgttttagtttttcgagtagttgggattataggtacgtgttattatgtttagttaatttttgagtgaaagttagtgtatttggtttatttgttatgattaatgaattaatattgagatataagtaattgaagtttatattttgatagtttttttaggtttgttttatgtttttaatgtggtatttattagaatattttattatattgagttatgtgtttttaggtttttttttagatttttttcgtttttgatgattttgatagtttcgaagagtattgggtagatattttgaagaatgttttttaattaaaatgtgtttattattttttggttagattgggattgtaggttatagaaaggaagtatttaggggtgaagtgttattgttattttattatattagggatatatattgttatttcgattataattgtgaggttgatttgcgttatttggttgaggtggagtttgttagttttttttataataaagtggttttttttttttttttttttattgtattttttgggaggaagtggttatgtgtggtttatatttaaggagaggggagttacgtttttttttttgagggtgagtatttataaaatttatttgggtagtttttttttttttttttttttgagttagggttttagtttgttatttaggttggagtgtagtggttgtttggttttgatagttttttaatagtttaaaatgaattgaggttgggcgaggttgtttatgtttgtaattttagtattttgagaggttaaggtaggtggattatttgagtttaggagtttaagattagtttgggtaatatagtgagattttgtgtttattaaaaatataaaaattagttgggtatggtggtgtgtttgtaattttagttgtttaggaggttgatatggagaattatttgagttcggggaagttgaggttgtaatgagcggtggttttattattgtattttagtttgtgtgatagattgagattttgtttataaaaaagaaaagaaaaaagaattgaaataagatttaagtttaatattagtagaatttttttaggatgtttatagaaacgattttggggttttgaggaatatagtttaggtaaatttgggtatatttttttagttttatagttgtaaatgtattgtaatacgtaatagttgtgagatttaggcgcggtttgggtttttgtttttggaaagtgtgattttgtgggtgtagtttttgttcgtttggttgtgttgtttgtttggtttttgttttaatgagtttattgtttagagtttgtttaaattatttaatttcgagtttgggaattaggagatcgttggatatttcgtttattatatagaagattgtggtttgagttaggagaaggaagtttttggcggtcgagtttttacggttttttgagggaggttgtagggagtcgagatcgcgttattgcgttatagtttgggcgtcgtagcgagattgttttaaaaaaagaaaaaaaattttgagcgagattttagggttttttgagggcgcgtttaagttgtagttgttgaggaggttgtaaggtgagtttgcgttagcgaggagttattttagtacgttcgggaagggtatcgttattgttgtaaataagtatacggttttttacgacgaattttttgtaagtgaaggcgtacgaataggttcggaggattataaagaaatttagaaattagatttggatatatgaaataaaggggttagttgaaggaatattttatagttaaggacggtttgcgcgaggttatcggttttgttttggttttttgttatttcgttttagttagttttttaagttttatttacgcgcgcgttagttgagaaaacgtttatttcggcggtttcgttataggttataggcggtgcggatttcgggattgtgttcgggtttcggtgtttagagagttttaagatatttaaatttttcgtggtttttatttttgtaagtttatgtttcgttgagtttaagttgagggacgacgattttatgcgacgttagtttttttttgggattacgaatttacggttttattttttttttgtttattaaaaattttttttttttttttttttttgagatttaagatattagtgagatatacgagtagatacgggttcggtcgggaaaggcgggagttttaagcggcggggtttgtaggtttaggcggttcgcgggttttttgatcgtattcggtcgagtttttttttgaagatttaggattttcggtcgagggggcgtattcggcgggttggtggcgtaggattttgtttcgggtttttagggtttcggtaagggtgagggagtttttgcggattttttgagatttattttagtagtttttttcgtggtaggttttaatttttcgcggcggtttatagttaacgattaatgtttgagcgggagaaaacggtttggttttgttcgggtggttgttgagtatcgttcggcgtcgttcgcgtttgtagggagttcggttcgttgttttggtggatataaagtttaggggtcgttcgcgcgggattagtagcgcgaattttttgtcgttcggttagtttggtaggggattttaaaatcggttaattatagcgggcgttaggttttcgtttttcgtttattggttttgtcgtaggaggcgggtacgtgagcgtattaatttgtggtcggcgagcgtaaagggcggggtttcgtttaggttgtatcgtttagagcgcgcgtgcgcgagatcggaaacgtagttttttgattggcggcgcgtgtcgggggcggggtcgcggttgcgtgatagttgtcgcggggggagggcgagtttaagcgcgggggagggagtgtaaatagagcgaaggttgttttgtgttagtttcgttatcgtcgggcggttcgcgcggagtttgagggagatggaagttgagtaagagtagcggcgtagaaaggtggaggtcgggaggacgaaggtaaatattaggggttttttttttagttgttttggcgtgaagttttaagggcggtttcggtgttcgttatcgttttttgttaggagaggacgcggttcggcggaagtcgtcgcggaggtttcgttttttttcgtcggtttcgttggaagtcgttttttggtcgtcgttattttgaattcgtcgtttttcgttaggtttcgttttcgtcgcggttatagttaattagcggtcgggacgcgcggcgtttttcgggcgggtcggggcggggttgcgtttgcgtcggggggggtggggcgcgggttgggcgcggtgtacgtcggggcggggtgtggttgtagggcggggttataggggcgtggcgtggttgtacggagggggtggggcgcggtaggcgttggattttaggttggattttttagtggttttcgcgtttttcgggatcgggtggtttggggcgggcggtcggtattcgggtggttgtttggtttagggttagttttttgcgcggtcggggtcgggggcgtggcgcgggtggtttgtagcgtttttttagggtgcgttttcgtttcgttcgtcggagatgtttttttcgcgcgtttttcgcggcgttgtagtttttattgtgtgaaaggttttcgcggcgttttcggtcgtcgtttttttttcgcgtttttgggttcgcgttttgttcgttcgggtttggcgtacgttgtcgggaatttacgcggcgttggcgtcgggcgtttttaagggacgcgttttcgtttttttttcgtttcgggttttttcgtgaaaaagcgttcggtttgatggttattgttttaggtttcgtgggaataaagcgcgtagagtttatgattcgggggtaggagaaagggagtttcgaaagcgcgaggcggaatcgcgggagtaggtcggtttttgcgaggtgcgcgtcgtttttttttaggatgttttggttggggtgttggggaagagcggggttttcgggtacggcggataggggacgcggggttaggtcggggaagggttgaggcgggtaggaggggaaggggagttcggagtttgtagggagttgcgaataggagtagagtttttaggagggtggaggggggagggagggataagacgtcgtttgtagggcgacgtaggtcgtagattaggtttgtgttatatttcgatatggataggtgtggtggaggaggatatgaaaataaacgatatgaggttgattttgaaggaaatatttttttgagagattatttttttgtgtaaatggttttgtgtaatttttttgggtttatgagtttgtgtatttgtgttattatttatataaatgtgtgttttatgcgtttgtttttgtggttatagttgttttttgagggaatagatgttttttcgtgaaaggttgatgtgggatcgatcgtatattttttgagtaagacgttagcgggagatgaggttcgtatatagttttaaattttcggatttgaggattgagtagagttaggttgtgttttttgatgggcgatgttttgtggatgtttttggtgttttggtgagttgtgttatgaaaaatagaatatttgattttataaaggaagatgtgagattgatttggtttaattaattttttgttatttttgtattttgttttagaatttatggttaggaagttttggttgggttatatatttttttagttgggggaaaattggggtaagaagggagagatttagtttttatattattttaaaatttaaatatgttttgattaagttattaattttttatataaattttttttaaagttttatttttttgtaaattgttaagggttaggaaagttattttgttaattagtcgtatggttttttttattaggtataattagtagtttttattgttagattttttggatatagatattgatgaaggtagtgtttgtggagagttatttgttggttaggtgtggtagagtagattgggttagttttcgggttttatggtttttattagtttgttgattttgtggttttgttattttttttttatttatttttgtttttattatttatttatatttttgcgtagt

SEQ ID NO: 1410 - DNA, 7201 bp, Artificial Sequence
  chemically treated genomic DNA (Homo sapiens)
gttgcgtaaaaatgtagataagtagtaaaggtaaaggtaagtgagaaaaaaataatagaattataaagttaatagattggtggggattatgaggttcgagggttgatttagtttattttgttatatttggttaatagatggttttttataaatattgtttttattaatatttatatttaaggggtttaataatgaggattgttaattatgtttggtaaagaaaattatacggttgattggtagaatagtttttttagtttttggtagtttatagaaaaataaaattttaaaaaaaatttgtataaaagattgatagtttaattaaggtatatttaagttttaaaatgatataaaagttaaatttttttttttttgttttaatttttttttaattgaagaaatatatagtttagttaaaattttttagttatagattttgagataagatatagaaatagtaaaaaattaattaagttaggttaattttatatttttttttatggaattagatgttttattttttatgatatagtttattaaagtattagggatatttatagagtatcgtttattagaaggtatagtttagttttgtttagtttttaaattcgagagtttgagattatgtgcgagttttatttttcgttaacgttttatttaagaggtatgcgatcgattttatattagttttttacggggagatatttgtttttttaaaagataattgtggttataaaaataaacgtatggaatatatatttgtgtaaatgataatataagtatataagtttatggatttagaaaaattatataaggttatttatataagaaaatggttttttaaggaaatattttttttaaagttaattttatgtcgtttatttttatgtttttttttattatatttatttatgtcgggatatagtatagatttggtttgcggtttgcgtcgttttataggcggcgttttgttttttttttttttttttatttttttgggagttttgtttttgttcgtagttttttgtaggtttcgggttttttttttttttttgttcgttttagttttttttcggtttagtttcgcgttttttgttcgtcgtgttcgggagtttcgtttttttttagtattttagttagaatattttgggggggagcggcgcgtatttcgtagaggtcggtttgttttcgcggtttcgtttcgcgttttcgggatttttttttttttgttttcgagttatgggttttgcgcgttttatttttacgaaatttaggatagtggttattaaatcgagcgtttttttacggagaaattcggggcgggagaaagacgggagcgcgttttttgaaggcgttcggcgttagcgtcgcgtgggttttcggtagcgtacgttaggttcggacgggtaggacgcgagtttaagggcgcgggaagaagacggcggtcgggagcgtcgcgggggttttttatatagtaaggattgtaacgtcgcgagaaacgcgcggggaaagtattttcgacggacgaggcgaaggcgtattttggggaggcgttgtaggttattcgcgttacgttttcggtttcggtcgcgtaggaaattggttttagattaagtagttattcgaatatcggtcgttcgttttaggttattcggtttcggaggacgcgggagttattggaagatttagtttggggtttagcgtttgtcgcgttttatttttttcgtgtagttacgttacgtttttgtagtttcgttttgtagttatatttcgtttcggcgtgtatcgcgtttagttcgcgttttatttttttcgacgtaggcgtagtttcgtttcggttcgttcgagaggcgtcgcgcgtttcggtcgttgattggttgtggtcgcggcgggggcgggatttggcggagagcggcggatttaagatggcggcggttaggaggcggtttttagcggagtcggcgggaaaaagcgagattttcgcggcggttttcgtcggatcgcgtttttttttggtagggggcggtggcgggtatcggagtcgtttttaggattttacgttagagtagttagagaagaagtttttaatgtttattttcgttttttcggtttttatttttttgcgtcgttgtttttgtttaatttttattttttttagatttcgcgcgggtcgttcggcggtgacggggttgatatagagtagttttcgttttatttatattttttttttcgcgtttgggttcgtttttttttcgcgataattgttacgtagtcgcggtttcgttttcgatacgcgtcgttaattagggggttgcgttttcggtttcgcgtacgcgcgttttgggcggtgtagtttgggcggagtttcgttttttacgttcgtcggttatagattggtgcgtttacgtattcgttttttacggtaggattagtaagcggaaagcggaggtttggcgttcgttgtgattggtcgattttaaaattttttgttaggttggtcgagcggtaaaaagttcgcgttgttggtttcgcgcgggcggtttttgggttttgtgtttattaggatagcgggtcgggttttttgtaggcgcgggcggcgtcgaacggtgtttagtaattattcggatagggttaggtcgttttttttcgtttaggtattagtcgttggttgtgggtcgtcgcgggaagttgaggtttattacggaggaggttgttgaggtggattttaggggattcgtaagggtttttttatttttgtcgggattttgggaattcgaaataaaattttacgttattagttcgtcgaatgcgttttttcggtcgggggttttgggtttttagagaagaattcggtcgaatgcggttagaaagttcgcgaatcgtttggatttgtaggtttcgtcgtttggagttttcgtttttttcgatcgagttcgtgtttgttcgtgtgttttattgatgttttaggttttaaaaaaaaaagaaaagaaaaggtttttagtagatagaagagaaatggggtcgtgggttcgtggttttagggggaaattgacgtcgtatgaggtcgtcgttttttagtttgagtttagcggaatataagtttgtagaggtggaaattacggaaggtttgggtgttttggagttttttggatatcgaagttcggatatagtttcggggttcgtatcgtttgtgatttgtggcgggatcgtcggggtgggcgtttttttagttggcgcgcgcgtaggtggaatttgggaaattaattggagcgaagtggtaaaaaattaagatagggtcggtgatttcgcgtaggtcgtttttaattgtggagtatttttttagttaatttttttattttatgtgtttaagtttggtttttgggtttttttgtagtttttcgggtttgttcgtgcgtttttatttgtaaaaggttcgtcgtggagggtcgtgtgtttgtttgtagtagtaacgatgtttttttcgagcgtgttggagtggtttttcgttgacgtaagtttattttgtagtttttttagtaattgtaatttaaacgcgtttttaggaagttttggaatttcgtttagaattttttttttttttttgagatagtttcgttgcgacgtttaggttatagcgtaatggcgcgatttcggttttttgtaattttttttaggaagtcgtggaagttcgatcgttagaaattttttttttttgatttaggttatagttttttgtgtggtgagcggggtgtttagcggttttttggtttttagattcggaattgggtggtttgagtaaattttgggtagtgggtttattagagtaggggttaggtaggtaatatagttaagcgagtaggggttgtatttataggattatattttttaggaatagagatttagatcgcgtttgaattttataattgttacgtgttataatatatttataattgtgggattgaggggatgtgtttaggtttgtttagattgtgttttttagaattttagagtcgtttttgtggatattttagagaggttttgttaatgttggatttgggttttattttagtttttttttttttttttttttataggtagggttttagtttgttatataggttagagtgtagtggtgagattatcgtttattgtagttttaattttttcgggtttaggtgattttttatgttagttttttgagtagttggaattataggtatattattatgtttagttaatttttgtatttttagtagatatagggttttattgtgttgtttaggttggttttgaatttttgggtttaagtgatttatttgttttggttttttaaagtgttggagttataggtatgagtaatttcgtttagttttaatttattttaaattattaaaaagttgttaaggttaggtaattattgtattttaatttgggtgatagattgagattttaatttaaaaaaaaaaaaaaaaaaaagttgtttagataaattttgtagatatttatttttaaggagggaaacgtaatttttttttttttaagtgtagattatatatagttatttttttttaaagagtgtaataaagaaaaggagggaaagagttattttattgtggagaaaattggtagattttattttagttaagtgacgtaggttagttttatagttatagtcgaggtgatagtgtgtgtttttgatgtgatggggtgatagtggtattttatttttagatgttttttttttgtaatttgtagttttagtttaattaggagataatagatatattttaattgagggatattttttaaaatatttgtttagtatttttcgaaattgttaaggttattaaaaacgaggaaagtttgagaaggagtttaaagatatataatttaatgtaatggggtgttttgatggatattatattagggatatgaggtaaatttaaggaaattgttaaagtgtggattttagttatttgtgttttaatattggtttattaattataataaatgggttaggtgtattggtttttatttaaaaattagttgggtatgatggtacgtatttgtagttttagttattcgagaggttgaggtagaagaatcgtttgaaattgggaagtagaggttgtagtgagttaagattgtattattgtattttagtttgggcgtcgtagcgagattttgttttaaaaaaaatatatatatatataatatatgtagtatattaaggtaagatgttaataagaggggaagttatatatgtggtatgtgggatttttatgtattatttttttaattattttaaatttaaaattgtttttaaaaattttatttaaaaaaaaagtttgataaatttatgttttttggagtatgttatgtatattattagagatttcgaggaggtaatttttagtgttttttatttatttggtagttatagttgtgggtatataggtttaagtttttttttaagttagttagtattataaattatatataatagtatatttgattattgtataaatgttataaatattttatattaagagaaagaggagaggaaaaaaagttaattagtttaacgaaaaggagaatttggtaaggaagtatttttgatgtgggtagagtttgtagtagtagatgtggagggttttttataagtgatagtaagattgtttgtaaaacggttattttgatttggtggtgttttgttttttttatggttatagagtattttggtaaggattgatagtaagagtgttttgtttatgtttttatttgggtgggtgtagtatttattgatgaggaaatatttggtttttgttggtttgatattttttttttttttttttttttttttttgaggtggagttatatttttgttgtttaggatggagtgtagtagtggtgttattttggtttattgtaattttcgtttgtttggttttattttataatttaaaaggtattaggggttaggtgttatggtttatatttttaattttagtattttgggaggttaagacggtagattatttgaggttaggagttcgagattagtttggttaatatggtgaaattttatttttattaaaaatataaagattaattgggcgtggtggcgtgtatttgtatttttagttattcgggaggttgaggtaggagaattatttgaattcgggaggcggaggttgtagtgagttgagatggttttatttttgtattttagtttgggtaacgagtaaaattttattttaaaaaaaaatatataagatggagttttttttttagatgaggttatttatattaagggtgttttatatagttgtttaattaaattaatttggtttttgttttgtgtatatttagagttgtttaaatgttttttaagattgttattgttaatgattgtggataagagttaggtttttttattattttgtttatttatttttttattttttttattttttttttagacggaggttttgtttttgttgtttaggttggagtgttgtggcgtaattttgggttattgtaaattttgtttttcgattttaagtaatttttttgttttagtttttcgagtagttgggattataggcgtttattacgacgtttggttaattttttgtatttttagtagagacggggttttattatgttggttaggttgtttcgattttttgatttcgtgatttgtttgttttagtttttttaagtgttgggattataggtatgagttatcgtatttggtttttttttattattttttatagagatggggttttgttgtgttgtgtcggttggtttttaattcgtggatttaagtgatttttttgttttggttttttaaagtattgagattataggcgtgagttaacgtttaatggtattgggattttaaatatggggttagagtttgtttatgtttagtagtattagcgaggatttttgattgttatttgggaatgtgtggtattaggtaggttatgtgattttagtttatattttttatagatttggagggagggtaaggtttggttttatgttgattttatttttggttggatggtttttagggtaaggtgagttgaattttacgttaggagtaatttagtttttttagggttagtaggagtaaggtgcgtttttttaaggatttttatgagttgtttttgtgagtttgattttttat

SEQ ID NO: 1411 - DNA, 5891 bp, Artificial Sequence
  chemically treated genomic DNA (Homo sapiens)
ttgttatggaatttttaatggtaattaaaagtatatgtagttagtggattttatcggagtgtttgaggttttcgttttgaatgtgattgtcggaattattgttcgggggggtggtgtatttttttgagtttaagtaggagtcgggagtttttaaaagggaatataagatattttgattttggtatattttgtgtgttttttgtgggttttagtttgttttataggattgaaaatttgggaagttagatgtttattttatttgaagaagttgttttgtttttgttaaggtggagcgggaatagttagtattgggatatgagaatggatagtcgtttggatttatttagggatttattatttgttaaatgtgtgagttgtgggttcggttttgggggtattttaggaatatgattagtttttttttgtagtgtggaggatatatgtgttatagagtttagttttgtgttcggtgttagagaggttttcggaggtaggtagggttgcgtgtagtttggaaggatgagttaggttaggcgggaaacggaagtttaggtagaagggaggagtcgaattggggtatattttatatgggtttaggtaggttagtttgtggaatgaatagaggttaatatgtaggttagttcggaatgcggtaggagtgatagtggtttttcgtttttgggaattttgttagtatttatagtggtgttttttgatttggtttattttttttttcgatatgtaggtagcgtttattttagattatcggggttttaatggagtgtggatattgttttagaaagggagaagcgttaggtaagcgggttaggtatggttttttatataggttgggtagcggtagtacgggtttgagttttagttttttttattttgtttttttttttgtttggtagtgttgtcgatttgagcgaggtcgagttaatttttatttatatgagtattattcgtttgtatgagtagaagttggtaagagttttgggtggttggtatatttgttagggattaggtagagtattttggtgttagtgggtaattaattgtattcgttttttgtttgttagttgatttttatgatgagtatttattaagcgggttaggtcgcgggtttgatttttttgtgtttgattttttaggatagaaggggagttttttttttgaattattttattcgtagttagttttagttttagagttgttggtggttttttttttttgtgatttttttgtatttttttgtggattttagaagttattttagttataggggaggtttataggatatttttggggattttttgttgaatatttttaattaatggggtgtagtggttgatttgtttaggtttttagggatttgaaatgttatgatttaagagagtatggatttggggtagagtggtttttgttaaatttcgagttattttttaattttgtcgggacggtgtaattttttgtttttttagttattttaggtgtattagggttggaggaaggatagtttttttttattataggtttttttgatttttggtggttggatttgttgtgtgttttattttttaaggttttttggggggacggagttgtttttggttttgggagttatcggcggggtttagaatagtttcgttgtggtcgggtattgatttttttattattattggtagttatttttttttttgttattcgttttgttttttaggtgtagtatgtggtgttttagaattgtgacgggttttatttgaggagtgggttgtcgcgtacggttattttcgagttttacgggaatatgtatattgaagtgagtagttttgtagggatttagggtttttatgggtaggcgggttttatttattgtgtttttttgtttttaggtttgtattttttgcgtttttaatagggagtacgtgcgggtgttcgatgtgacggagcgtattgttttttatagatattagataggtcggatttgttataagtgtgggatttagttgcgggatattattgtgtattttggggagagggggacgttggggtagtttttgaattgggaagcggcgatcgaggttgttagtagagtagatattattttgtgtttagggtttagtttgaaggtacgtgtcgatgatataatgagtgaatcgagtttttgtttgttcgagggtgtttagttttgcggtttagtattgtatagatttgttttttgtgtgtgtgcggtgtttgtttgtttgtttttataggttttaaagaagtatttacgtttttggtgtatgattaagttttttagtcggcggtcgaagttttatatcgtgaatttgtaggtaattcgggtgttgagagttacgtttttagatttgggttttagaacgtatagttagagatattttatatttatgtattagggcggtttgatagggttttcgtggtgtttagggagtatcgattgagttcgtaggggttaaggttgataggttatcgggaagggttgggttgttgttatttttattcggttttttttgtttttagtggatttcgaaggatgattgggttgttttgaagttatatgggaagtgtgatgacgttatgcggttttttatggtcgagttgggtttggagattttcgtttatagtaggtgagtgagtcgttgtagtagtttgttttttcgtatttttgtgtgttgggttttgtttgttttttttcgtgagttgagtgtggaggaagttttgaggtgtttgtagtggtgtttgaggtatgattgaagcgtggtggtttttagagggtttgatttcggtggttggcggagattttgcgtgtgttatttttgttttggttgatgtggtatatataattttcgcggggagagggattttgttcgcgtgtttttgttttaggttttttcgtggagtttttcgagatgtttggtgggaagtatttggaggggacgagtattcggtagttttggttagatagaatttgtgtgtttggttttgggagttggcgtattttgggaaagtttaaataaattgtgttttaatatagaatttgtgataatttagatttggtgtatgtattgagtaaaaagtttatattttttttttttgtgaatttttagggttttataggggaaattaataattttttttaattaaagggtttaagaaattaaggatttttttattttttgggtttggtattttttgtatgttatgtgtgtggtgttttgtgatgtgggttatcgtgtattgtattttttttttatattaatttagtttattttttttattagtgcgtatttgtattttaagttatgatttgtggttttgtattttcgttagatatatgttttttttacggggtcgtttgtaggttacgtttttttagttagttgggaagggggagagggtttggtttatttgttttagcggtataagtggaaggtggggtttagagttgttagtgatttatttttggagacggaggtagttttggggttattgttgttttattttgtgtgtgtacgtcgtttagtggtggataaggatacggagttttgaggagatcgagttagtgtgggtgtcgatttttgagttattatttaagaggtgattttttttatattcgttttgtagtttggtaataatgaagttgtcgttaattagagtttcgtcgtagttgatacgggagggaaggggatgggaaggtagggatcgtagatagttttttcgagttggggtaggtgtgattgcgagaggtttttaggttcgtttgatgtcgttttttttttttggtaggtggtaggattttatttttttattggcgatttttttgcgtgttggtgaagaaggtagttatagtcggaagtcgttgtgtagaagtagagaggaggtttcgtttggggatcggggtgtatcgtttagttcggtttttattttagggggttggtttggtaggggttgtataaaacgtataaaaaggaagaaagtgacgtaattacgtgttcgatgaagaatagttggtattttgtagatggttagtgttacggtgaaggttgggttgtttttacgggtttagggagaacgaattttttggggatgatatttttatcgtgatatttttagttatttgtttttgaggaagttttttgtattgttgcggttgtattttgatacggtttggttatcgaggatatttgtttattcggtttttgtgttaagaggtggtagtcgtatttttttgtgagaacggaattcgggttattttagtttcggtttgtagagtggaagcgtttagcggttttttttcgtttattaggttagttttagggttttatcgtatttttattattatttaatgaaaaagtgtgaattttatagaattttttttgtattggatgtgcggtagaggggtggtttcgagtttcggttttatgtagatttttttatttttattaaacgtttttgtattggttttcggtgttttcgagtggtcggcgcgggtttttcgggtttaggtttgtcgtttggtagttcggtcgtggtttaaaatttttttggttggataggggataattgtagattattgtgttaaaaaataagaaaaaaaatttttttggttgggatagcgtttcgtggaggttttcggaggtggcggcggtgggacggtttttacgtcgtattgtttcgttagtcgagcgttaggtgtgggcggtgcggagaggttaggtgtgggtcggggggcggggttcggaaagcgcggtatacgttattggttgtgcgtttggagggggcgggattttgttaggggtttacgttattggtcgtgcgcggaggtgcggtggggcgcggttttcggggggtggggttcggggcggagggcgggaggcggggcgggggaagcgggggttgggttcgggtcgagcgtcgatttattggtcgtgcgtagcgggtgaggttcgcgtgacggtcgttgagcgtgcgttggcggggcgggcggcggcgttcggagtcgtcgggagttgttaggttgtttcgcgcgtcgttgcggggttatgattcggaacgggcgcggggttgtaggcggcgtagagtagtcgggttcggggggtaggcgcgtcgtgagggtgtggtgcgatggttggtgagcgcggggttttgtttatttgaggggatggttcgttgttgtaaagaagtgtagaagaagttagggtagcgaggtttagttggtggtagggttgtgtagttttgggtttgagagtttacgtgttagtagatttagatttgtgaatgaaaattttcgagttaggtggtaaggtagtggttgtttatttttagcgttaagtttgttgagtttgaggtcgtaagggaggagagataggatttttagggttagtgatttttagggttttattttgtggttggatttgttttgggttagttttagggattgtttgtttgttttaaggtagtttaggatttaattttattttaagagttaatatcggtttattttaaagtgattgtttagggtagttgatatttggtgaggggataggatacgtggttttgtagtttttagtgggttttagtttgttttgtatttattagttttttagatttagttaggttttgatatttttgtttttgttattttttttagatttggtataggggttttatcgttaggtttaggagttagtggggtggagagttgagtatttatatttttcgaattttagttttagggtttttagtagtagttttttagagcgttttttaaggagtttttagaggagtaaagttttgtttttaatttatagggatatttggtttttatttttggtatagggattatttattttttttgtttttatagt

SEQ ID NO: 1412 - DNA, 5891 bp, Artificial Sequence
  chemically treated genomic DNA (Homo sapiens)
gttgtggagatagagagagtgggtggtttttgtgttaagggtggggattaggtgtttttgtgggttaggggtagagttttgtttttttgaggattttttaggaagcgttttgagaagttgttgttgggagttttgggattgggattcggaggatgtaggtgtttagttttttattttattggtttttgggtttgacggtgggatttttgtgttagatttagaaagggtggtaggggtagagatgttaaggtttggttgggtttagaggattggtgggtgtaggatagattggagtttattgaaagttgtagggttacgtgttttatttttttattaaatattaattgttttgggtagttattttaaaataagtcgatgttaatttttggggtagggttggattttagattattttgagataagtaaatagtttttggggttaatttaaaataaatttaattataaaataaaattttgggaattattggttttgaaaattttgtttttttttttttacggttttaagtttagtaggtttaacgttaagggtgaatagttattgttttgttatttggttcgagagtttttatttataaatttaggtttgttaatacgtgaatttttaagtttaaagttatatagttttgttattaattgggtttcgttgttttggttttttttgtatttttttatagtagcgggttatttttttaagtggataaagtttcgcgtttattagttatcgtattatatttttacggcgcgtttgtttttcgggttcggttgttttgcgtcgtttgtagtttcgcgttcgtttcggattatggtttcgtagcggcgcgcggagtagtttggtagttttcggcgatttcgagcgtcgtcgttcgtttcgttagcgtacgtttagcggtcgttacgcgggttttattcgttgcgtacggttaatgggtcggcgttcggttcgagtttagttttcgtttttttcgtttcgtttttcgtttttcgtttcgagttttatttttcgaaggtcgcgttttatcgtattttcgcgtacggttaatggcgtgagtttttgatagagtttcgttttttttaaacgtatagttaatggcgtgtgtcgcgtttttcgagtttcgtttttcgatttatatttggttttttcgtatcgtttatatttggcgttcggttggcggggtagtgcggcgtggggatcgttttatcgtcgttattttcgggaatttttacggggcgttgttttaattaggggagtttttttttttattttttggtataataatttatagttgttttttgtttaattaagggagttttaagttacgatcgagttgttaggcggtagatttgagttcggggagttcgcgtcgattattcggggatatcggaagttagtgtagaaacgtttaatagaaataaaaaggtttgtatagagtcgaggttcggagttatttttttgtcgtatatttagtatagagaggattttataaagtttatatttttttattaagtagtagtagaaatacggtgaggttttgagattggtttggtgagcgaggaaaggtcgttgggcgtttttattttgtaggtcggggttgaaataattcgagtttcgtttttatagaaaggtgcggttgttattttttgatatagaggtcggatgggtaggtgttttcgatggttaggtcgtattagggtataatcgtagtagtgtaaggggtttttttaaggataaatggttaaaaatgttacggtgaaaatgttatttttaaagagttcgttttttttagattcgtgggggtaatttagtttttatcgtgatattggttatttgtaaagtgttaattgttttttatcgagtacgtgattacgttattttttttttttttgtgcgttttgtgtagtttttgttaaattagttttttaggatgggggtcgagttaagcggtgtatttcggtttttaggcggggttttttttttgtttttgtatagcgattttcgattgtggttgttttttttattagtacgtaggggagtcgttagtgagaaaatgggattttgttatttgttaaaaagggaaagcggtattaggcgggtttgggagtttttcgtagttatatttgttttagttcgggaaagttgtttgcggtttttgtttttttatttttttttttttcgtgttaattgcggcggggttttggttggcggtagttttattgttattaagttgtagaacggatgtgggagaggttattttttaggtggtgatttaaaggtcggtatttatattagttcggtttttttaaaatttcgtgtttttgtttattattgagcggcgtgtatatatagggtggggtagtagtggttttagggttgttttcgtttttagggatgagttattagtaattttgggttttattttttatttgtatcgttggggtaggtggattagattttttttttttttttagttgattagggaggcgtggtttatagacgatttcgtgaagaaagtatgtgtttgacggagatgtagaattatagattataatttaagatatagatacgtattgataaggaaaatgagttaagttaatgtaaaaaaaaaatatagtatacgatagtttatattatagaatattatatatataatatataagaagtgttaggtttagaaggtgaagggatttttaattttttgaattttttgattaaaagaagttattgattttttttataagattttgaaaatttatagagaaagagagtgtaaattttttatttaatatatatattaagtttaaattattataaattttgtattaaggtatagtttgtttaagtttttttaaagtacgttaatttttaaaattaagtatatagattttgtttgattagagttgtcgagtgttcgttttttttagatgttttttattaggtatttcggagagttttacggggaggtttggagtaggagtacgcgggtagaattttttttttcgcggggattgtgtgtgttatattagttagggtaggagtggtatacgtagggttttcgttaattatcgaggttaggttttttggagattattacgttttagttatgttttaggtattattgtaaatattttagagttttttttatatttagtttacgagagaagatagataaggtttagtatatagaggtgcggggaagtaggttgttgtagcggtttatttatttgttataggcggggatttttaagtttagttcggttatgaggagtcgtatgacgttattatattttttatgtagttttagggtagtttagttatttttcggggtttattgaggatagggaaagtcgagtgagagtaatagtagtttaatttttttcggtggtttgttagttttggtttttacgggtttagtcggtgttttttgagtattacgggggttttattagatcgttttggtgtatgggtgtggggtgtttttggttgtgcgttttaagatttagatttaaggacgtggtttttagtattcgagttatttgtaggtttacgatgtaaagtttcggtcgtcggttagggggtttggttatgtattagaggcgtgggtatttttttagaatttgtggaagtagatagatagatatcgtatatatataagggataagtttgtatagtgttgggtcgtagagttggatattttcgggtaggtaggggttcggtttatttattgtgttatcggtacgtatttttaggttggattttagatataggatggtgtttgttttgttggtagtttcggtcgtcgttttttagtttaaaggttgttttaacgtttttttttttttaaagtgtataatggtgtttcgtagttgggttttatatttgtggtaggttcggtttgtttggtgtttgtggagggtagtgcgtttcgttatatcgaatattcgtacgtattttttgttgggaacgtaggaggtatagatttagaggtaagagggtatagtgagtgggattcgtttgtttatggagattttgggtttttgtaggattgtttattttaatgtatatgttttcgtggagttcggagatggtcgtgcgcggtagtttattttttaggtggagttcgttatagttttgagatattatatgttgtatttggaaggtagaacgggtggtaaggggagggatggttgttagtggtggtggggaggttagtattcggttatagcgaggttgttttgagtttcgtcgatggtttttaaaattaggggtagtttcgtttttttagagagttttagaaagtaaaatatataataggtttaattattaggagttaagagggtttgtggtggggaggggttgttttttttttagttttgatgtatttggagtggttgggagggtaagaggttgtatcgtttcggtaaggttgggaagtggttcggggtttggtaagggttattttgttttagatttatgtttttttgggttatgatattttaggtttttggggatttaggtagattaattattatattttattggttgagggtgtttagtagaaggtttttagagatgttttataagttttttttgtgattaggatggtttttgaggtttatagaaaaatgtaagggaattataaaggggaaaggttattagtagttttgaggttgaggttggttgcggatgggatggtttagagggggagttttttttttgttttggagagttaagtataggaggattaaattcgcggtttaattcgtttggtgggtgtttattatgggagttaattggtagatagagggcgggtgtagttagttgtttattggtattaaggtgttttgtttggtttttggtaagtgtattagttatttagggtttttattagtttttgtttatgtagacgggtgatgtttatgtgggtgagggttggttcggtttcgtttaggtcggtagtattgttaggtagaaaggaaggtaaggtgaggagagttggagtttaggttcgtgttgtcgttgtttagtttatgtgggaggttatgtttggttcgtttatttaacgtttttttttttttgaagtagtgtttatattttattagggtttcggtagtttgggatagacgttgtttgtatgtcgagaaaaaaggtaagttaagttaaaaggtattattgtaggtattggtagaatttttagaaacggaaagttattgttatttttgtcgtatttcgggttggtttgtatgttggtttttatttattttataggttgatttgtttgagtttatatggagtgtattttaattcggttttttttttttatttggattttcgtttttcgtttggtttggtttatttttttaggttgtacgtagttttgtttgttttcggaagtttttttggtatcgagtataaagttgggttttgtggtatatgtgttttttatattgtaggggaagattagttatgtttttaaagtgtttttagggtcgagtttatagtttatatatttagtaaatggtgaatttttaggtgggtttaggcgattgtttatttttatgttttagtgttgattattttcgttttattttaataaaggtagaataatttttttagatgagatgagtatttaattttttaggtttttaattttgtgaaataaattgaggtttatagagggtatataagatatgttaggattaaggtgttttgtgtttttttttggggattttcgatttttgtttaaatttagaaaaatgtattattttttcggatagtagtttcgatagttatatttaagacgggaattttaaatatttcgatgaaatttattagttgtatgtgtttttagttgttattggaagttttataatag

SEQ ID NO: 1413 - DNA, 5864 bp, Artificial Sequence
  chemically treated genomic DNA (Homo sapiens)
tttttatttttaaaaattgtggtaaaatatatataatataaaatttattattttaattatttttatgtgtataatttagtattattaagtttagtaagtttttatttattatggatagatttttggaaattgtgattttaagtaatattattggtaataaaattaatttgttatgggatgattgatataaataagagttaagtttttgtaatatatttttggttataaaaatattaataaacgtttaaataaagattttaaatattttttattttaaatattgaaataaatgtgagttatatatttaagaaagattgataaaaataagataattttttttggagatggagttttgttttgttgtttaggttggagtgtagcggtgcgatttcggtttattgtaatttttattttttaagtttaagtgatttttttgttttagttttttaagtagttgggagtataggtgcgtattattatgtttggttattttttgtatttttagtagagatagggttttattatgttggttaggttatttgtagtttttaataattgagtaatatatatttttatgaataaaatttggagtatatttggttttttttattcgatttttttagaatttggaaattgtaagtatttttaatttatgataatatagttatttgtataagtgtattaataatttgtttttatttgtaataggatataattggggaaattggttgtttattaatgtttttatttgatttacggagttaattaaatttttttggaaaaatcgtttttataattttgtttatatagtttttgtatagggtttttgatttgtggtaagtaaagaatgttattttttgataggtttaggagttttaagtttattttggaattttaagaggagaggattattaaatttataggtatttgatggtataaatttatggttgggtttagtttttaaaaagttttatttgaaatattttttatggaataaagttttattaaagttaatttaaaagttaatgttaaaaaataattatttttgttgtattgtatataaataattcggttaaatataataaggtaaatttattatgatttgtttttagtataaatgggaaattagagattggaaaattatagtttattagttgttagattttagttttgtttaatgttttttaatttttattattttttatagtttggattaaattttaatttttgtgggttataagtttttaaaataatgtttttaatttttttttttttttttttttttattttttttaatttggagttatttaaaattaagttgttattaaattaagttatttaaaattaattttcgtgaagttttgtgaattgaagtagataatttaaattttagaagaaaataatgggaatttatttatatatataagttatttttatatttgtttattgatgtatggattttagagtaatgtggtttagattaattttttaagattgtttttattgttttttttttttttttaaatttttttttgataggatattagattttataattttttaaaaatgagtttttttaataatttaggatttatttttttaggaaaaaattattttagttatgagagagtagataaaatttgggaatagaaatttattttttttaaaaatgttttttttaaaatattttaaaaaagaaaaggggggaaatgtgaaaggaaattattttggaattttataattattaagttaatgggaaaagttaagttgggaattgtttagggtaaatttgttttttattttatttagttatttttttgtttattgagataaatgtatgtttgattgttttttttagaaaggtgaattagaaatttaaaagagtgtaattatttgttttttatttatttgtgatttggaagtttttttttatttcgagttgttttattttttttttgagttgttttattttttttgattaatatttattttatatatgttgattgatgttttatatttttttaaaatgtataaaattattttgtgttttgattattttaggtatatgtcgttaggattttttgaggttgttataatcgtgtgtttttgattttcgtaagataaattttttaaattaattgagatttgtttttaatttttggggtttatataggttaaattgtaaaagatttgtgttagaggaggaagtttatttagagggttggggggttttattttatttttggtttataggattttgattttttttattattttaagttggtaatgaaaaaaatagtaaaagtatataggattaaggattttaggttgggtatagtaatttatatttataattttagtattttgggaggttaaggtgggaggattgtttaagtttaggagtttgaggttaatcggggtaatatatgagatttcgttttaaagaaaaaaaaaatatgtagaaaattagagaggataaattaaaattttaataagaaaaatatattaatttggaaatttataggaaatgggtgattgtttaataaaaatatatatgaataaaaggaattttaaaataagaaatatataaataggttagttagtatagaaaagtttggaatgatgtttagatattttttattggaaaagattttagggatatatagatttagagttaagttttaattgaatttggttaaatttgttgatttttagtaaattttgattttatttaaaatggttaaggtttagttgagggaaggggaaagaagtgattttttttaattatttttacggtataatttttgtgaaaggaaaataaaatttaggattataaaattattaaattaaagggtaaagttaagttggaaattatgttaggtaaatttgttttttattttatttttaaataagatagttgttaagataagaggttacgtattttttttaaaatttgtttataaggaaattttttgtggataaaggatagatagaatttaaagttatttttttaaggtgcgtttgagataaatgtatatttaattgtttttttttttttattgtttacgtaaaaatgataatttattgagttagattaaattgtgtatttagtggaaggttgattaaggatttaaaaaaatgcgattttttgttttttatttatttatgatttggaagtttttattttaagtttcgttttatttgattaaagtatattttatatatattgattgatgttttatgtttttttaatatgtataaaagtaagttgtattttgattattaagggtatatggttattagggttttttgaggttgtgttacgggtgtaattttaattttggtgaaataaattttttaaattgatggatgtcggatgtggtggtttatgtttgtaattttagtattttgggaagttgagacggatagattaattgaggttaggaattcgagataagtttggttaatatggtgaaattttgtttttattaaagatacgaaaattagttggttgtattggtatatatttataattttagttgtttaggaggttgaggtaagaggatcgtttgtttgggaggcgaaggttgtagtgagtcgagattatgttattgtatttttttagtttgggtgatagagtaagatgttattttaaaaaagaaaaaaaaaaattgatggagagttaatttttggtttataatgtaaatgtttatttaaaaatagatattattttatgtattattataaatatattgttatttagttgttcgggaggttgaggtaggagaatgtttgaattcgggaggcggaggttgtagtgagtcgagatcgtattattgttttttagtttgggcgatagagcgagattttattttaaataaaataaaaataaataaatatattgttaattaaattgtgattttgttaaaaataaatgttgttgatgattttatttttattaaagttattgtagtagttaagggaaagttttttttttgttttttgaaggtttattgaaaagttaattgataaaaggtatattaattggagaaagggtatataaatttattaatatgtatatgggggagaattagagtgattttgttgaagttttaaatggggtttagaaatttatatattattttgaggttatagaatgggggtttggattgtggtataataggttatgcgggtggagatttggttgataattacggttttgttatgtaaatgaaattttttaagtagaattttttaaagagaataggtggtatatgttttttttagatttttgtaaattaatagtaaaattttaaattttttaatcgattgatggattttttgtttgtttaagggtattttgaagttaatttgaaaaattagtttaggtaatgatgggaagtgggggttggttatgttttattatatattttttttttggaatttaggtatagtaagttagtattaatattaaaatagagattttaagattgatagaaaagatttttttgtagaggtttttttattatttttaggtatataggatttttggttttcgttgtagggtttttattttatttgtttaatttttatttgttttttattgtttatttttggttagtattcggttagcgtataggttttttatattttgaggtggatattagtagggaaggtttgcgggagggttttgtttttttggcggttattcgtaggtttatagtaagatatgtgtagaggtgagcggagcgtcgttattagttgttatttttttaaagattagaattattttagagtattcggaggtattaggaaagcggttcggaggtagaggcgttaggggcggggttgatgtcgagaggttttttttgtttcgttttttcgtattggttttgtaatcgttttcgttagacgcgttttcgttttttgtttttcggaaaggtgttcgttttttgtttttcggttcggcgttcgattttcgtttttcgatttagttgtgggttgcgttttacgttagttcgcgtttcgtatggttgtcgtcggggttaggtttgtggagttgggtttcgtcgagtcggcgtcggcgtggcgattgcgtagcgagtagttttttagtaaggtgggcgggcggtcggtatggttgggcgcggtcgggttgtcggggttttaggttttggtttgcgagttgtgcggtcgttcgtttttttttttgttgtaggtgtatgcgtcgttgtttggtcgttcggacgttttttatcgttgtattttttttttttgttgtcgcgagtagtcgtgttgtgtcggtttgcgaggtgagtcgttaaacggggtcgggacggggttatgttttcgacgcgtgcgcggcgttaatttcgggagcgattagggggacggcggtaagtatcgttgtcgttttagttttagagtttttttttcgcgttgttttaggagtattttttttcgggtttttttaggatgtgtttatttttgttatataagtttttaattgtgtttacgcgtattggtaatttttagtttttaattagtgggtattaggtatggtgttaatttagataatagaaattgttttggaaagatggattttagtagttttttcgtatttttggtagtcgtttttaacgattagttttattaatttgattaatttaaattatttttaggaggtaatttagttgcgtgtatcggacgaaatttagtttttggattttaaaagtttatttttgaaagtaaaaatttttattttttttttgttgttgttatttttagttttacgtgtagaggataaaatatgtgaattgttgttttgtttgaagataaaatttttttttgtatttttttttagt

SEQ ID NO: 1414 - DNA, 5864 bp, Artificial Sequence
  chemically treated genomic DNA (Homo sapiens)
attaaaaaagaatatagagaaaagttttatttttaaataaaatagtaatttatatattttattttttgtacgtaaaattgaaaataataataataaaaaagaaatgaaagtttttgtttttaggaataagtttttaaaatttagaaattagatttcgttcggtatacgtaattgagttgttttttagaggtggtttgagttaattaaattaataagattgatcgttaagaacgattgttaaaaatacgaaaaagttattgggatttatttttttaagataatttttattatttgaattaatattatatttggtatttattgattaaaagttgggggttattaatgcgcgtgggtatagttagaagtttatgtagtaaaaatgagtatattttggaagggttcgggagaaggtgtttttggggtagcgcggagagggagttttgaggttggggcggtagcggtgtttgtcgtcgtttttttggtcgttttcggaattaacgtcgcgtacgcgtcggaggtatggtttcgtttcgatttcgtttggcggtttatttcgtaggtcggtatagtacggttgttcgcggtagtagaagaggaagatgtagcggtggaaggcgttcgggcggttaggtagcggcgtatatatttgtagtaggaaggagagcgggcggtcgtatagttcgtaggttagggtttggggtttcggtagttcggtcgcgtttagttatgtcggtcgttcgtttattttgttggggaattgttcgttgcgtagtcgttacgtcggcgtcgattcggcgaagtttagttttataggtttggtttcggcggtagttatgcggggcgcgggttggcgtggggcgtagtttatagttgggtcggaaggcggaaatcgggcgtcgggtcggaaggtaagaggcgggtattttttcggaggataggaggcggaaacgcgtttgacgggagcggttgtaggattaatgcgagggaacggggtagaggaaatttttcggtattagtttcgtttttggcgtttttgttttcgagtcgtttttttggtgttttcgggtgttttgggatggttttggtttttgggagagtggtagttggtgacggcgtttcgtttatttttgtatatgttttgttgtgggtttgcgggtggtcgttagggaggtagagttttttcgtaaattttttttgttggtgtttattttagggtgtgggaaatttgtgcgttggtcgagtgttaattaagagtaggtagtgaaagataaatgaaggttgaataggtaaagtgaggattttatagcggaaattaagaattttgtgtgtttgagagtaatgaagaagtttttgtagaagagttttttttgttagttttaaggtttttgttttaatgttagtgttggtttgttgtatttgaattttaagggaggagtgtataatgaggtatggttaatttttattttttattattgtttgaattagttttttaggttaattttagaatgtttttgggtaagtagagggtttattagtcggttggagggtttagaattttattgttggtttgtaaaggtttgaaagaaatatgtattatttgttttttttaaggagttttatttaggaggttttatttatataataagatcgtggttgttagttaggtttttattcgtataatttgttatgttataatttaaatttttattttgtaattttaagatggtatataagtttttgaattttatttggggttttagtaaaattattttggtttttttttatgtgtatgttaataaatttgtatgttttttttttaattaatgtgttttttgttagttgattttttagtgaatttttagaggataaaaaggaagtttttttttggttattatagtggttttaatggaagtaaagttattaataatatttatttttgataaaattatagtttagttggtagtatatttgtttgtttttgttttatttgagatggagtttcgttttgtcgtttaggttggagagtaatggtgcgatttcggtttattgtaattttcgtttttcgagtttaagtatttttttgttttagtttttcgagtagttgggtagtagtatatttgtaatggtatataaaataatgtttgtttttaaataaatatttatattgtaaattaaaagttaattttttattaattttttttttttttttttgagatggtattttgttttgttatttaggttggaggagtgtagtggtatgatttcggtttattgtaattttcgttttttaggtaagcgatttttttgttttagttttttgagtagttggaattataggtgtgtgttaatataattagttaattttcgtatttttggtagagatagagttttattatgttggttaggtttgtttcgaatttttgattttagttgatttgttcgttttagttttttaaagtgttgggattataggtatgagttattatattcggtatttattaatttagaaagtttattttattaagattaaggttgtattcgtgatatagttttagaaggttttgatgattatgtgtttttggtggttagggtatagtttgtttttatatatgttagggagatatgagatattaattagtatgtgtaagatgtattttagttaggtaaagcgggatttgaggtgagggtttttagattatgagtagataagaggtaaaagatcgtatttttttgagtttttgattagttttttattgaatatataatttagtttggtttagtgaattattatttttacgtaaataataggggaggggaagtaattagatatgtatttgttttaggcgtattttaaagggataattttgagttttgtttgttttttatttataaggaatttttttgtgggtaaattttaagggaggtacgtagttttttattttggtagttattttatttaggaatagaatgggaggtaggtttgtttgatatagtttttagtttgattttattttttggtttagtgattttgtggttttgagttttattttttttttatagaaattatatcgtaaaagtaattgaagaaaattattttttttttttttttttaattaggttttgattattttaaataaaattaggatttgttgaaggttaataaatttaattaagtttagttaaaatttaattttgaatttgtatgtttttggggttttttttagtgagagatgtttaagtattattttaagtttttttatattaattggtttatttgtatgttttttattttaggattttttttgtttatgtgtatttttattaggtaattatttattttttgtaggtttttaggttaatatattttttttattggaattttaatttattttttttagttttttatatattttttttttttttgagacgaggttttatatgttgtttcggttggttttaaatttttgggtttaagtaatttttttattttggttttttaaagtgttgggattataggtgtgaattattgtatttagtttagaatttttagttttatatatttttgttgttttttttattgttaatttgaaataataaaaagggttagaattttataaattaaaaataaaataaggttttttaattttttgaatggatttttttttttgatatagattttttataatttaatttgtatgaattttaaaaattggagataggttttagttaatttagaaaatttattttgcgaaggttaaggatatacgattatgatagttttaggaggttttgacgatatgtatttaagatagttagagtatagggtggttttatatattttagggagatataagatattaattaatatatgtaaaatgaatattggttaggaaaggtgggataatttaaagaaaaaatgggataattcgaagtggggaggggtttttaggttataggtaggtgagagataaatggttgtatttttttgagtttttgatttatttttttaaaagaggtagttagatatgtatttattttagtgagtagagggatgattgaatggaatgggaagtaggtttgttttaagtagtttttagtttgattttttttattagtttagtgattatgggattttaaggtaatttttttttatattttttttttttttttttttaaaatattttggagaaagtatttttgaagaaaataagtttttgtttttaggttttatttgtttttttatggttaggatggtttttttttagaagggtaggttttgagttattaggaaagtttatttttagaaggttgtgaagtttaatattttattaagagaaaatttggggaggaagggagaataataagaataattttggaaaattgatttaggttatattattttgaagtttatatattagtaagtaggtatgaaagtggtttatgtatgtaaataggtttttattatttttttttgaagtttaagttgtttattttagtttatagggttttacgaaagttagttttaagtgatttagtttagtgatagtttagttttaagtgattttaaattaggaaaaatggggaaaaaaagaaggaaaaaaattgaaaatattattttgaagatttgtagtttataaaaattagaatttggtttaaattgtagaaaatgataaaaattgaaaaatattaggtaagattagaatttaataattggtggattatagttttttagtttttagttttttatttatattaaagataaattatgataggtttgttttattatatttggtcgaattatttgtatatagtgtagtaagaataattattttttaatattggtttttaaattggttttgatggaattttgttttatagagggtattttagataagattttttaaaagttgagtttagttatggatttgtgttattaaatatttgtgagtttggtgattttttttttttgaggttttaagataaatttgaggtttttgggtttgttagaaagtgatattttttatttattataggttaggaattttgtataggagttgtgtagataaagttatgaggacggtttttttaagggggtttaattggtttcgtaagttaagtaaaagtattggtaaataattagtttttttaattgtgttttgttataaatgaaaatagattattagtgtatttatgtaaataattgtattgttataagttaagaatatttatagtttttaaattttggagaaatcgggtagagagaattaaatgtgttttaaattttgtttataggagtatgtgttatttaattgttaaaagttgtagatagtttgattaatatggtgaaattttgtttttattaaaaatataaaaaatagttaggtatggtggtgcgtatttgtatttttagttatttgggaggttgaggtaggagaattatttgaatttgggaggtggaggttgtagtgagtcgagatcgtatcgttgtattttagtttgggtaatagagtaagattttatttttaaaaaaaattattttgtttttattaattttttttaaatgtatagtttatatttattttaatgtttaaaatgagaaatatttggggtttttatttagacgtttgttgatgtttttgtgattagaaatatgttataagaatttaatttttgtttatattaattattttatggtaaattggttttattattagtagtgttgtttaaagttatagtttttaagaatttatttatgataaatgaggatttattggatttaatagtattgaattgtatatataaaaatggttaagatgataaattttatgttatgtgtattttattataatttttaaaaatgaaaa

SEQ ID NO: 1415 - DNA, 14112 bp, Artificial Sequence
  chemically treated genomic DNA (Homo sapiens)
tggtatttataggttagtggttagagttttattagggtgagaaggtttgagagaagtggcgggagttttatgtaagaataatttttattttttttaggtgaagatttgtggttttttttttagcgttggttttggagtttagaggtgaatttgtaagtgaggtaggggtgtgtgtgtgtgtgtgtgtgtgtgtgtgtgtgtgtgtgcgcgcgcgcgtagagtttgtagtaataattattattgtgatgattaatatttgtggggtgtttattttaggttttattattttaggtgaattaatttatttaatttagtgaggtagggattattgtttttacgatttatagaggaggaacgtgaggtttaggaaggttaaggaatttgtttaaggttatagagttagtagatggtagggtagggttttgaatttaggtggtttttgacgggaagtttagttttttgtttttttttagttttattttttttatttgtataatgggtatatacgatggtaatgttttttttttgggcgattgtgagggtgaggtaggtagaggggaaggaagtgttttgtggatagttaaaggttttgtagatagggaggtaggggatggggtagtaaggggtatgggggagttgatgagggttacgcggagtggggtagggtttggagttttagattatttgtggtatggttttggacggtttttagtttagagttttattttttttttattaagtatggagaagtagagttgtttggtttaggtgttgttggttttttttagtggcggggaggtttttagtgattatcgtttttatttttttggatttgagggcgtgagtttgttttcgggatggaatttaattttttttttggtatttttttattttagttagtgttttggatttttacgtttagggtgtaagatgttttttatggatgagggtttggatagttttgagtatatagtttaaaaagtttttaattttgggtagtatttttattttttacggttgtggttattttttttttttttggtttagatttgttttggagtggagggtggagagttacgggggtgtgggcgtttttatttttagttttgttggagaattttattttttagtggtttgaacgcgaagatgggcgggggtttttttagtttttttatttaagtgttttttagatttagttttgatgaagtttcgaggttagatgagattacgtgtatttagggtggtgtggttttagattttttttagttttgatatttttagaaggggtgttttttaggggttttgtgtttttaagtttagaggtttatgttataagtttttttttaattttttttattttttaggaagggtttggtatttttgtaataattggttaggatttagaaagagaaattggtaggattttaattatttatttatttttttagcgagcggtattttttgagtagttattgtatgttaggagttggtaggaggtttttgaatattttggatttagtttagtgttagattgatgattaggttatgacgatgttaggtgtgtatgttgtggagtttggaataagtgttaagtttggtgggttttttggaggaggtgtttgttatatttagtttggtaggaggtagacgattaggtgttattaaaaaaaaatttttaggttgggtgtggtggtttatgtttgtaattttagtatttcgggaggttgagtggggtagattatttgaggttaggagatcgagagtattttggttaatatggtgaaatcgtttttattaaaaatataaaaattagttgggtatggtggtaggcgtttgtggttttagttattcgggaggttgaggtaggagaatcgtttgaatttgggaggtagaggttgtagtgagaagagatcgtattacggtattttagtttcggcgatagatcgagatttcgtttttgagatggtttattgtagttttgaatttttgggtttaggggatttttttttttgatttagttttttgagtagttggggttatatttagatatatatatatatatatatatatatatatatatatatatatatatatatttttttttttttttttttttttttttggtaattttttttaagagatgggatttcgttatgttgttgaggttggtttcgaatttttggttgtatatgattttttggttttagttttttaaattgttgggaatataggggtgagttatcgtgtttggggaggtgttttttatagattgtttttttgtatagagaaggtataagaaaggagtttttagtataatatttaggtttaggtgttacgtaggtgttacgtagtatttaggtttaggtgtttgttgggtttttttttgttatttttaatttatgtattggtatttgtattgtaatgatttgggtttattttattgagagtatgggaagtttttgagtgtcgaggttgggattttttttttattttattttttagcgttttatatagggtttgtaaatagtaggcgttttacgatgttgttttgagtagtttttttttttttttaatttgtatttaagttagagtttatatgggtttattattttttagttggtagagtaggtttttatatattaatgtatgtggcgtttattaaagcgttgtgttaaaagtgttattattgttattagtattatttgttagaaaattgtatagtacggtggttttagtatgtgggttttgtagttggattgtttagatttaagttttggttttattatttacgggttgtgtgattttgaataagtgtattggtttttttgtgtttttatttttttatttgtaagataggaataatatattttataggagtatggagaggttataggtagagtaagaaaaatattagttattatatagttagtttattaattatggtagttgttattattttatttatagaagatatagaaggttaaggttaaatgatttagttgttcggtggaagagggtttttatttttgagtcgttagattttaaatttagtgtttgggggttattttttcgtttcgttgttttattttttttgttattttgttttttaatttatttgtttatatatttggttgttttttttaatggggttttttaaaggtaggggtttgtattaggttggtttatatttgtttttttagtgtttggagtagtgcggggttattagtgaatttgaaggttgtatggaaggttttaggcgtttgttttttgttaaggtgttttgttgagcgtttttatatggaggattttatgggagtttttagattattttaggagtagggtaaaaattttttataattgtattgaggtataataaattgtatatattttgttgtgatgtacgtatatatttataagtttattattataattaaaaatgataaatatttttattattattaaaattttgttatgtttttttgtttttttttatttttttttattatagatttatttttatttttttagagatagggttttgttttgttgtttaggttggagtgtagtggtatagttataatttattgtagttttaaatttttgggtttaaaacgatttatagttttttgagtagttgggattataggagtttgttattatatttagttttagtttataaatttatttttagtttataaaggaggaaatcgaggtattgagaggttaaaaaatttttttgtagatatttgtttagtaagtggttattttaggatttggattaaggtgatgtgtttttaggttgtgtttttgttattgtgttacgttgttgggtggtaggtagtagtgggtgggtgtttgtagtggtttgtaaagattatttgagatgtttttttttttttgttttattttgtttaggtttaagaagatagtttatgaagagagagtaggtgtgatttttttagtgtgtttttttgtgagaagtaggttgatattttaaagggaagggcggataatagagatagtgtaagcggaggagatgagggtgttttaaagtcgggaggttgggtgatgtaggagtttgcgtgtttcgaggggggtgttgggtttagtgtgagtacgtgtgattgtgattgagatagtgtgattgttgaaggtagggatatagtagttttttgattgggggtagaaggcgttaattgtgtgaaggttggttgtgggtgggtgggttttgggtttcgaattcgggggttgagggagatagtaaatagtagggtgattgacgggaagattatgttggtagttttgcgaagatgttgtagggttgtgggggtttgtgtgattttgtagtttaataaatttaaatttagttaacgttggtagggtttgttgtgttaggtaattagttaggaggaggagattcggatttagtttgtagttgaagggcgttggttgtcgggttttgtgggtttattttgcggtgtttttttttgttaatattgagtttttataatagttttatttttaggttgaggttagatggaggggatagagggaagtgatttgtttaaggtgatttaagttttcgagtgttagggtaggatttgaatttaggtttttagattgtagagtttgagtttttttttgttatgtttgtgttagggtggaaatgtttggttttggaggggagcgtggatttttggttttggttttggagatatttttttagattacgtgggtttttaatttgtttatggttattgtgttgaggggcgggacggtgggttatttttagtttttttttttttagggttagatttatggattgaagggttgttcggtttttagagattttttaagcgtttcgttttggttttaagtttttttttagttttcgcgtttttttttttttggcgttgatttcgggttagaagaggaaaggttgtttttatttatttttcgtattttttttttttttttataaaggtcggaatagttgaaagggtggtaatttttttttttgtagtcgggagcggtttgtttgtttttttgcgtattcgtagtttttttcgttgtttttttagggttttttttcggtcgttagcgtttattttttattttttagatagagatattttgcgcgtatatatatatatacgcgcgtaaaaaggaaaaaaaaaaaaaaaagtttattttttagtttcgttgtaaagagaaaatcggagtagtcgtagttcgtagttcgtagttcgtagttcgtagttcgtagaggacgtttagagcggcgagcgggcgggtagacggatcgacggattcgcgtcgcgtttatttgtcggtcgggtttagtcgagcgcgtagcgggtacgtcgcgcgcgcggagtagtcgtgttcgtcgttcgggtttcgcgttagggcgtatacgttttcgtttttttattcggttcgggcgggagtttgtatttttttttgttcgggtgttcgagttgtcgttgtaaagttaattttggaaaaagttttttgggggagatttgggttttgaggtgtttagtttcgcgtttttcgattttgggggtttttttagaaaatgttgtaaaaaagttaagtcggcgggtagaggaaaacgtttgtagtcggcgagtgaagacgaattatcgattgtcgtgttttttttttttttggaggttggagttttttgggcgtttttatacggttagacgtttcggttggttcgcgacgtagtttttcggtcgtggatgtttattcgggttcgggattcgtttaggtagcggtttcggatttaggttttgcgtttaggtttttttttgttttttagcgacggagtcggggtcgggggcggcggcgttcgggggttatgcgggtgagtcgcggttgtagaggtttgagcgtttgatcgtcgcggattcgagtcgagtttatttttttttttagttttttattttggtcgcgggggcggcgcgttcgatttacgcgttcggggtttcgcggggtcgggttcggagtcggtatgaatcgttgttgggcgttttttttgtttttttgttgttatttgcgtttggttagcgtcgaggtgagttgttacggcggttggggttggttttttatttattattttcgttttttttttttgatcgtttttttttttttttgtagtgaattttggatttttgtagttcgcgagtttgacgtcgggcgttgggtgattttttcgggttgggagcgaggttcgggggtgataggttttaagggaaggtaatagcggtggttttttttttaatcggcgggcgaatttggttttttaagtcgtttcgtgtcgggggagggtgtgtgtggttttgttttttattttttgggaattcgagaataagttttttttcggtcgggggagagggggtggggtggtgtttagggtgtagaaggtagcgcgttttttcgagtttatttcggcgttagtttcggtttaggttttgttttgttatcggtttgtttaggaggtgtaagtttgcgtatcggtgttatttacgtcgatttttgacggggttcgggttttattttggttttcggtcggggttcgggtggacgtttttcggtacgcgtagggtatgttcggttttagagtacggtttggaagtagtttgtgtttcgggcgcggggtttggggtgggagtaatagggagagagagagagagagagagaaagagagagagagagagagagacggagagagagacggagagagagagggagagaaagatagagacgtaggtaggtttcgggtattcgggtagggggaggattaggggttttgaaggaatttagttttcggggcgttgtgtgtttgaggttttgtcgtatttgtgttcgcgttttgtaggaggaagtatttttttttttcgtatgtagggtgcggagcgcgtcgtttgtaaaagtttagttgtacgggagatggggtataaaaatatttgagggagcgttggggtcggagtcgtttttattttttttagttttacgtagtcgtgagttggtaagtttattcggaatttaggtgggaaagggggcggggtaggacgacgcgcgcggtggaggggaggagagggtagtcgggagcgcggcgtgattgggtatcgttttattttcgttcggttgcggtcgggagttcgtatttcgttcgtatttcgtcggttttcggggagggtcggtttttgcggtttttagttaggcgtaggaaggaggtagcggcggcgaaggggttaaggcggagggttcggaggtcgcggttcggttttgggttgtcgttagcgtaggttgttttgattacggaggagtcgtcgtcgtttttttttgttttcggggtttttcgagggtcgtaggtcgttcgttcgggggtttcgttttttcgcggtcgtttttcgcggttcgtattcgggagggaggacgcggggttcggtcgggtcgtttttaggtttttttcgacgtttttttttcgtttttttcgtagtttttcgggtcgcggttagttgttggggagggggtggtcggtcggttttagttgtcgtttcgtttcgtcgtgggatttgggggttgggttcggtgttagggcgttttgggaacggcggcgtttcgtggttgtttttcgtagtttatttcgttcgggttttcgattcgtttatttattttacgtatgtatatttttggtcggaggcgatgttgcgtttcggcgggcgggcgcgtagagcgacgggtacgtattatcgcggttaggtcgcgcgttcgtttttgttacgttcgtgtatacgcgggatatacgcgcgcgtatcgtatataaacgtacgtacggtttttgtacgcgcggtttgagtatacgtgcgcgtatatttacgtacgtatataggtacgtacgggttttcgtgtatttagcgtttggtgttcgttttcgcgtaataggtgggtttttcgtgggttttggtattttattatttttgtagcggttttattttttttttggcgttttgtgagggagggagaattttttattagtattatagtatttatttttttttttgtttcgttagttcgacgttttttaaattttatttatttgtgattttttttttttaattattttcgcgtggtggaaaatggtggtgatgtgattttgaggggtattgagttgtttagagcgattttttttttatataagtttttatttgaatttgtaagattggagggatttggcgtgtgtaatcgcggagggggtttttatttttggttgttgtatttttttggttgattttagcgtgtttcggggaggtcgttgatagttggatgtttttttagtttttttttattatttttagtttcgtttagtatttttttttttttttttatagttttacgggttcgtgtatttggggtggaggttgtggtatagaaattgtttttttttttattttagttatagtatttttgaatatatggttataggcgcgatgtatgtggtattttgtagtttatgaagtattttgttgttaagtttgagtgagttttaggttggttttgggggaggggatttgtatggggatggaattacgtaggggttagtttaggaaggagttgtaatggttagtgttgggagagttagggtaggtttgttggtggaggtggttttggagttgtttacgttttggtcgtgttcggattaattttttagtagacggtaggtagtcgtgaggtagggttgggtggagggtttgtcgaggtttttgaggtgttatttttattagttgagttggtttttaggagggcgagttttattgttacgtgacgcgtttggttttagtatatttttttcgggaaagagtgaagggttttattgttttttgttatttagttttttttggttttgttaatggttttagggggtaggagattaattgttggaattttagagttttggaggtgtgtaagggtaggttaaatagaatttggaggatttggtgtaagagttaggaagagagagagagagagagtgtgtgtgtgtgtgtgtgtgcgtatttgagagagagagagagagagattgattgagtaggaatggtgagatgtttattatgggtttcgtaagtatttttttacgttttgtttttttttttttatattgaggagttttttttgtgataattttttttatgttttggtttattttattgtttattatttgttttttttattggagtgttaattttattagagagttttttttttggtttttatttttagaatagtgtttagagttttgtggataattagtaattattagtgtaaagaatagttagtgttgggttggtggggagggtaggatttggttttttgttgttttatggttttattgagttttcgttttgttttgtttcgagggtagtttttttttttagttttttggtaggtattagttttttaaagttttttattttgagagagaagtatgtttgttttttttttgttttgggatttgggttattaggattagataggatagaggagaagaaatagaaagaaaattagattgtaaaggttttgtgtatttttagttggggttaagtttttgttatttaaaaaaaaaaagagagagagaagattggattagtgtagagtttttaaagaatggtagaattttttggtttcgttttttggttgggatggggatgggtagtgattgtcgtggttgttagtattataaatggttggattggtttttttttttttgttttaatttttttttgtttttgtaagaggtggggaggttagggttttgggtttacgtgaaggagtagaggttgagcgggagggttttaagagtaataaagaaggggaatgttaggtgggaaatattggttttaatggtttttgtggtttgtttcgagagggtttttttaaaggggttggttggttttggtattcgatttaaataaggtttgcgatttttaggtaggtaggttttgggaggttttattagtttttttttttgttagttatagataacgtttttggttgtttgggtttgtgtgttttttggtgggaatggtaggcgggtcggggagtgtgtatttgtgtgtgtgtgttgggtttaggaggagggtggggtttaagtttttttgatttgttagtttggttgggagtagattatttatttggttttacgttcgttcgtgttttttttatttgttgtagttggcgttgggggcggggtcggaggaggttgtttattttggtttttacggttggttttgttttagttgttttttcgttacgtttttattttgttagaaatttcgggtttgagattttgggatagtttttttagggtgttaggtttttttttttatttttgaagtgagttgtttatttggaggtttgcggaatttgtgtttaggaaaattaggtttcgggcggtttatttttttatattaagaagagtttgtgatttttaataggtgtttatgttcgttatttttagagtattgtattttggagttgagtacgtgttgagtgtttttttatttttatttatttttagtttcggaagggttttgtaagtttatacggtttaggttttgttagtgtggaggtagggtattattttttgtggtttagtataagggataatgtaaagttacgtatttttttatgggtaggtagttttttatttattttttgttatttttaaaaatgttttgtgttgttggttttgagtacgtgtgttattcgttgttgtttataaaggagttattcggaaagaattaatgatgatgatagtgataatttattaagtttttattatttgttggtagttttgttttgtgtaattatgttttttagtaatttcgggcgaggtattattagttttatttaaaagatgtagaagtcgaggttttagattgtgataagattttaagaatttaggttgttttggtatttggagtttttgttttttttttcgttatagggttttttagtttttgtatttttgatgtttgggaaggtcgttttgtgttttgaagggtggtgagcggtattttcggttttttttaatttaagatgtagtgtatattttaagttgtggttattagcgatgtttttatatattgttattgttttttgggggtttattgggttttggttgagagtttttgacgtgggatatgttgtagagtaaagagttaatacgaattttgtgtgatgttgagggttagtggttttagaatataggagagggaggttgagacgttttatggtgggttggaataggtgggtagtttggagtttgggaacgatttagttttgttatttgttaattgtttggatttgttgttgtttgtttaattttttttaagttttagtgtttttatttggaggatggggatataaatattgttagttttttaggattggtagtttatacggtgttttttttagcgtgtggtttgtagttggtatttatagatgttagttgtggtattattattaaattcgggggtttatgggtagttttgggtatttagtggttatattattaaaagtatttttagggacggtttttttgtttagattaaaagggattttagttgtttatttgtttagggttggggaagaatattttaggtggtttttttggtggaggaggtagaagaattatattggatagaatttggaaaatggtagatttttttatgtatttgattagtatttatcgaggatttattatgtgttttttttttttttttagattttattttgggtttttttatatttagttttggaggggtattttttatgtgtcgtgggtttggatttggggtgtttattcggtttgtttaggggtttgttttttttgtcgtggttggtagttgtagtcggttttttagtgggtagggagattttggtataagtattaaatgttatttgttattaggtttttgggttttttttttggggggttaattgaatttttattttataaacgttttttgttttttttttgttagtgatttagggaggtttggttaggtattcggttttggcgttttttttgttttttttaacgttttttggtagaattagaattgaatcgaatgttttttaagtttttcgatttatagatgagagttaggattataggggtagtgattagtcgaggttatacggtagttggtttaaaggcgtgggatttagttttttggtttgttagttttgggtttgatagaatttttaggggaagcggttttcgttggtgtttattggagattaagttttttgttttgtgggttgggtattttgttaatatttggagagtatcggaggcgtggttttttttttgaggtggaaagaatgaatttgtttgagggcgggaggaggtagagttcggaggagatggggtcgaaagtgaggggtagcggggtttatatttttttttgttttgtacgtgtagtttttggttgttcggatattgaaggaaagattttagtttttagttaagttttgttatttttttttttttaagttgtttagtagtttttagatattgggcggagttgtaagttttatgtttaaataaagatatggagatttaggggttttagggaatgatgtagttttaaaagtggttatttttatttttcgttttgagttttttggtttttggatcgatgtgggtggttagagttggttatggatgaatttttggaggtgttgttagattttatgataagttggaggaaatagagttttcggggagagttttttgaggttggttatagggttgagacgatttttttttttttttttcgtttttttttcgtcgttaggtagcgagaaagtagtattttttttgtgaaggtagtttgtatcgattttttttgagtttttcgattttcggtttcgggaatgtggagcgaattaagaagggaagttttttttttttaatttagggaaattgaggtagaaaatagtttaatttaaggttttatagtaatgtgttaagtttattgatgttttttttaggattgtttgtttagatcgtgtagttcgagtgtttgtgtttgtacgtgtgtgtttgtatacgtggaagttcggttttagtttttgaacgtgtagcgatattttaggaattttttttgttttttagtggttggtggtttggattgtgatttttagttttttatttgttttcgttttttttttgggatttttggtattcgttttttgggttttttgggattgtgggggacgtggttgtgatttttttacggggttgtttttgtgttattgtgggatttgcggtttttttggaggaagtttagtttcgaatgaggtttgttgaagtgttattaggtttcgagtatgtttggtaataggttaaaggggttttaaaaatagggtttggttgggtatagggtacgggtaagtttttaggtttttcggtcgtgttcgaggatttttttttcgtttttttcgagtgagagattttatagatatcgttaggatttggggttttttgaggttatcgtattttgtacgcgtttattaagtattttttgtatttaggagtttgggagtataggttttgttattttaaaggtatgggtttgaatgtagtttttgttaataattgagtttttttttgaacgtttgtttttttttttgtaaaatgggggttagattggttatgggagatgttggttgtttttagttgttaggtgtgttgtgagatttagggagaaattagattttggtgtatttttagaatatgtagtttggtgggggagatagatatagagataagtaggtttaatttaaagtaagttggggtttttgttgggggttgagggtgtagggattgagttgggttttagaggtttcggtaggtttaggtttcgaggtttttgtgtttttgattattaggtttggattttgtttgttcgtttttttgtgattttggagttttttataggagaaagcgagaaagcgtgtggtgggggagatagttatgttggaaagtttttatttttagtttatttagttttttggtgtttgttcggtagg

SEQ ID NO: 1416 - DNA, 14112 bp, Artificial Sequence
  chemically treated genomic DNA (Homo sapiens)
tttgtcgggtagatattaaaaggttgagtgagttgggagtgggggttttttagtatggttgttttttttattatacgttttttcgtttttttttgtggaaagttttaaggttatagggagacggataggtaggatttaggtttgatgattaggagtataaaggtttcggggtttggatttgtcgaagtttttgagatttagtttagtttttgtatttttaatttttaataggaattttagtttgttttgagttggatttgtttgtttttatgtttgttttttttattaaattatatgttttgggaatgtattaaaatttgatttttttttgagttttataatatatttgatagttgaagatagttagtattttttatggttaatttaatttttattttatagaggggaaaataaacgtttaaagagaggtttaattattggtaaaagttgtatttaaatttatgtttttgggatgatagagtttgtatttttaggtttttgggtataagaggtgtttaataaacgcgtgtagagtgcgatggttttaggaggttttaggttttagcggtatttatgaagttttttattcgaaagaggcgaaaagggaattttcggatacggtcgggaaatttgaaagtttattcgtgttttgtgtttaattaaattttatttttagagtttttttggtttgttgttaaatatattcgaaatttgataatattttaataggttttattcggagttgggttttttttagggaaatcgtaggttttataatgatataagagtagtttcgtaggaaggttatagttacgttttttatagttttaggagatttaaggggcggatgttagagattttaagaaagaggcgagggtagatgggagattgagaattataatttagattattagttattgagaagtaaagaaaatttttaagatgtcgttgtacgtttaaaggttggaatcggatttttacgtgtgtaaatatatacgtgtaggtataggtattcgggttgtacggtttggatagatagttttggagagggtattaataggtttggtatattattatagaattttgggttaaattattttttgttttagtttttttggattaagaagggaggatttttttttttggttcgttttatattttcggagtcgaaggtcggggggtttagagggggtcggtgtaggttatttttataaaagggatgttgttttttcgttgtttgacggcggagggggagcgagggagaggagaagaggtcgttttagttttgtggttagttttagggggtttttttcgaaagttttgttttttttagtttattatgaggtttagtaatatttttaggggtttatttatgattaattttggttatttatatcgatttaggagttagaagatttagggcggggggtgggggtgattatttttaaagttatattattttttgaaatttttgagtttttatgtttttgtttgaatatggagtttataatttcgtttaatgtttaagggttgttgggtaatttgaggaaaaaaaggtggtagggtttggttgagaattagggttttttttttaatattcgggtagttaggggttgtacgtgtaagatagaggagggtatgggtttcgttgttttttattttcggttttatttttttcgggttttgttttttttcgtttttaagtaagtttattttttttattttagaagagagattacgttttcggtgttttttaaatgttgataaagtatttaatttatagaatagagggtttggtttttagtgaatattagcgaaagtcgttttttttgagagttttgttaaatttagaattggtaggttagagagttgaattttacgtttttggattaattgtcgtgtgatttcggttggttattgtttttatggttttggtttttatttgtgaatcgaggggtttgaagaatattcgatttaattttaattttgttaggaggcgttagaaggggtagagaaaacgttaaagtcgggtgtttagttaggtttttttggattattggtagaaggagaataagaagcgtttgtggagtaaagatttaattaattttttaggggaggggtttaaaggtttagtagtaaatggtatttagtgtttgtgttaagatttttttgtttattggagagtcggttgtagttgttagttacggtagaggaggtagatttttgaataggtcgagtggatattttagatttaggtttacgatatataggagatgtttttttaaggttgagtgtgaaagagtttaggatagggtttgaggaggagagagaggtatatagtaggttttcggtaaatattggttaaatgtatgaaggagtttattattttttaggttttgtttagtatgatttttttgttttttttattaggagggttatttgggatatttttttttaattttaggtaaatgagtaattagagttttttttaatttgagtagggagatcgtttttgaagatgtttttggtaatgtggttattagatgtttagaattatttataagttttcggatttggtaataatattataattaatatttatgaatgttagttataagttatacgttgagaaaaatatcgtataaattattaattttaagaggttggtagtatttgtatttttattttttagatgagaatattgaagtttagaaaaaattaaataagtagtaataggtttagataattagtaagtggtagagttgggtcgtttttaggttttagattgtttatttgttttagtttattatggggcgttttagttttttttttttgtgttttaaggttattggtttttagtattatataaggttcgtgttggttttttattttgtagtatgttttacgttagaggtttttaattagggtttagtgggtttttaggggatagtggtaatgtatgaaggtatcgttggtggttataatttggggtgtgtattgtattttaagttgggggaggtcggggatgtcgtttattattttttagggtataggacggtttttttaaatattaggagtgtagaggttgagaaattttgtagcggaggaaagagtaagggttttagatgttagggtaatttggatttttggaattttgttataatttaaaatttcggtttttgtattttttaaatggggttaataatatttcgttcggggttattgggaggtataattgtatagagtagagttgttagtagataatgggagtttaatgagttgttattgttattattattaatttttttcggatggtttttttgtgggtagtagcgagtggtatacgtgtttagggttagtagtataggatatttttgaggatgataaggagtgggtggagagttgtttgtttatgaaagagtgcgtgattttgtattattttttgtgttgggttataggaaatggtattttatttttatattggtagagtttgggtcgtgtgggtttataaggttttttcggggttgggggtgggtgagggtggggggatatttagtacgtgtttagttttaggatgtaatgttttggggatgacgagtatgagtatttgttgggagttataggttttttttggtatgggaaggtgagtcgttcggagtttggtttttttgggtataggtttcgtaggtttttaggtggatagtttattttagagatgggaaaggaggtttggtattttgaagaagttgttttaagattttaggttcggggtttttggtagagtgagggcgtggcgaggaggtagttggggtaaagttagtcgtgggagttaaggtaaatagtttttttcgatttcgtttttagcgttagttgtagtaggtaggaagggtacgagcgagcgtgaggttaggtgagtgatttgtttttaattaggttggtagattaaaggggtttgaattttattttttttttgggtttagtatatatatatagatatatatttttcggttcgtttgttatttttattaagggatatataggtttaagtaattaggggcgttgtttgtggttggtagaggaagaagttgatgaggttttttagagtttgtttgtttgagagtcgtaggttttatttagatcgaatgttaaagttaattaatttttttgaagaagttttttcggggtaaattatagaagttattagaattagtgttttttatttagtattttttttttttattgtttttgggattttttcgtttagtttttgtttttttacgtgggtttagaattttggtttttttattttttgtaggagtagaggaaaattaaagtaggaagagaggaattagtttagttatttataatattggtaattacggtaattattgtttatttttattttagttaggggacggggttaggggattttgttattttttgggaattttgtattaatttaattttttttttttttttttttttttaggtggtagaaatttagttttagttaaagatatatagaatttttgtagtttgattttttttttgtttttttttttttgttttgtttaattttggtagtttaagttttaagatagaggagagatagatatgttttttttttaagatggggggttttgaaagattgatgtttattagagggttgaaaaggggggttgttttcggagtagagtaaagcgaggatttagtggggttatggagtaatagggggttaggttttgttttttttattaatttagtattaattgttttttgtattaatagttattgattgtttatagggttttgggtattgttttaaaagtggggattaggaggaaagttttttaatggggttgatattttagtagagaaagtaggtaataaataatgaaataaattagaatataggaagagttgttatagaagaggttttttaatgtggggaggggaagataagacgtggagaggtatttacgaggtttatgataaatattttattatttttgtttagttagttttttttttttttttttttagatgcgtatatatatatatatatatattttttttttttttttttttttggtttttgtattagattttttaaattttgtttgatttgtttttgtatatttttagggttttgggattttagtagttggttttttgttttttagggttattagtaaagttagaggaagttggatggtaaagggtagtggggttttttattttttttcggaagaagtgtgttgaggttagacgcgttacgtgatagtgggattcgtttttttggaagttagtttagttggtggagatggtattttagaggtttcggtaggttttttatttagttttgttttacggttgtttgtcgtttgttgaaagattagttcgagtacgattaggacgtggatagttttaaggttatttttattagtaggtttgttttgatttttttagtattggttattatagtttttttttggattgatttttgcgtggttttatttttatgtaggtttttttttttagggttagtttgaggtttatttaggtttagtagtaaagtgttttataaattgtaaagtgttatatatatcgcgtttgtggttatgtgtttaagaatgttgtgattaaagtgaggagaaaggtagtttttgtgttatagtttttattttagatatacgagttcgtggagttgtgggaaagaaggaggaggtgttggacgaagttggaaatggtaaggggaggttggggaaatatttagttgttagcggttttttcggggtacgttgggattagttaagagaatgtaatagttaggggtgggagtttttttcgcggttgtatacgttaggtttttttagttttgtaggtttaaatgaaggtttatgtgaagggggaatcgttttggatagtttagtgttttttagagttatattattattattttttattacgcggaggtggttgaaaaaaaggagttatagatgggtaaggtttgaggggcgtcgggttgacgaggtaaaaaaaaaagtaggtgttgtggtgttgatgggaggtttttttttttttataggacgttaggaaggaaatggggtcgttatagaggtggtgaggtgttagggtttacggagggtttatttgttgcgcgggggcgagtattaggcgttgggtgtacgggggttcgtgcgtgtttgtgtacgtgcgtgggtgtgcgcgtacgtgtgtttaggtcgcgcgtgtaggggtcgtgcgtgcgtttgtgtgcggtgcgcgcgcgtgtgtttcgcgtgtgtacgggcgtggtagaggcgggcgcgcgatttggtcgcggtagtgcgtgttcgtcgttttgcgcgttcgttcgtcggagcgtagtatcgttttcggttaggagtgtgtatgcgtggggtgagtgagcgagtcgggggttcgggcggggtgggttgcggagagtagttacggggcgtcgtcgtttttaggacgttttggtatcgggtttagtttttaggttttacggcgaggcgaggcggtagttggggtcggtcggttattttttttttaatagttggtcgcggttcggggggttgcgggagaggcggagagggggcgtcgggaggggtttgaaggcggttcggtcgagtttcgcgttttttttttcgggtgcgggtcgcggggggcggtcgcggaagggcggggttttcgggcgggcggtttgcggttttcgaggagtttcgagaataaaaggagacggcgacggttttttcgtggttaaaataatttgcgttggcggtagtttaaggtcgggtcgcggttttcgagtttttcgttttaattttttcgtcgtcgttgttttttttttgcgtttggttggaggtcgtaggggtcgatttttttcgggagtcggcgaggtgcgggcgaggtgcggattttcggtcgtagtcgggcggaggtgggacggtatttagttacgtcgcgttttcggttgttttttttttttttttatcgcgcgcgtcgttttgtttcgtttttttttttatttggatttcgggtagatttgttaatttacggttacgtgaggttgggaggggtggggacggtttcgattttagcgtttttttagatgtttttatattttatttttcgtgtagttaggtttttgtaggcggcgcgtttcgtattttgtatgcgggggagagaggtgtttttttttgtagggcgcgggtataggtacggtaaggttttaggtatatagcgtttcgggggttggatttttttagagtttttagttttttttttattcgagtgttcgaaatttatttgcgtttttattttttttttttttttttttttcgttttttttttcgtttttttttttttttttttttttttttttttttttttttttttttttgttatttttattttaaatttcgcgttcgagatataagttgtttttagatcgtgttttggggtcgggtatgttttgcgcgtgtcggagggcgtttattcggatttcgatcgggagttagggtgggattcgagtttcgttaaaggtcggcgtggatggtatcggtgcgtaagtttgtattttttgggtaagtcgatggtaggatagagtttaagtcgaggttggcgtcgaagtgggttcgggaggacgcgttgttttttgtattttgggtattattttattttttttttttcggtcgggaaggggtttgttttcgggtttttaaagggtgggggatagggttatatatattttttttcgatacggaacggtttagggagttagattcgttcgtcggttggaaagaaagttatcgttgttgtttttttttagagtttgttattttcggatttcgtttttagttcgaagaggttatttagcgttcggcgttaggttcgcgggttgtaagggtttaaagtttattgtagggagaggagggggcggttagaaggggggggcgaaggtaatgaatgaagaattagttttagtcgtcgtggtaatttatttcggcgttgattagacgtaggtagtagtagagagataggaagagcgtttagtagcgatttatgtcgatttcgggttcggtttcgcggggtttcggacgcgtagatcgagcgcgtcgttttcgcggttagggtggggggttggggaggggggtgggttcggttcgggttcgcggcgattaggcgtttaggtttttgtagtcgcggtttattcgtatggttttcgggcgtcgtcgttttcggtttcggtttcgtcgttggggggtaggggaggatttgggcgtaggatttgggttcgaggtcgttatttgggcggatttcgagttcgagtgagtatttacggtcggggggttgcgtcgcgaattagtcgaggcgtttagtcgtgtgggggcgtttaggggattttaatttttaagaggaaaaggaatacggtagtcgatggttcgtttttattcgtcggttataggcgtttttttttgttcgtcggtttagtttttttgtaatattttttggaaaggtttttaaaatcggaaagcgcggagttgggtattttaaggtttaagttttttttaaaaaattttttttaaagttggttttgtaacggtagttcgagtattcgggtagggagaggtgtaaattttcgttcgggtcgggtaggggggcgggagcgtgtgcgttttggcgcggggttcgggcggcgggtacggttgtttcgcgcgcgcggcgtgttcgttgcgcgttcggttgggttcggtcgataggtggacgcggcgcgagttcgtcggttcgtttgttcgttcgttcgtcgttttgggcgttttttgcgggttgcgggttgcgagttgcgagttgcgagttgcggttgtttcggttttttttttgtagcgaggttggagggtgggttttttttttttttttttttttttgcgcgcgtatgtatgtgtgtgcgcgtaaagtatttttatttagggaatgaaaaatgggcgttggcggtcggaggggagttttagggaggtagcgggggaggttgcgggtgcgtagggaggtaggtaggtcgttttcggttgtaggaggagaagttgttatttttttagttgtttcggtttttataaaggagaagggagagtgcgagaggtgggtggagatagtttttttttttttggttcggagttagcgttaggaggggggggacgcgggagttgggggagggtttggggttagggcggggcgtttagggggtttttgagagtcgagtaattttttagtttatgaatttggttttggggaaaaaagaattaggggtgatttatcgtttcgttttttagtatagtgattatggataggttaggagtttacgtggtttagggggatgtttttagagttaaggttaggagtttacgtttttttttaggattagatatttttattttggtataggtatggtagggagggatttaggttttgtagtttgagagtttgaatttagattttgttttggtattcgggagtttgggttattttgggtaagttatttttttttgttttttttatttagttttaatttggagatggggttattgtaaggatttagtgttagtaagggaagatatcgtaaggtgaatttatagaattcggtagttagcgttttttagttgtaagttgggttcgagttttttttttttagttggttgtttggtataataggttttgttagcgttggttgaatttgaatttgttgaattgtaaagttatataaatttttatagttttgtagtattttcgtagggttattaatatgattttttcgttagttattttgttgtttattattttttttagttttcgggttcgaggtttagagtttatttatttataattagtttttatatagttaacgttttttgtttttagttagggagttgttgtgtttttgtttttagtagttatattgttttagttatagttatacgtatttatattgggtttagtatttttttcgggatacgtaggtttttgtattatttagtttttcggttttgaggtatttttatttttttcgtttgtattgtttttgttattcgtttttttttttgggatgttagtttgttttttatagaggagtatattgagagagttatatttgttttttttttatagattgtttttttggatttggatagggtggaatagaggaggaaggatattttaggtggtttttatagattattgtaggtatttatttattgttgtttattatttagtagcgtggtatagtggtagagatatagtttgaagatatattattttggtttaaattttggagtggttatttgttggataagtgtttgtaggaaggttttttaattttttagtatttcggtttttttttttataaattggagatgaatttataaattggagttgggtgtggtaataagtttttgtagttttagttatttaggagattgtggatcgttttgagtttaggagtttgaggttgtagtgagttgtgattgtgttattgtattttagtttgggtaatagagtaagattttatttttaaagaaataaaaataaatttataatgggaaggagtgagagagaatagagaggtatggtaaaattttagtggtgatggaaatgtttgttatttttgattgtggtgatgggtttatgggtgtatacgtatattataataaaatgtgtgtagtttgttgtattttagtgtagttgtagagaatttttattttgtttttggagtggtttggaggtttttatgaggttttttatgtggaggcgtttagtaaaatattttagtaggaagtaagcgtttggaattttttatgtagtttttaagtttattggtggtttcgtattgttttaggtattggggagataggtgtgaattagtttaatgtaggtttttgtttttgaagagttttattgagaaggataattagatgtataaatagataaattaggagatagggtgataagggagatggggtagcgggacgaggagataatttttaaatattagatttgaagtttaacgatttagagataaaaatttttttttatcggatagttgggttatttgattttgattttttgtgttttttataaatagaatggtaataattattatgattagtgagttgattatgtggtagttagtgttttttttattttatttgtagtttttttatgtttttgtgagatgtgttatttttattttatagatggggaaatggaagtatagagaggttaatatatttgtttaaggttatatagttcgtaagtggtaaggttaggatttgaatttgagtagtttagttatagagtttatatgttgagattatcgtgttgtgtaattttttggtaggtgatgttgatgataatgatgatatttttgatatagcgttttggtgagcgttatatgtattaatatgtgggaatttgttttgttagttaaaaagtgatggatttatatgaattttgatttaggtataagttgagggagagggaaggttatttagagtagtatcgtagaacgtttattgtttgtagattttgtgtgaagcgttgagaaatggaatgaggaaggagttttagtttcggtatttagggattttttatgtttttagtgagatagatttaaattattgtagtgtaggtgttagtatatgggttagaagtggtagaagagggtttagtagatatttgggtttgaatgttacgtgatatttgcgtgatatttgggtttgaatgttgtgttaagggttttttttttgtattttttttgtgtagaggaatagtttgtaaagaatatttttttaggtacggtggtttatttttgtatttttagtaatttgggaggttgaggttagaggattatgtgtagttaggagttcgagattagttttagtaatatagcgagattttattttttaaaaaaaattattaaaaaaaaaaaaaaaaaaaaaaaaaaatatatatatatatatatatatatatatatatatatatatatatatatatttgagtgtggttttagttatttaggaggttgagttaggagggagaattttttgagtttaggagtttaagattgtagtgagttattttagagacggggtttcggtttgtcgtcgaggttggagtgtcgtggtgcgatttttttttattgtaatttttgttttttaggtttaagcgatttttttgttttagtttttcgagtagttgagattataggcgtttgttattatgtttagttaatttttgtatttttagtagagacggttttattatgttgattagggtgttttcgattttttgattttaagtgatttgttttatttagtttttcgaagtgttgggattataggtatgaattattatatttagtttaaaaatttttttttaataatatttgatcgtttgttttttgttaggttgggtgtagtaggtattttttttagaaggtttattaggtttggtatttgttttaggttttatagtatgtatatttggtatcgttatggtttgattattaatttagtattagattgagtttagagtgtttaagggttttttgttagtttttagtatatagtggttgtttaggaagtgtcgttcgttgaaggaatgaataaatgattaaaattttgttaatttttttttttgagttttgattagttattgtagagatgttaggttttttttaaagggtggaaagagttggggaggggtttgtagtatgagtttttaagtttggaagtatagggtttttgaagggtattttttttggaggtattagaattgggaagggtttgaagttatattattttgaatgtacgtggttttatttgatttcggaattttattagggttgggtttgaggagtatttgaatgagagaattgggaaggttttcgtttattttcgcgtttaggttattgggaaataaggttttttagtagagttagggatgggggcgtttatattttcgtaattttttattttttattttaggatagatttgagttaaagggaaaaagagtggttatagtcgtgggggatgggggtgttgtttaaggttgggggttttttagattgtgtgtttagagttatttaagtttttatttatgaagagtattttatattttgggcgtgggggtttaggatattggttggggtgaagaaatattaaggaaggagttgggttttatttcgggggtaaatttacgtttttaagtttagaaaggtgagagcgatgattattgggagttttttcgttattgagaggggttagtaatatttgggttaggtagttttgtttttttatatttgatggagaggaagtgaggttttaagttggagatcgtttaagattatgttataaatggtttgaaattttaagttttattttatttcgcgtggtttttattagtttttttatgttttttgttgttttattttttgtttttttgtttatagggtttttggttgtttataaagtattttttttttttttgtttgttttatttttatagtcgtttagggagaaggtattgttatcgtatatgtttattgtatagatgaggaaagtgaggttgagagagggtaagggattaggtttttcgttaaagattatttgggtttaaagttttgttttattatttattaattttgtgattttaagtaaattttttaatttttttgagttttacgttttttttttgtaagtcgtagggataatagtttttattttattgggttaaatgagttaatttatttgaagtgataaagtttggagtgagtattttatagatgttggttattatagtgatggttattattgtaggttttgcgcgcgcgcgtatatatatatatatatatatatatatatatatatatatttttattttatttgtaaatttatttttgagttttagagttagcgttaggagaggggttataggtttttatttggagagggtggaggttgtttttatatagaattttcgttattttttttagatttttttattttaatgaggttttggttattggtttgtgagtgtta

SEQ ID NO: 1417 - DNA, 6126 bp, Artificial Sequence
  chemically treated genomic DNA (Homo sapiens)
tttgaatttttggtttggaattttttatcgatttttttatttttgtaagtttagatatttaatatggtttagaaggtttttatgagttttattttattttttttttgtttttttcgtttcggatttttataagttgtggttattttaaattttttttatttttgattattttatgtttttttttattttttcgtttatgtaatgaggtttttttttaattagatttttattttttttagatttttagagaagttttttttgaaagaagtcgttttttattttttagattgggttaggttttttttgtgtgttgattttattgtttttttttaatattgtttagaacgttaagttgtaattttatgtttaattgattgttttattagtttataaaatttaggaggaaagggttgtatttttagtttttgatatatggttttgtatattttaagtttgtatatgaatcgttttatttatttgggatattattttatttaatttttaagataattttatacgttgtgtatgattattttaatggttattattgttattttaaatagagatgggggtttattatgttgtttaggttggttttaaatttttgggtttaggtgttttttttattttggttttttaaagtgttaggattataggtattagttattatgtttagtcgattatgttttttttaatggatgagtaaagagtcgaggttttattggttttttattgtagtgtttttgttgaaggattaaaaaaaaaaaaattatagggttgtgttggatttttgggatttttagaggataagtttttttttttagtgaggttgatttatatagagttagttttttttttttttttagttatagttgtgtgttggaaagttagaggtttgggtttttaataaagagtagattttttaattttttcgttttttttttttttttttatatggttttttaaattaaaagtaattaaaattaaagatttaaggagtaggagagggtagaggtataataatatttttaaattgaggaagggggttttttagcgagggagggggtatttaaaagttagatttagagggttttagttttattagtttgttttaggttttaaggagtgtatggtttatcgggttgggttggattaggaaataagtttttgtttttaggtttgtaaataggttgcgttgttaggaattttttgtttttattttttgaagagtaagttttttaaatttagaagagaggttgtattttgagatttagttagtaaggtgggtgcggagttttggggagggaatttttattttaagttgtatagatttatttcgatttttttagagaatttttttttttttaggattagtgtcgttttgaattttgagcgtgtaaagagattttttagagttagttttcgagttttagttggggtagattagaggttagggcgtttttttgtttgcggggattttttatatttgtgcgttatttttattattttcgggtaaaggattttttttcgttggatttagggaggcggttattttagatgtagttaagggttaaagggggtgggagaaggagtagttagtatcgtttttttttgtaaattattaaacgggttttttatttttaaattgtgaagttagaaatatttttcgtttttttgtttcgtttattattatttgaaaaaaagaatttataagtttaaacgtgatttttataattaacggttttgataattgttaaattcgtacggtttttagggtaaacggatttgaattttttaaggaaagtagaattggcggtggagttggggggtagaggaggagaagatataaaaagttaatttagtgggaagcgtttttaaagttaaaggtgtggcgttcggagttgtggtcgttttcgttcgggagtcggggttaggagaacgggttttggaggtagggtagggtacggcgagattttgtttttgtttttagtgattattttgatttggttgtaaaaagtttacgaggttttttttttgaaagttagttaatcgattgtatttttttatatttttgtttttaattttatgtcgtttgttggtttagacgcgtaaggcggaggatagaattgttatagtttttattttttttttttaatttttcggttcggtttaattcgggagttgggttttttttttttcggttcgtagttttttcgatttttattttggggagaaaatttatatttttaattttttgataattttttaaggaaaaaataaaatatttaattttaagaggtgaaaattagaattcgggcgcgggttgagattttgcgtaaaattggttaagtttagtgtatgtcgtttttttttttcgggtatataataggggggttggggtttttttttttttttttttataaagggggtttagtggggaagtataagaaagggggagaaaagattcgtattttttttttaggagggtaaggtttttagttttttgcggtttcgggattatttaggattcggggcgtcgtgggatcgatttcgaaggattttagaacgatattgggagagcgcggtaagaattagttttattttttttcgacgtttcggattgattgtcgggcgtagattcgatttttttcgaattagtttcggattagttttagaaggcggaaaataggatttaaattcgtttatgagtagtggtaggggcgggggttgtgggggtaggattcggtttaaggaattaatcgtttcggttcgagggttttttgttcggaggttgtttttgattattgggtttattttgtttttgtagaggaggtagatgttgattttttttttttgtatagttttttcgtaaaatttttttttaattatttgtttttttgcgttattttttatcggggtattatttttggagttagttttttaggtttttaaattttttagaatgttatatatggaaatttttagtaaatgtttgttaatgattataataaaggtattatttaaattaggtaggtaattattattagaaggataattgggtgttcgtttgtttatttattgttttttgttttaaattttcgaggagtcgttgtttggagatattttcgttcggattgtttttcgggttttattaaacggttttgaaatgaattgtgaagttattatttgtgggcggagagcgttggggttttgcggacggaagattttggtttgatcggattaatagtgtcgtcgaagtaaagtagtttttttgggtaggttgtttgtttcgttttttattttttggggtaattagtttaaaaattcggtttttaatttaatagtatgtggtttagtattcgtttttgttttttatttcgtattttgatttttggggggatcgtttgttttcgtttattttttataaatattacggtattttgttagtatttcgaataaggggttgtttatatatttgtttttaatgattttttgaagggatatgtggaagtaatagcgagcggtgtagttatttaagttgaagatgtacgagagcgggtcgcgtagaagaattgcggtaatgggatttttagcgtagttttaggcgttttgttttcgaggttgatattttaagattttgttttggttaggtatagtatcgcgttcgttggagtatttttttgtgatttttttttgtttattgtattgtgtttatttttttggtgaaggaggagacggttgttggatatgttagttttaatttggttattttggttatttttagagtgcgtgtgttgggtggggttgagggagaaggatgaaggatgatttttttttttaataggagaatttaaaaattagagagcgatgaaggtgaacgcgtttttttttttcgttgtcgttgggaagttttattttgtttaggtttggtttttggagtattagcgttttttttttttcgtcggtaggatcgttttttttcgatattggttttttattttgggcgtagggtttggggtttagttgttaattttaaggaattcgtagggttcgattttttcggtgggagggaacggagggagaattaaaaggtatttttttttacgacgcggaggcggtggtacgattttttaaacgtttaagtttgagttttttttgtatgcgagatagaagttagggtaatttcgtttagataatttcgaaaataaaggtacgattagataagtgattttaagggagtaaaggtcgttttatcggagaacgttttaaatttatatagatttttttttttttgtatcgtattttagattatttagttttgtatatatatatatattatataaaataaaaatttattattgttatattggatttaatagtttgtttaattttattaaataattagtaattatatagttttttttttaaaagatttttagtttaaaacggcgtaatcgtttggagatttttttcgagggttttatttttcgttgggtcgagtttgtagaagggatattttttgattttagatttatattttttttgggtattaaatgtaattttgtatgtttttttttttttttttaaagagaatataaaattatagtagtttaagaaaataattttaaaatggggaggtaaatttattttggaaatgatgggttgtttgtagttttataaaatttttttttcggtagagtattaatattttttttttttattattttttattttatttggtttgttttttttcgttttttagttgttgtcgaagtttgggggttgggattggattttttgattgcgtaagagtaaaaagcgaaggcgtaatttggatattgggagattcggagcgtagggagtttgagagaaatttttattttgaagagattaaggttgagggggggtttattttttgatagttatttatttagagtaaatgattagttttagaaggatggattataatattgaattaattataaaacgcggtttttgagtttattattgttggagttatagggagagaaatagaggaggagattgtaagagattattggaggtcgtgggtacgttttttattttatgtgtgggatatttattgcggaataatatcggaggagaaggtaagggaaaagaaaaaatgattttttgtttataagggaagtttttgattagattttgggattggagaaagcgaagtaattttaaattttgggcgataagaaaaaaaaaaaggagttggattttagttgtgtgtttagagagtaatttttttttttcggaataaattttatttggggacgggtgggagataattatagagttagaaagtttaggtattttttttaaatatatattttttagatttatttttaaaaataatgtttttttaataattttatggttttttaaagaaattgtttaggtttatatttttgaggttttttttgggagtgggggtggtgttcgtgaatattgggtcgaatattaaggaattgggggtggaggtagaggtgtttgttttttttttggtagtgggttttggaaggcgataggttttaaatgagtgtttttatttttcgtttgcggtttggcgggatagcgttgtagtttatggtgtggagcgcggttgggggattagggggaggtggggagaggggagcgtggaggggagcgtggaggggggcgcgcgaaggggttgcggggcgtaggaggcgggttgggttcggttggagatcggatttcggtgttggtttatagtatagggagtcggtcgaatgcgcgtgattattggacggcgttgttttgggagagagtcggggttagatttggcgcggcggtgaggcggttgcgggataagtagaggcgcgcgggcgtgggtaagggtttggggcgttttggagcggtttgttgggttagtgaggtgttagggagagcgggtgtttgtcgggtagtgtgttcgggttgtacgttttagcgcgggggcgatagcggcggcgcgggcgggcggtttggaataatgataaatatatttggttttgagtgaagaagtcgtcgtcgtttcgtattttagtaattgggatttgaggaatttcgaatcgtatattaaggggtttttattgt

SEQ ID NO: 1418 - DNA, 6126 bp, Artificial Sequence
  chemically treated genomic DNA (Homo sapiens)
ataatgagggttttttggtgtgcggttcgaaattttttaaattttagttgttggaatgcgaggcgacgacgatttttttatttagggttaaatgtgtttgttattattttagatcgttcgttcgcgtcgtcgttgtcgttttcgcgttagggcgtgtaattcgagtatattgttcggtaggtattcgttttttttggtattttattgatttaataaatcgttttagagcgttttaaatttttgtttacgttcgcgcgtttttgtttgtttcgtagtcgttttatcgtcgcgttaaatttggtttcgatttttttttagagtagcgtcgtttagtaattacgcgtattcggtcggttttttgtgttgtaggttaatatcgaggttcggtttttagtcgagtttagttcgttttttgcgtttcgtaattttttcgcgcgtttttttttacgtttttttttacgtttttttttttttatttttttttggttttttagtcgcgttttatattatgggttgtagcgttgtttcgttaaatcgtaggcgaggaatgaaaatatttatttaaaatttgtcgttttttaggatttattgttaagaagagggtaaatatttttgtttttatttttagttttttggtgttcggtttagtatttacgaatattatttttatttttaaaagaaattttaaaaatgtaagtttaaataatttttttgggaggttatagggttgttagaaaaatattgtttttaaaaataggtttggaaaatgtgtgtttaaaaaaaatatttagattttttaattttatggttattttttattcgtttttaagtgaagtttatttcgaaaaaaaaaaattattttttggatatataattggaatttagttttttttttttttttttgtcgtttaaagtttgaagttatttcgttttttttagttttagagtttgattagggattttttttataaataaaaaattattttttttttttttttattttttttttcgatgttatttcgtaatgaatgttttatatatggagtaaagagcgtgtttacggtttttaatgattttttgtagtttttttttttgtttttttttttgtagttttaatagtaatgggtttaaaaatcgcgttttgtaattgatttaatgttatagtttatttttttaaaattaattatttgttttaagtaaatagttgttaggaaataagtttttttttaattttggtttttttaaaataaaagttttttttaaattttttgcgtttcgaattttttagtgtttagattgcgttttcgttttttgtttttacgtaattagggggtttagttttaatttttagatttcgataataattggggggcggggagaagtagattagatgggatggggggtggtggaagggggaggtgttggtgttttgtcgggaaagaggttttgtgaaattataaatagtttattatttttagaatgagtttgtttttttattttggggttatttttttagattgttatagttttgtattttttttgaaaagaagaaaaggaatatataaaattgtatttaatatttagagagaatataaatttagaattaagaaatgttttttttataaattcggtttaacgagaaatagggttttcgggagaaatttttaagcggttgcgtcgttttgaattaggggttttttaggggaagggttatatagttgttagttatttaataggattgggtaaattgttgagtttaatatgataatgatgggtttttgttttgtgtggtgtgtgtgtgtgtataagattgggtggtttgaaatacggtataaagaaaagagggtttgtgtaggtttggaacgtttttcgatagaacgatttttatttttttgaagttatttatttggtcgtgtttttgttttcggggttatttgggcgaggttgttttggtttttatttcgtatataaaaaaagtttaagtttgggcgtttgaggaatcgtattatcgttttcgcgtcgtgggggaggatgttttttgatttttttttcgtttttttttatcgggggggtcgaattttacgaattttttggaattgatagttgagttttaaattttgcgtttaaggtgagaggttagtgtcgggaggaaacgattttgtcggcgagggaaagggggcgttgatgttttaggaattagatttgggtagagtggggttttttagcgatagcgggggaggggagcgcgtttatttttatcgttttttgatttttgaatttttttgttgggggggggggttattttttattttttttttttaattttatttaatatacgtattttgaaaatggttaaagtggttaggttgggattggtatgtttaatagtcgtttttttttttattaggagggtggatatagtgtagtggataggggagagttatagagaagtattttaacgggcgcggtgttgtgtttaattaggataggattttgggatgttagtttcgaaaatagggcgtttggggttgcgttgggggttttattgtcgtagtttttttacgcgattcgttttcgtgtatttttagtttgggtgattgtatcgttcgttattatttttatatgtttttttaggaaattattgaaggtaaatatatgaatagttttttgttcggaatgttaataggatatcgtaatgtttgtagaaaatgagcgggaataaacgatttttttaaaaattagagtgcggaataaaaggtaaaagcgggtgttgggttatatgttgttaagttgagaatcgggtttttaggttagttgttttagagggtaggaggcgagatagatagtttatttagaggggttgttttgtttcggcgatattgttagttcggttaagttagggtttttcgttcgtagggttttagcgtttttcgtttataaatggtaattttatagtttattttagagtcgtttaatggggttcgagaagtagttcgggcgggagtgtttttaggtagcgatttttcgggagtttaaagtagaaagtaatggatgagtaagcgagtatttagttgtttttttggtagtaattatttgtttaatttgaatgatgtttttgttatgattattaataaatatttgttaaaggtttttatgtgtgatattttggaaggtttaaaggtttgaggagttgattttagggatagtgtttcggtggggggtggcgtaagaaagtaaatggttgggggaaaattttgcggagagattgtgtaaagaagagaggttaatatttgttttttttgtaaaagtaaaataaatttagtggttaggagtaattttcggataggaggttttcgaatcgaggcggttggttttttaagtcgagttttgtttttatagttttcgtttttattattgtttataggcgggtttgaattttgtttttcgttttttaaggttggttcgaggttggttcgggagaagtcgggtttgcgttcggtagttagttcggggcgtcgggggaaggtggggttagtttttgtcgcgtttttttagtgtcgttttaagatttttcgagatcggttttacgacgtttcgggttttgggtggtttcggagtcgtagggggttagaaattttgtttttttgaggggggggtgcgggtttttttttttttttttttgtgtttttttattgggttttttttgtggggggggggggggaagggttttagtttttttattatgtattcggaggagaggagcgatatgtattgggtttggttagttttgcgtaagattttaattcgcgttcggattttaatttttattttttggggttgggtgttttgttttttttttgagggattattaaggggttaagaatgtgggttttttttttaaagtgggagtcggggaggttgcgagtcgagaggaaggaggtttaattttcgaattgagtcgggtcgagaagttgggagaaaagggtagggattgtgatagttttgtttttcgttttgcgcgtttaggttagtaggcgatatgaaattgagggtaagggtataaaaaggtgtagtcgattagttgatttttaaaaagaaggtttcgtaaattttttataattagattaaaatggttattaaaaataaaagtaaaatttcgtcgtgttttgttttgtttttagggttcgtttttttggtttcgattttcgggcgagggcggttatagtttcgagcgttatatttttggttttgagggcgttttttattgagttggttttttgtgttttttttttttttgttttttagttttatcgttaattttattttttttgaagaatttaggttcgtttgttttagaagtcgtacgaatttaatagttattaaagtcgttagttgtgaaaattacgtttaaatttgtgaatttttttttttaaatggtgatgggcggggtaagggaacgggggatgtttttggttttataatttgaaaatgaagggttcgtttggtggtttgtaaaagaaaacggtgttaattgtttttttttttattttttttaatttttggttgtatttggaatagtcgtttttttgggtttagcgaggaagggttttttgttcggaggtggtggaggtgacgtatagatgtggggggttttcgtagatagagagacgttttggtttttggtttgttttagttgaggttcggaagttagttttaaggagtttttttgtacgtttagaatttagaacggtattagttttggaaaaggaggaattttttaaaaagatcgagatgggtttgtgtagtttgaggtgaaagttttttttttaggatttcgtatttattttgttggttggattttaaggtgtagttttttttttgggtttggggggtttgttttttaggaagtagaagtagagggtttttaataacgtagtttgtttatagatttgaggataagagtttgttttttggtttagtttagttcggtgggttatatattttttagagtttgggatagattggtaggattggaattttttggatttggtttttggatattttttttttcgttagagagtttttttttttagtttagggatgttgttgtgtttttgtttttttttgttttttaggtttttggttttagttgtttttaatttgaaaaattatatgaggggagggggaaggaacgaggagattgggaggtttgttttttattaggggtttaggtttttagttttttaatatatagttgtggttgggaggggaaggagggttggttttgtgtaggttagttttattgaagagagggatttgttttttggaagttttaggagtttagtatagttttgtgatttttttttttttaattttttagtagagatattgtagtggaaaattagtggaatttcgattttttgtttatttattaaaaggggtataatcgattaggtatggtggttgatgtttgtaattttaatattttaggaggttaaggtgggaggaatatttgagtttaggagtttaagattagtttgggtaatatagtgagtttttatttttatttaaaataatagtaatgattattggaataattatgtataacgtatagggttgttttggggattaagtaagataatattttaggtaaataaagcggtttatatgtaaatttaagatgtataaggttatgtgttaagggttaaggatatagttttttttttttagattttatggattagtggagtaattaattagatataaagttgtaatttagcgttttaagtaatgttggagagagataatgaagttagtatataggaggagtttaatttaatttgggagatgggagacggttttttttagggaaggtttttttgagaatttaagaggaataagaatttagttggggaggaattttattgtatgggcggggaggtgagagagaatatgagataattagaagtgaaaggagtttggaatggttataatttgtaaaggttcggagcggaaggagtaaaaaagaggtgagatggagtttatggaggttttttagattatgttaaatgtttaggtttgtagagatgggaggatcgatggaaggttttaggttagaagtttaaa

SEQ ID NO: 1419 - DNA, 6351 bp, Artificial Sequence
  chemically treated genomic DNA (Homo sapiens)
tttttagattttaggagttagtgtatttagtgagggtgagggttttgtttttttggggatttatgagttatttgcgtgtattagatggatatatttaagttgtttacggttttggggttgagagggaggttagtaagggggtaaggagaggttgaatgggtagtgttttgaagtttttattttttgggattttggtagatttcggtggttatagtttggtttagtaagatagttttaagaatttagggagggaatgtggtttaaggtttttgttggttttttgtttatttagaaagttattatattgagtgtttaggaggtagggggatagtttttattttgtgtttttttggttttttagttataggtataaggatttacgtgttttgtttagggtatgtatgggtggaaggatattgagttggggattaggagttttgtattttagttttttttagttttatcgtgaattttagataagttttttttattttttgggttttagtgtttatgttagtagaagggatatattttagggttttgacgtttaagatgattgtgtgagcgtttggggtatgtgtgttgtttttttattattttttatttttattttataattttgtttggggagtttgggagtgggggtagagttaggagcgtgggagagttagatgtggtggtcgttgttttgtttgagtgagggttgagcggttttttgggaatttttttatttaggtttttttttcggttttttttttttgttttattgagagtagtaattttcggttttgataagcgtgggtgggggaggggggttttagtacgggggtttgtttagtttggtttttttttttggggaagagtatgggtttatgagtttagatagaaagtttcggttttagttttagtttgtggttgatatattataaggttttgtataagtttttttttattattggttttagttatatcggttgtgtaatgagtatgttggtgagtttttttttagttttgatggtggatttttatgatagtagtttttggtaatatttgaggattagttatttttttttttttttttgagatggagttttatttttgttgtttagattggagtgtaatggcgttattttagtttattataacgtttgtttttcgggtttaagtaattttttggttttagtttttcgagtagttgggattataggtatgtattattatatttagttaattttgtatttttagtggagattgggtttttttatgttggttaggttggttttaaatttttgattttaggtgatttatttattttggttttttaaagtgttgggattatagacgtgagttatcgcgtttagttggattagttattttttgtggtatttttttgttttgttcgaggtttgataaaatgtttgtgggtatggtttatttaggtttttttataattttgtgaggtaggtatatgtgtttttattttatagttgaaggtattgaggtttagagagtttaggttatattattttttagcgttatatggttgggaagtggtggagttgggttggagttgttaatattagagtttagatatttaatttttgagtgtgttatcgtgttgtgggggaaggtagtgtggaattttaaggtttagagttttttttttttattgtattttattttagtttattttaggtagggttttttatattttatgttttgtttatttatttttagtttaggtttttttaagatagtattgtttaaggttggattgggtttttagtatttgtgtaggtgtgaggatgtttatagtttgttttgtttatagtggggttgggggttatgttgattattttagggtgatggtgttgtattgtttatgtgtttcgtttattgtcgttgaaggtagagtgtataaggggaatttaagatttagaaaagggaggtttcgtttaggaagatatagtgatggaatgttgttcgaatgaggaaatttattattttagtaatagtgtatatttagtatatttcgaggtaatgtattaagttttttgtataaatcgaagagttttatgaattagtttttgatttgtttttattttttagaggaggaaattaaggttaggagtttaagtgatttgtttaagtttatgtagtttgaaattggagtagttgggattcgaatttagttttatttttagttttttaattttttttgttaattatgataattttgttttttggtgagtgttttgggttgttttttgtagttttgtattttttatttatattttagttgagaggaggagtgatagttttggtgtttattaagggttaatggtagtaggggttaagtaattttagatgggttttaggacggttgggttggtcggaaattggaggtcgttagttttttaggggagttatcgttaattgttttttttttttgtgttgtatttttggttttagttgtatttttgttttagggtttattagtttttttttttttgttagagtttagttttaagggaaattgtagacggattattttaagggttttgtagtatagtgagtttataattgttatgtataaatagggaaatcgaggtttaggtagggtaagggatttatttaagtttttttgataagtttgtggttgggttttttgatttttagattagtttttttggggattagggggttggtgtgtttcgtggttttttttaggttggtttggttgtagagggttagttaaggatttagaggtgaatggtttaggtagatgttaggaggggagtcgtaaatttttgacggaatttttgggtataagaaatttttgtgtaagtttgattttgtggtttgtgggatttttttatatttttttatttttttgttgttataaagatttggttaggttttttttttcggggtatttttatggtttttaattcgtggttgggaattagtttgagaatatttttttttttatgtggtttagtttagatgttttgttgggtaatttcgattgggattagattaagaaatgtaagatagttgattgtggtgggtatggaattttagtttacgtaaattttttgttttgtgaataggggtttgggggaagttgaggaggaaagatttagcggcgtagagggaaggagggtagagttagtttttatttgtgttatttgggatagttttttttattttttggaatttagttgttttgtgggtgtagtagtgggagtaggggtggtaagtttattttatatgtttttttaaaataatgttttttgttatttgagggttaggagtttgtaattggagatgttttttgatttgagaagttgagggtggaagaagagatttagttgggggaattggaggagttttggtagattttggtaggaaaggagagttagagaatggaaatggaataaaacggatatttgaaagtattttgttgaggttgggtgcggtggtttaagtttgtaattttagtattttgggaggttgaggtgggtggattatgaagttaggggtttgagattagtttggttaatatagtgaaattcggtttttataaaaaatataaaaatagttaggtgtggtggtgtgcgtttgtaattttagttatttgggagtttgaggtaggagagttatttgaatttgggaggcggaggttgtagtgagtttagattgcgttattgtattttagtttgggagatagagtaagattttattttaaaaaaaaaaaaaaaaaaaaaaagaaagtattttgttgagtgattgaatgaaagagttatagggggaatttaggaagaaagtagggtagggggtttatttatattggaataggggtttcgggtgggggttagatgatttgtgttttttttattatgtgttttatgagatttagttttgttttagttttgttattgttgcgtaagtttgggaagtttattttgtttttttgggttttagtgtttttatttataaaatggggtaaataattttttttttgtattttaggggttttgagacgtgaaaaggaatgtatttgttaatatttagagatatttaatttgtgttggatgattttgattaaattatattttttttttgtgttaatttatttttgggttttggtttgtttttttgaaaaacggttgattattttggaggatttttttattttttttatgttatttttttttagtagtgttttttgatttttttaggttttcgttaggggtttttttaaatgtatttttagttttttgtttgtcgatcgggtatttgtttgtttaatgaatattttgtttattagtttggtgtttttgaggttaggattacgttttgttattgttttttgtatttagtatagtgttagaatgtagtaaatgtttagtatgtttgtttaatgaatgaaggttgattgaattaattatagagatgattagagttttttttatagatggggaaattgaggtattgagaaatgatttttttgggtgttatggtaaggggaggtcgttattcgatatgggtatcgggaaagtggggtcgaggttattttttgataaaagtgatttagtagttggcggttggcgtgggttgtggaatttttaagtatttttttatattttgagcgaacgggcgatgggagggagtaagtagagtgaaaagaagaaaaataagaaatttgggggaaaagaaagagagagggggaaaaaaattgaaattgaaaatagacgtacgcgtttattttttttgtttcgtcgttttttttttttttagttgggttaattagaagttattttgtagttttttttttaaagtggcgggggaagtgggggggtatggaagtttatagtggtgtgagtttttgaggttgttagtagttagtagtgattgttcgttttatttgggatttaggatcgttttgtgagtaatttggagttagagaggagattaataaggaggaggagagagtcggttttttagttttgttgtttagtagtagtttgtgttcgttttgtttaacgtagatagttagatttagggcggtttttttggcggttttgtttttttcgaaggatgtttggggagtgaggcgaagttgggtcgttttttttttttatagtagttttttttttttatttttttgtttttttgagtttttaggagtttgtattagttttgtttgtttttttatttagttgttatttattttgggattagtagtttttttgataattgggagagggtagtaaggaggattttttggagggggtgattgtttagagtttggaattgtgtttatattagaagttattagtagtaaggtaagtgttggaaaaagtgggaattttagttttatgttttgtttttttgttttaatttgtattttttcgagtaggtaaaaaaaaaaaaaaaaaaaaaaagggaagatatttttaataaaataagatgagaggaggttgggagattgtgggtgatgttagggatggaggagttagttttttttttttttttgttttggggtgagtggtttttattttattatttttgttgtttttgtttttattaaataatttttaggggtttttgggtgttgattgggggtttttaaagtatagtatagttaatggggagtggggagagttgggaagagcgggagaggggaattgggagaaggtaggtagggtatatagaaagtaggggattggggattttaggattatagtcgttgttttttggtttaagttttgtttttaagaattagtttggttttaggttagttagtcgttaggtaatttttggggatttaaatggatttgtaaattttttagatttttaagatatttttttaaatttttagtagttagaaaagtttgagggttaggaaagttcgagggtgatgggcggttatggtaattttttagcggttatgttgttgggtttgggggttgggatttggttgttagatttgggggtttttttgtgaagaaggggttagttattgggttattttttttggttttaggtagttgtttaggttttttcgttgtttttttttttttggattttattttttttttatgttattttaaagtataaatttaattatattatttttttgtttaggattcgtttatggttttttagtgtttggagaaagttttagtttttaatagaggttgttattgtttgatatttattgtacgtcgtaattgtgttgagtgttttatgagattgattttatgtaatgtttattagtaattttagaggtagtgattgtttttattttcgttttatatatgaggaatttgaggtttacgtagt

SEQ ID NO: 1420 - DNA, 6351 bp, Artificial Sequence
  chemically treated genomic DNA (Homo sapiens)
gttgcgtgagttttaagttttttatgtataaaacggaggtaaaaatagttattgtttttggggttgttggtgagtattatatgagattagttttataaagtatttagtatagttgcggcgtgtagtaagtgttaagtagtggtagtttttgttaggagttgggattttttttaggtattggggagttataggcggattttgggtagggaggtggtgtgattggatttatgttttagaatggtatggagaaggggtagagtttagaaggagggagataacgaggaggtttgagtagttgtttgggattaaaggaaatggtttagtggttgattttttttttatagaggagtttttagatttgatagttaggttttagtttttagatttagtagtatgatcgttagggggttgttatggtcgtttattattttcgaatttttttagtttttaaatttttttagttgttgggggtttagaaggatattttaagaatttagaaaatttgtaaatttatttaaatttttagaggttgtttggcggttgattggtttaaagttagattgatttttagaaataaggtttgggttaaggaatagcggttatggttttgaggtttttagttttttgttttttgtgtattttgtttatttttttttaatttttttttttcgttttttttagttttttttattttttattgattgtgttgtgttttggaggtttttagttagtatttagaaatttttgaggattgtttgatgaaggtaggagtagtagggatgatgaggtggaggttatttattttagagtaggggaaaggagaaaattggtttttttatttttgatattatttatagttttttagtttttttttattttgttttgttaaaaatattttttttttttttttttttttttttttttatttattcgaagagatgtaggttagggtaaagggatagggtatggggttggggtttttattttttttagtatttattttgttgttgatggtttttggtgtgggtatagttttaggttttggatagttattttttttaggaagttttttttattgtttttttttagttattagaaagattgttggttttagagtgggtaatagttgagtagaaggataggtaggattggtgtaggtttttgaaggtttaggagaatagagggatggaggaagggggttgttgtaggggagaggagcggtttagtttcgttttattttttaagtatttttcgggaggagtagagtcgttagaggggtcgttttgggtttggttgtttgcgttgggtagggcgagtataggttgttgttgggtagtagggttgaggggtcggttttttttttttttttgttgattttttttttggttttaagttgtttatagagcgattttgggttttagatagggcgggtagttattgttggttgttggtagttttaggagtttatattattatgggtttttatgtttttttatttttttcgttattttgggggaaaggttgtagggtggtttttgattggtttagttgggagaagggggggcggcggggtagggagggtggacgcgtgcgtttgtttttaattttagtttttttttttttttttttttttttttttttaagttttttgttttttttttttttattttgtttatttttttttatcgttcgttcgtttaggatgtgaggggatgtttagaaattttatagtttacgttagtcgttagttgttgagttatttttgttaaagagtggtttcggttttattttttcgatgtttatgtcgggtggcggtttttttttgttatggtatttagggagattattttttagtgttttagtttttttatttgtaaaggagattttgattatttttgtggttgatttagttaatttttatttattgaataagtatattgagtatttattatattttaatattgtattgggtgtaggggatagtagtaagacgtggttttgattttagaagtattaggttagtgagtaagatatttattgggtaagtaggtgttcggtcggtagataggaggttgagagtgtatttagaaggatttttaacggaagtttgagagaattagagagtattgttgagaagaggtgatatggaggagatggaaagattttttaagatgattagtcgttttttagaaggataaattaaggtttaggggtgaattggtatagagagggaatgtgatttggttaaggttatttagtatagattggatatttttggatattgatagatatatttttttttacgttttaaagtttttggggtgtaaggagaggattatttgttttattttatagatggggatattgaggtttagaggagtaaaataagttttttaagtttacgtagtaatggtagagttggggtagaattaggttttatgagatatatgatggaagagatataagttatttgatttttattcgagatttttattttagtgtagatgaattttttgttttgttttttttttaggttttttttgtggtttttttatttagttatttaataagatattttttttttttttttttttttttttttgagatggagttttgttttgttttttaggttggagtgtaatggcgtagtttaggtttattgtaattttcgttttttaggtttaagtgatttttttgttttagatttttaagtagttgggattataggcgtatattattatatttggttatttttgtattttttgtagagatcgggttttattatgttggttaggttggttttaaatttttgattttatgatttatttattttagttttttaaagtgttgggattataggtttgagttatcgtatttagttttaataagatatttttaagtattcgttttgttttatttttattttttggttttttttttttattagggtttgttaagatttttttagtttttttagttgggtttttttttttatttttagttttttagattagaagatatttttagttatagatttttagtttttagatggtaaagggtattattttagaagggtatatagagtgggtttattatttttgtttttattattgtatttatagggtaattgaattttagagggtgaagaaagttgttttaggtgatataggtagaggttggttttgttttttttttttttgcgtcgttaagttttttttttttagttttttttagatttttgtttatagagtagaggatttgcgtgagttgggattttatgtttattatagttaattattttgtattttttggtttagttttaatcgggattgtttagtagagtatttgggttggattatatagaaggagaagtgtttttagattggtttttagttacgggttggggattataagagtatttcgagagagggggtttggttaggtttttgtggtaatagggaaataggggaatgtgaaaagattttataggttataaggttaggtttgtatagggattttttgtgtttaaagatttcgttagaaatttacgattttttttttagtatttgtttgggttatttatttttgaatttttggttgattttttgtagttaggttagtttgggggaggttacgagatatattaattttttagtttttaaagaagttagtttgggagttagaagatttagttatagatttattaggagaatttgaataagttttttgttttgtttgagtttcggtttttttatttgtatataatagttgtggatttattgtgttataaggtttttgggatggttcgtttgtaattttttttagagttggattttagtaagggagaggaggttggtgggttttagggtaggggtatagttggggttagagatgtagtataaaggggaggggtagttggcggtggtttttttgggaagttggcggtttttagttttcggttagtttagtcgttttgaggtttatttggaattatttagtttttattgttattaatttttggtgggtattaggattgttatttttttttttaattgagatatgggtgggaggtgtagagttatagggagtaatttagggtatttattaaggggtaaaattgttatgattgatagaggaggttggagagttagagatagagttgggttcgaattttagttgttttagttttaagttatatgagtttaggtaagttatttaaatttttggttttggtttttttttttggaaaatggagataagttaaagattgatttataagatttttcggtttgtataaaggatttagtatattgtttcgaagtgtattaagtgtatattattattgaaatagtgagtttttttattcgagtagtattttattattgtgtttttttgggcggagttttttttttttgggttttggattttttttgtgtattttgtttttagcggtaatggacggggtatatgggtagtgtagtattattattttggggtggttagtatggtttttagttttattgtggataggataagttatgaatatttttatatttatatagatattgggaatttagtttagttttggataatgttgttttggggaagtttgggttgagagtaggtgggtagagtatggaatgtggggagttttgtttgaagtggattgggatggggtatagtgggagaggggggttttgggttttagggttttatattgtttttttttatagtacggtggtatatttaagagttaaatgtttggattttgatgttggtagttttaatttagttttattattttttagttatgtgacgttgggagatgatatgatttgagttttttgagttttagtatttttaattgtgaaatggggatatatgtgtttattttatagggttgtggagagatttgaataagttatgtttataggtattttgttaagtttcgagtaaaataagaaagtgttataaaaggtgattgatttagttgggcgcggtggtttacgtttataattttagtattttgggaggttaaggtgggtggattatttgaggttaggagtttgagattagtttggttaatatggagaaatttagtttttattaaaaatataaaattagttgggtgtggtggtgtatgtttgtaattttagttattcgggaggttgaggttagagaattgtttgaattcgggaggtagacgttgtggtgagttgagatggcgttattgtattttagtttgggtaataagagtgaaattttattttaaaaaaaaaaaaaaaggtgattgatttttaggtgttattaagagttgttgttatagaagtttattattagggttggagggaagtttattaatatgtttattatatagtcggtatgattgaggttagtgatggaaaggaatttgtgtaaggttttgtgatgtgttagttatagattgggattggaatcgaggttttttgtttagatttataagtttatgtttttttttagaggagggaattaggttgaatagattttcgtgttaagattttttttttttatttacgtttgttagagtcggaagttgttgtttttagtggggtagggggagggaatcggaaagggagtttgagtgggagaatttttaggaggtcgtttagtttttatttaggtagggtagcggttattatatttggtttttttacgtttttggttttgtttttatttttaggttttttaggtagagttgtggggtgggggtggggggtgatgaggaagtagtatatatattttaggcgtttatatagttattttagacgttaggattttaagatatgttttttttgttggtatggatattgaggtttagagagtggaggggatttgtttgaggtttacggtggggttgagggaagttagaatataggatttttgatttttagtttagtgtttttttatttatgtatgttttgagtagagtacgtagatttttgtgtttgtggttggggagttagagaggtatagagtgggaattgtttttttattttttggatatttagtgtagtggttttttgagtgggtaaaagattagtaggggttttgggttatattttttttttagatttttaggattgttttattgagttagattgtagttatcgaggtttgttagggttttaggagataaaggttttaagatattgtttatttagtttttttttgtttttttgttggttttttttttagttttaggatcgtgggtaatttgagtgtgtttatttggtatacgtagatggtttatagatttttagaagagtagggtttttatttttattgaatatattggtttttaaggtttggaga

SEQ ID NO: 1421 - DNA, 8842 bp, Artificial Sequence
  chemically treated genomic DNA (Homo sapiens)
  unsure 5852, 5857: n is a or g or c or t
aattgtaatatatgttattatgagttttaaaataattaagtgagtaattggtagggttgttaatagtgttaattaattttttggatgtttagttataaagatatgttaaaataatgttttttgtatttgattttattgttatggggaaaaaatattttaaattattggaggaagtttttttttgttttcgaaaaaaaattatatatgagaaaaatataaggaattttaagtttggtaagggtttgttttttttttttgggaatcgtgataagtttttttatgaagtgttgattttaggtagatttaaataggtggtttgttagacggttagattttatttatacgagggttggcggttttgagagttttttgagttaattgtatatatatatatttttttgagacgaagttttattttgttatttaggttggagtgtagtggcgtgattttagtttattgtaatttttgttttttgggtttaagtgtattttttttggtttagtgtaattcgtacggatttagggggattgaataaaggggattgaacgtgggaataaaagataagagataaaataatatatttggaagaaggggttagtggtattttagttttttaaagtgttgggattataggcgtgagttattgttttaagttagaagatagaaatttttaagttttgttttattagtgaggatttaggttattaagaagtgaaaagatttgtaatatttatttatagtttataagattttagtatagtgtttattaaggatggggttttgttttaagtgtttgataaatattaatttatataagttttatgatagttagttttatgagatgaatgttgttattatgttttatttaaagacgaggaaatcgaagtatagagagtttaggtaaattgttcgaggttatatagttggtaagtcgttgagttaggatttgagattaggtagattggtgttagagtttagatgttaggtcgttttttcgtaggatagtttttaggtttttaaaggttgttttcgtttggggattagttatagaaaatgattgatagtaattttaggttagatttattagtgtgtgtttaaaattttttttattaaaatatgtatttttttatatatttttattggataatagaaagatatgatgggtcgagtgtagtggattatgtttttgattttagtattttgtgaggttgaggtgggaggatcgtttgagtttaggagttcgagatttgtttgggtaatatagcgagattttgtttttattttaaaaattatatagaaagatatgtttatatttattgtggtttatttattttagatttaggaatttcgtgtttttttgaatatattatggtatttttttttattaattttttttaggattttgttatgagagggtatagtttattttttatatttataaaatgtaaagttgatatgaatatttttttttggttttttattatttttaggaaaagtgtttaaatttttaatgaggtttaataggattaggataatttattgttaatttcgtgtttagcgtttagattatagttagaaggttttttttttagtgttgaggtttgaatgtgttttttaaaatttatttattgaaatttaatttttaatgtgagggtattaggaagcggggtttttgggaggtgattagatgatgaggatggagttttgttttatttttttaggtttttttgaatggaattagtattttgatggaagaggttgaagggaatattttaggtaattttttgtttttttatttttttgttatgtgaggatttagttagaaggtttttattagatattgaatgttttgatcgtggattttttaatagttagaattataataaattaatgtttgggtttgtttgtttggttggtttttattgttgttgttgtttgttgttttttttttttgagatagggttttgttttgttatataggttggagtgtagtgatataatcgtggtttattgtagtttcgatttttcgggtttaagttatttttttattttagttttttaagtagttgggattataggtatttgttattatgtttagttaatttttgttttttttgtagagatggggttttattacgtttgttaggttggttttaaatttttgggtttaagtaatttatttgttttagtttcggaaagtgttaagattataggtatgagttatcgggtttggttaaaattttttatattttgtgttgagtggtgaatataattgtaaaaaaaaaaaaaaattatgtaattgtatagttataaattgtgtattttattatatgtaagttatattttatttttttaattagaaaataattattttaaatatgatttgttgtgatatatttggattttaaaatgggtattttatattcgtaggggaaaaggtgggaattaatatttgggttttgttgtataataggttttgtgtgagatttaatatagaagaattagatttttttataatattaggaaaatattaggaaaaaattattaggaaaaaaatattaggtaattttaggaattaaatgtaattttgtgatattttttattaggtttttttaagagtaattattttaggtattttaatggtagatggaatttttaaggaatttttatttttaggtggattaatagtttattttgaaaatgatagtaatgtgtatttagtttaatatgataaagtatttttatataaatgtttgatgaattttatgttaataagattatatttgttagtagaagggtttaaattaggattgaaattttaaatttatatgtgataatgataagtgttttattaatttgaaagtatattaaataaaataataaattatttttggagttatagtgaatttttttaatatatttattttaagaatatataatttaggaaattttagatgtttattttatgatatttcgggagataggggattttagaggattttcgttcgtggcgtaaaagtattattatttcgtggagatgatttttaaattaatatttttagtaagatgttttagatttataattttaatttttcgggggatatttttagatagttgtgttattgttattattaggttaatatgttttaaattatttagattagtttttttttttgagttggatatttggtttttaatttttttatttttttttattttttatattttattagtagtagtagttgttgaaattatattatgtaagttttttacgtttatttttgttttttaatggcgtttttttatttttttaagaagtttttttttattgtaatacgattttttagtttagagtttggtttagtgtttaaattatttttttagttatgttgagagttggttatgttttgaatttttgttttgaatatttttagtgatattgggagagaattattttattggattattgttattgttagaaaatttattgttatgttgaaatgaaatgattttatttatatatatatatatatatatataaaatagtttttttttttggaatatgattggtttgaaaatgtgtgaagatatatttaattttttttggttttattgtttatttaattttttgttttttttttggtaggaggattatattttattttgtggaatttagatatggtcgggtaattagttttggttcgtgaaaattgagaggaagtgatatgtgttatttttgggtagaagttttgagagtcggtttaaatgattttttttttttttatttatgagataagttaagttttagagagagggtgttacgttgtgagggatttgtgttacgagtacgatggttcgcgttattttaaatttttgaaattattgaaatttggaggttagttgttatattataatttagttaattttagttagtttgttttttttttaatttttttaatcgttttttataagttataatcgtagttttttatcgttttgattattgtttttggattttatttagtttatttattattttttttaaaatgtggagtttaaatttgaattcggaattttaggtgtaattttattaggatataatataatgggtttttgagttttttgattttttgaatagagttttttgttgttttggtgttttgtttttgtgtgtgtttttattatcggttgagttacgttgttaattcgtagtgagtttgtgaattaataattagagaaaaaagattttttttattgttttttcgatatatattgggaaataaattttttgattcgcgtttaagtagatagggtagaattgtttaattgttacgtgattttttaaagataaagttagtggtagattatttatagaaattagatgttttgttttttggttttgagtatgttgttaatttttattatttagtgtattgaacgagatgtattgaacgagggttgtagagttgtagtatcggtaggagtaggcgttcggtaggacggggtttgtataattttttcggtagttagtagagcggaatttaggaaggtttttttttcgcggcgttttggaggcgggggttttatttttttacgtaggcgttattaagtttcgtttttttattcgttcgcggcgtggcgtcggaaagagtttttagtttttttttttttggcgttgatatttaatgggtagttttaggtttttagcgggggcggggtattttttggacgtcgttttggttggttcgcggttcggcgtagcgtatgacgttattacgattttgttacgtcgcggtgcgattgaggcgtggcgtttgttggggtatttgaaggagatttgggggtattcgcgtcgtgttttttgggttgtgaggagtcgtcgttgtcgttattgtttgtgttttatgaggaagatgttcgtcgtcgtttttcgcgtgttgtttggcgttttttagaagtcggtgagatttttcgggcgggtcgggatggggcgcgagtggggttgaggcggggtcggagggtagggcgggttaggtcgggttatttagagcggggtggaaggcgttaggggagtcggggagtttttatttcgttttcgcgttttgtatttcgtttttggtttcgggagaagcggtacggatcgggattacgttaaggttcgtgtgaattttttttttttcgatatttatttttcgttttcgggtttagttgtgcgttaggcgaagtcggtgtgtttaagaggtgtttgttgggttataggatacggaaagggtggtttcggtttttttcgagtttttaattgattttatttatttcggattttttaatttaattttttttgatcgagaggttttgtaatagcgtagaatttggagatagggtggtttcgtttaaatagtatttttattattgattagttttgtgattttgagtaagtttttaaacgtttcggggattcggttttttaaaatgtttgttcgaagtggagttaatttttaaatggagataagagttatttttgaaatgttattagttaattttaaaatggagataataagagtttttattttttggggttgttttgaggatttaacgagtgatacgtgtggaaacgattttaaatagtatttggtatataatcgataatatgtgtgttgaatagtgttatttattgagtttttagttcggtatatattttttgaatatttgtgtttagttttgaggcgggtttatagaaggttagtttttttagaaataaatttttttttttttttttttttttaatatttgagttttttttggtagtgagtttaggagcgtcgaagtagaatttagattattttttttggtntattntcgttttgtttgagatagggtttttgtgttatttaggttggagtgtagtagtaggatagtttattgtagttttagtttgttgggtttaagcgatttttttgttttagttttttgagtagttgggaatataggtatgtgttattattatatttagttaattaaaaaaattttttttttattagagatatggttttgttacgttgtttagtttggtttttatttttaggtttaagtagtttttttatttcggttttttaaagtgttgggattatttttatttttttaaaattaggtaggtagggagatttattttaggtttaaagattgttattgttttattaaagagtgtttggtgtgaaattttgaaatgaatattaagattgtgtttttatttttgaataaggtttatagtttttatagtttttattttatggaagaagattgaatgtatttaaaatgttattttattgtttgtatttttgtatggttttttttgtgagatttttattagtaatgttttggttttataagtggtaggtaagagttttaatttatattgttagaatttggaatttttgaaacgtttttttttttttatatgaatggtttttatgtatttaggaagttaaagttttatttttttttaattaatttttttttttaggttggaatgtagtggtatagttatagtttattgtagttttaggtgtgtgttattatatttgattaattttttaatatttatttttgtagagatgagagttttatgttgtttaggttggttttgaatttttggttttaagtggtttttttattttggttttttaaagtgttggggattataggtgtgagttattatgttcggtttagtttttattttttaaaatttgagtgggttgttcgtggtttttgttagagaggaattttatttaatagagaatttttttatggttttttagagaaaatgaatggtaaatttatttttttaataagtttttatttagaaatgatatatatatatttttgataggatttttagtttttttaattttgttttttttatttatattagtggtttttatttttgagatatatagtaatgaagttatgggagaaagtatttaagtagttttttggtagttttaatttttgtaggcgtaagattataggcgtatgttatagtattgggtttttttttgttttttattgtatagtattattttgttttattgttttaattttaggattgagaaagaagttattttttttttgttattgtcgtttggttggtttggatttttgttttttaaaaattgtagtttttgtagttgtatttggaaatttattttataatataataaatttttggttttataaaatatttattaattgttaagaataatatatttgtttgattgttaaatataattattgatttgttgttttatttttttttagttttatttttttttaaatttttaaattttttttattttttttgagatatattagtggattgtttttgtttgtaagttaattgaaatattgatttttagtattttagttgtttttttttagtattgttattgtttgtgtttgttggttttgtttaataatggtttattgaggggtgaagatatacgtaattagttttttgtttattggtttgtatattttagggtatatttggtagattagttttaattttttttattaagattagtttagtgttggattaggtaaggtatgaatatattagatgtgttttttatggagaaattatgttggtttatacgttagtgtgtgagaatgtggtagaagggagttaaaatagtatgataatattattggataaattttgtggtttaatttaaattttagttattatatagaatatttttgttgtgagtaggtttgtttagttgtaaaattggaaaggaattattttttatttttcgtttttaagttttttatttttaaatagtgatagttatttaaatattaagagaatagtgttttagagaatatttttattggggttttaggaggagtttgtttaagatttaggttgtttaaattataaattataaaatagttggtttaagtttattgtgtttaagttagagagtgttaagtatttttttttttgttttgtttttttaaagtatttattttatattttaattaatttaaaatatttttttttatagattttatttgatagaagagttacgtttgtttagagtggagattaggttatagttttatttgaagtataattttggtttgtttaaaatgaatagtatttggttatgattaagaatggtatgaaaaggttagacgtagtggtttatgtttgtaattttagtattttgggaggttaaggtaggtggattatttgaggttaggagttggagattaggttggttaatatggtgaaattttatttttattaaaaatataaaaattagtcgggcgtggtggtgggtatttgtaattttagttattcgggagattgagataggagaaattatttgaattcgggaagcggaggttgtagtgagtcgagatcgtattattgtattttagtttgggtgataaaagtaaaatttcgttttaaaataaataaataaaagaatggtataaatagatatagtttatagatgatttagtttttttagttattaattttattatatttttattataatttttttgaaaataaaggatgggtttgttttttgtttttttttgcgttgtttgtttttagatgcgggataattttgttttattggttaaagtatggatttattttggaggttaaggaagatgtaaatatagtgtatagggtggaagagaagtttatgaatatgttggggtttattaaatttttataattttattttgataattgattattatattttttaaaatagttgataattaaaaagtattgatttgtttgtatatttttgttttttaagg

SEQ ID NO: 1422 - DNA, 8842 bp, Artificial Sequence
  chemically treated genomic DNA (Homo sapiens)
  unsure 2986, 2991: n is a or g or c or t
ttttaaaagataaaaatatataaataaattagtattttttaattgttagttattttggaaagtataataattagttattagaatgaagttatggaaatttaataagttttaatatatttataggttttttttttattttgtgtattgtgtttgtattttttttggtttttaaaatgaatttatgttttggttaatgaaataggattatttcgtatttgaaggtaagtagcgtaaagaggggtaaaaaataaatttattttttgtttttaaagaaattatagtgagaatataatgaaattagtggttaaagagattagattatttgtgagttgtgtttgtttatgttatttttttgtttgtttgttttgagacggagttttgtttttattatttaggttggagtgtagtggtgcgatttcggtttattgtaattttcgtttttcgggtttaagtgattttttttgttttagtttttcgagtagttgggattataggtgtttattattacgttcggttaatttttatatttttagtagagatggggttttattatgttggttagtttggtttttaatttttgattttaggtgatttatttgttttggttttttaaagtattgggattgtaggtatgagttattgcgtttggtttttttatgttatttttagttataattagatattgtttattttgagtaagttaaaattatattttaaataaaattatgatttaatttttattttaggtaaacgtgatttttttattaaataggatttgtaagagaagatattttaaattgattgaagtatgagataaatattttagggagataagataaaagaaaagatatttagtattttttgatttaaatataatgggtttgagttagttgttttataatttataatttgaatagtttaaattttggataggttttttttgaagttttagtagaaatgttttttgaaatattgtttttttgatgtttgggtggttgttattgtttggaggtaaaaagtttggaggcggggggtgagaaatgatttttttttagttttataattgagtaaatttgtttatagtaaaagtattttatgtaatggttaaggtttaggttagattataaaatttatttagtagtattattatattattttagtttttttttgttatatttttatatattgacgtgtaaattaatatgatttttttataaaaagtatatttgatgtgtttatattttatttaatttagtattggattgattttggtgagaagagttaagattgatttgttaagtatattttggagtgtataagttaataggtagaaagttaattacgtatatttttattttttaatagattattattggataaagttaataaatatagataatgatagtgttggaggaaaataattgaaatattaggaattagtgttttagttaatttataggtagagatagtttattaatgtattttagaaaaagtgaaggaaatttaggaatttgggaagaagtaaagttgagagaaggtgaaatagtaaattaatggttatatttagtaattaaatagatgtgttatttttggtagttaataaatattttgtggggttagaaatttattgtattgtgaaataaatttttaaatataattatagaaattgtagtttttggaaggtaggagtttaaattagttaggcgatagtaatagagaaaaggtaattttttttttaattttagagttgaaataatgaggtaggataatgttatataataaagagtaagaaggggtttagtgttgtggtatgcgtttgtaattttgcgtttgtaaagattaggattgttagaaagttatttagatatttttttttatggttttattattgtgtattttaaaaataagaattattgatatgagtgaaaggaataaagttaaagaagttaaaagttttattagaagtgtgtgtgtattatttttgagtgagagtttgttgaaaagataagtttattatttattttttttggagagttataaaaagattttttgttaaatgggatttttttttgatagagattacgaataatttatttaaattttaaaaaataaaaattaggtcgggtatgatggtttatatttataatttttagtattttgggaggttagggtgggaggattatttgaagttaggagtttaaagttagtttgggtaatatgagatttttatttttataaaaataaatattaaaaaattagttaggtatggtggtatatatttgaggttatagtgagttatgattgtgttattgtattttagtttaaaaaaaaaaattaattaaaaaaaagtaaaattttaattttttaaatatataggaattatttatgtgaaagaggaaaaacgttttaaaaattttagattttaatagtgtaaattaaaatttttatttattatttataaagttaaaatattgttagtaaagattttataaaaggagttatatagaaatgtaaataataaaataatattttaaatgtatttaatttttttttatgaaataagaattatgaaaattataaattttatttaaaaataaaaatataattttgatatttattttaaagttttatattaaatattttttgatgagataatggtaatttttaagtttgagataaatttttttatttgtttggttttaagagagtgagagtaattttagtattttgggaggtcgaggtgggaggattgtttgagtttggagatggagattagattgggtaacgtagtaagattatgtttttagtaaaaaaaaaatttttttaattggttgggtgtggtggtggtatatgtttgtgtttttagttatttaggaggttaaggtaggaggatcgtttgagtttagtaggttaaggttgtagtgagttgttttgttattgtattttagtttgggtgatatagagattttgttttaaataaaacganagtanattagggagaataatttgagttttgtttcggcgtttttgaatttattgttaagaaaagtttagatgttgagggagagggaagaggaggaagtttgtttttgaagaggttgattttttgtgaattcgttttagaattgagtataggtgtttaagaaatgtatatcgaattggagatttaataaataatattatttaatatatatgttatcgattatgtgttaggtgttatttggaatcgtttttatacgtgttattcgttgaatttttaagataattttaagaggtggggatttttattatttttattttagagttaattgataatattttagagataatttttatttttatttagagattaattttatttcgagtaaatattttaggaaatcgggttttcgggacgtttaaaaatttgtttaaggttatagggttagttaatggtgagggtgttgtttgaacgaagttattttgtttttagattttacgttattataaagtttttcggttaagagaaattaagttagaagattcgaaatgagtggggttaattggagattcgaaggaggtcgaggttatttttttcgtgttttgtaatttaataggtattttttgagtatatcgatttcgtttggcgtatagttgggttcgggggcgggaggtgggtgtcgagaagggggaagtttatacggattttggcgtgatttcggttcgtgtcgtttttttcgaggttaggaacggaatgtagggcgcggaggcgaagtaaaggtttttcggtttttttggcgttttttatttcgttttgggtggttcggtttggttcgttttgtttttcggtttcgttttagttttattcgcgttttatttcggttcgttcgggaggttttatcggtttttgagaagcgttagatagtacgcgggagacggcggcgagtattttttttatgaagtataggtagtggcggtagcggcgattttttataatttaggaggtacgacgcgggtgtttttaagttttttttaggtgttttagtagacgttacgttttagtcgtatcgcggcgtgatagagtcgtaataacgttatgcgttgcgtcgggtcgcgggttaattagaacggcgtttagggggtgtttcgttttcgttaaaggtttgaggttgtttattgggtattagcgttagagagggaggggttgagggtttttttcgacgttacgtcgcgggcgggtgaggaggcggggtttgatagcgtttgcgtgggaaggtggggttttcgtttttagggcgtcgcgggaaaggagtttttttagatttcgttttgttgattatcggggaggttgtgtaggtttcgttttatcgagcgtttatttttgtcggtgttgtagttttgtagttttcgtttagtatatttcgtttagtatattagatgatgaagattagtagtatgtttagagttaaaagatagaatatttggtttttgtaaatggtttgttattaattttgtttttaaaagattacgtagtagttggatagttttgttttgtttatttgaacgcggattaaaaaatttgttttttaatatatgtcgagaggataatgggaaaaattttttttttttagttattggtttataggtttattgcgagttaatagcgtggtttagtcgatgataaaagtatatatagagataaaatattaaagtaataaggggttttatttagaggattaaagggtttaggaatttattgtgttgtgttttagtgggattgtatttggggtttcgggtttagatttgggttttatattttaagggggataatgagtaaattgagtggaatttagggatagtggttagaacggtgaggggttgcgattgtgatttatgaagaacgattaaagaagttaggaagaaaataggttaattagaattggttgggttatgatgtaataattgatttttaaattttagtgattttaagaatttgaagtgacgcgagttatcgtattcgtaatataggttttttatagcgtggtattttttttttggaatttagtttgttttatggatgaagagaaaagggattatttaaatcggtttttaaagtttttgtttagaagtgatatatgttatttttttttaatttttacggattagagttagttattcgattatgtttgagttttataaggtgaaatataatttttttgttaggaggagaatagaaaattggatgaatagtaaaattagagaggattggatatgtttttatatatttttaggttagttatgttttaggaggaagagttattttgtgtgtgtgtgtgtgtgtgtgtgaataaaattattttattttagtataataatgaattttttaataatgataatggtttaatgagataatttttttttagtgttattgaaagtatttaaagtagaagtttaaagtatgattagtttttagtatagttagagaaataatttgggtattgggttagattttggattgagagatcgtgttgtagtggaagaaaattttttaaaggagtgagagggcgttattaaaaggtagagatggacgtgagaaatttgtatggtatgattttagtagttgttgttgttgatagaatatgaaaggtaaaagagaatgaaaaggttggaggttagatgtttagtttaggagaaaaagttggtttgaatggtttgggatatgttgatttggtggtggtagtggtatagttatttgaagatgtttttcgggaagttggagttgtaagtttggaatattttgttaaaaatattaatttgggagttatttttacggggtggtgatatttttacgttacggacggggattttttagagttttttatttttcggggtgttataaaatgaatatttgggattttttggattgtatatttttgaaataagtatattaaaaagatttattgtggttttaaggataatttattattttgtttggtgtgtttttaagttgatggaatatttattattgttatatgtaaatttaggattttaattttgatttaagtttttttattggtaaatataattttgttgatatgaaatttattaaatatttatatagaaatgttttattatgttaaattggatgtatattattgttatttttaaggtgaattattagtttatttagaaatgaaaattttttaaaagttttatttgttattaaaatgtttgaaatggttgtttttgaaagggtttgataagaaatgttatagaattatatttggtttttaggattatttagtattttttttttagtaatttttttttaatatttttttagtattatggaaaagtttaatttttttatgttaagttttatatagagtttgttatatagtaggatttaaatattaatttttatttttttttttgcgggtgtaaaatatttattttaaggtttaaatgtgttatagtaggttatatttggggtaattgttttttgattaaaaaaatgagatataatttatatataataaaatgtatagtttgtagttatgtagttatatgatttttttttttttttataattgtatttattatttagtataagatatagaaaattttggttaggttcggtggtttatatttgtaattttagtatttttcgaggttgaggtaggtggattgtttgagtttaggaatttgagattaatttagtaaacgtggtgaaattttatttttataaaaaagataaaaattagttgggtatagtggtaggtgtttgtaattttagttatttgggaggttgagatgggaggatggtttgaattcgggaggtcgaagttgtagtgagttacgattgtgttattgtattttagtttgtgtggtaaagtaagattttgttttaaaaaaaaaaaataataaataataataataataaaaattaattaaataaataaatttagatattgatttattatggttttggttgttgggaagtttacggttagggtatttagtgtttggtgagggttttttggttgagtttttatatggtagaagagtggaagggtaaaaaattgtttggggtgttttttttaattttttttattagggtgttaattttatttaaaggggtttgggggagtggggtagagttttatttttattatttaattattttttaaaggtttcgttttttgatatttttatattggaggttaagttttagtagatgaattttagggggtatatttagattttagtattgaggaggagattttttagttgtggtttgagcgttgagtacgaggttggtaatagattgttttggttttgttagattttattaaagatttagatattttttttaagaataatgggaagttagagaaggatgtttatgttagttttgtattttgtaaatatggaagatgagttgtgtttttttatgataggattttaaaggaaattaatggaaggaggtgttatagtgtgtttaggagagtacggggtttttgaatttaagataggtgaattatagtgagtatgagtatatttttttatatgatttttaaaatagagatagggtttcgttatgttgtttaggtaagtttcgaatttttgggtttaagcgatttttttattttaattttataaagtgttgaaattaaaggtatgatttattgtattcggtttattatgtttttttattatttaatggagatatgtggaaaaatatatattttaatagggaagattttaggtatatattgatgagtttggtttgaagttattattaattattttttgtggttgatttttaaacggaagtagtttttggaaatttaagaattgttttacggagaggcggtttagtatttggattttggtattagtttgtttggttttaaattttggtttaacgatttattagttgtgtgatttcgggtaatttgtttaaattttttgtgtttcggttttttcgtttttaaatggagtataatgataatatttattttatagggttggttgttataaagtttatatggattaatatttgttaggtatttaagatagagttttatttttaatgagtattatattagaattttgtagattataagtaaatattgtaaatttttttattttttggtgatttgggtttttattggtaaagtaaagtttagaaatttttattttttggtttggagtagtggtttacgtttgtaattttagtattttgggaagttgaggtgttattgatttttttttttaaatgtattattttgttttttgttttttatttttacgtttagttttttttgtttagtttttttaggttcgtgcgggttatattgagttagggagggtatatttgaatttaggaggtagaggttgtagtgagttgagattacgttattgtattttagtttgggtgatagagtgagatttcgttttaaaaaaatatatatatatgtagttggtttaaaagatttttagggtcgttagttttcgtgtgaatagagtttaatcgtttgataagttatttgtttgggtttgtttgggattaatattttatgaagaagtttgttacggtttttagaaggagagaataggtttttgttaagtttaaggttttttatgttttttttatgtataattttttttcggggatagggggggattttttttagtggtttaaggtattttttttttataatagtaaagttaaatataggagatattgttttaatatatttttgtgattgggtatttagaaaattggttaatattgttaatagttttgttaattgtttatttgattgttttgaggtttatggtagtatgtattgtagtt

SEQ ID NO: 1423 - DNA, 19787 bp, Artificial Sequence
  chemically treated genomic DNA (Homo sapiens)
gagtttttagttttttttaaaaaagtaaaattaaataatgggtttataatatttttatatagtaaaaacgattagtgttgtgtagtgttattttttaaaatagggtatatgttggttttagtattttttttttggtttttatttggttaatttaaaatgttatattttttatgaagttttttatgagttattgtatgaaatgatttttttttttttttatatttgtaaaatattttgttattttttaatggaattttattttttttttttatgttttattgtttattattggtatatattaattataaatatgtatttgtaattgtttaagtttttgaaaaataggaataatttatttatgtttgtattttttagtttggattttaatatacggtttttgagtaaatgtttttttttttagggaaatattttttgatttttgttgatgttagaaaaaattagtttaagggttagttagtagggatttaattttagagttgtaaaattaggttagagattattgttataagttgagtttgattcgaaaataatatatttgatgtttgaagaatttttagaatataagaagaaagtatatgaaatataagttatttggggatgttattgtaaatgataataaaaattattgaatgggttatagagtgtttagaaaagatatataatattttttataatatgtgtttagaaaagagtgtttattaaagatagaataatataaatatataggttttgagagcgaaggttttggtgagtaagttttttaaatttttatttttaatttagtttttttttttagtttgaaagtaatatttagtgtgatggttaatattgagtgttaatttgattggattgaaggatataaagtattgattttaggtgtgtttgtgagggtgttgttaaaggaggattaatattttgagttagtgggttgggaaaggtaggtttatttttaatttggatgagtataatttaattagttgttagtatggttagaatataagtaggtagaaaaatgtgaaaagggagattggtttagtttatatttttttttcgtgttggatgtttttcgatttgaatattggattttaagttttttagttttggaatttagattggtttttttcgttttttagtttgtaaacggtttattgcgggattttgggtttacgtgagttaatgtttaataaatttttttttatatatatattttattagttttgtttttttagagaattttgttaaatatatttagtgtatagtattatatgttgaggttgtattttaaatttaatatgtttataatatatttattataaattgttttttttttttgtattttttttttggtggattattaggttttaattattagattagaagtttaaaagttatttttgatttttttttttattatatatatttaattaataattaagattttttgattttatttttttatttagatttatagtattttttgtttggatgtttgttacggttttttagtttgtttttatgtttttggtttttttaattttagttagtaatttttaggttttttttagttattttgttgattattttattgtttttagtttaaaaatttaagatttgtttaataggttttttaggtttggttttagtttgtttagaattggttttttttcgtgggtttttggttttattgattttaagaatgaagtcgcggatttttgcggtgagtgttatagtttttaaagatggtgtgtacggagtttgttcgtttagatgtttagagttttttttttttggtgggttcgtggttttgttgattttaggagtgaagttgtagatttttatagtgagtgttatagtttttaaaggtggtacgtaggttgttcgtttttttcggtgggtttatggtttcgttgattttaggaatgaagtcgtagattttcgtagggagtgttatagtttataaaggtagtgcggatttatagagtgagtagtagtaagatttattgtgaagagcgaaaaaataaagtttttatagtttggaaggtgatcgaggggggttgtcgttgttggttttggtggttagtttttatttttttatttggttttatttatattttgttgattggtttattttataaagagttgattggtgggtttataaatttttagttagatatagagcgtcgattggtgtatttataattttttagttagatagaaaagttttttaagtttttattcgatttagaagtttagcggttttattttttattagtttttttttttagttttattttaagtttttggtttttattttatgttttagaatattaaatttaatatgggaatatattatgtttgtaattaaggataattttgagattgtgtatatgttattttttttatttggaatatttttatttttattgtatgtggttatgtttttttgattttttaggttttagtagatatttttattgttttttgaggtattttttaatttatttaagtgtatatttttaaattattttgaatttttttatttaagttatatcgttatatgttaaattatgttatgttgttatattatttttgtttttttgttaatttgttttttttattgtatagtatgttttaggggagaaggaattagatgtagtttgtatttataaatttataatgtttggtatatagtaggcgtttattaaatattcgttgaattaattatttatagttgaatattttttttttttaaggttaaagagattgtttttttttattgtttatgattttttaaaattataatgaaattttatgattttttaaaattttttttattgttgtttttatgtatttgtataaaattagataaatataaatatttagaggggtttatgtatttaattagatatgtaaatttagtgtgagtagtggaagttgtggtaatttggttagtattttttgtaaaggtggtgtttattagtaatcgtaatttagattttatgaaaaaataagggtttaatgttattatgtgttttgaggttttaaaagaagttgaaatgattttggattttgaaatgttggtttggtagggcgtggtggtttatatttgtaattttagtattttgggtagtttaggggggtggattatttgagataacgagttcgagattagtttggttaatatggtgaaatttagtttttattaaaaatataaaaattaattgggtgtggtgatatgcgtttgtaattttagttatttgggaggttgaggtaggaaaatcgtttgaattaaggaggtagaagttgtagtgagttgagattacgttattgtattttagtttgggtaataagagtaaaacgtgttaaaaaaaaaaaaaaaaaaaaaaaaggttggtttaaattttttatgaatattgagtgtagtaaaaaaaaaatatgtttgtttattaagttgtttgtgggttatgtttggtttgagaattttagtttattttcgggttttttaaggttttttttgatgtttattttgatgatattatattaagatttattgattgagggtacggatatttttttatatatatttgtttaggaacgatttttagttatttgttttgtttttaagatttttttttttttatttaattttgtttatgtagtattttatttttagagtcgtttttgttaatttggggaagttatttatttaaataagaaagtggttgataaatgtttagtaatgaaatttttcgcgagttattattttttaattaggatttttaattttaagaaagatatagataggaggaataagatagggggaataaggaaattaattttgaggggtttttttgttttttaggtggggtttattatattgtgttgaaattgtttattcgtttagttttttagattttgggttatttattttacgtatttttatttttgagcgtgtagaaggcgttttataaaattgttggtttgtgtaaatgatcgaaaattatatgtagcgtgagggtggatttttttttgatttcggtttaaggaagaatcgtttttatgattattttataatttatttaaacggagataggtaaggagtaattgtttaaaggtaaagcgttggtagttgaggtatagtttcggttcggtaaacgtttttcgagtgttaaacgtttttttaaacgtttaattggtcgttagggcgtagaaaagaagtttggggggcgcggttttcgttttagttttatttcggtgttttacgattttttttttggtttgtttttttgataaatattcggtgaggttatttaaacgttttttttttttagttatttgtttttttttaacgtttggcgtttagttttcgttatcggagcgtttcgttcgagattattgattttttggggtttcgtagttttgttttcgaacgttaaggtcgcggtgcgtcggggtagcgaacggttaggttcgaaatttcgtttcgtagttaaacgttcggttcgttattttgcgtttagttttagtcgtcgggtttcgtttgggtttttttttttgggaatatcgggtatcggtggtttcgtttttatttgcgcgtcgtattttcgggaataatagtttttttttcgagtattatagttagatatggtttagattagggattcgcgcggtttttaattttcgtacggttttgcgcgcggcgtttagtttgggatacggtagcgaggtcgtaaatgtaattaggcggcgttgagggtagttcgggggcggggcgaacggggcgggggtcggggtttggtaaggtttcgtcggttgagatatttagcggcgtatttgatttttcgggaggtaaggttaacgtggttggaggcggggttgggttggggggcgggggtttaagtttgagagatttaaaggtatcgttagcgtttgggggcgtggttaattatgcgggaggcggggttttgatgttggatattaggttgtgttgcgggtagttagtgagaaggtcgttaagatggcggttttttggaggttgggttgtgattcgcggttgttgcgttattttgtgggttttttcggtcgtcgaagcgtagggttggtgaagggggtttttgggtggtttgtaagtcgcggagttaattggagatggttttatagtacgtagtggtttcggggtgagtggtcggggttcgtttagtttttttgtgtagttgagtgatgggtttgggataggggtagttatgattgagggtttgtttttgggtgtgaaggtgcgcgggttttttattttttttttttttttttcggttggggttcgtcgatttggtttaatgtatgttgtgaagggtttttttggtagttgagagaattcgattttgttttaggttttttggtttgtatggttttgtgattttgttttggaatttgggttatttgtgaggcgtagagagggtttttaaattttttttttttagttttttttttaattaaggtttaggtttttttagggttgttaaacgtttcggacgagaaaaagttgtttaaggttgtcgagattgaaaagttattgttgggagtttttatttattttttaggtttttttttgttaggaggtgtttttattgaggttagtcgagttttattttacgttatgattcgtggaagatttaaatttgtaaatttttacggtattacgatagataaaggtttaggagaatgttttaagtaaatattcgtttgaaagagtaaatatttaggagataaattatattaaaaatttattatagaaaattgttgtttagtaatgatattgatgtagttaatataatttttgtagtatttaatagtatgtaaaatggtaggtcgggtattatttttttttattttgggagaaggttggagggaggcggggatggagaataggattgacgttttttagtgtgacgtattatttgttaattatcgtttttggtattttatagaatgaattttaatttaaataggtttagtagacgttgtttttatattttgagttattttaggtttagaaaaaaaaaattatataaagttatatggtaagatgagtgtattggggtttttaaaggttttttaatgggaataatttattttatttttggtgtaatgttttataatatattttttggagtagaggtgttttaatagtgtgtgtagaattttttttttttttttttttaagtttgttgaaattaaatttttttttagtttttagagattcggtttggtttggtgtggggtttaggaatttgtattttataaatgttggatgagttttgatgttttattttgatatttaatggaatgagttttgagatttattgttttagaaaattatggaatattaaaagtttagtattggatataatttaggaagagtgtttttaattttgtttattaagtagatttttttgagaatttttgaaaatgttatagattttttgtatagaggaagtattataaatggttatatataaaaatgtgtacgtagtggtttacgtttgtaattttagtattttgggaggcgaagttggaagattgttagagtttaggagttggagattagttcgggtaataaagtgagattttcgtttttatttaaaaaaaaaaaaagaaagaaaaaaagttaggcgtgttggtattttagttattttaggggttgaggtaggaggattcgttgaatttaggagttagacgttttattgagttatgattttgtcgttgtattttagtttgggtgatagagtgagattttgttttaggagaaaaaaaaaaaaaagtatatataggtttagtttaatgtttttagaaatttagttaggtaagtaatttttatttgtatttttatgatgtttttttatttattttttattttttagatatatattatgaataatttgtttattttagtttgaatattatttgttaggaagaaggtatggtattttaaggaaagttaaattagttttttagtgttgttgtaataaattattagaaattagtggtttaaaataatataaatttatattttatagttttagaggttcgaagtttaaaatggatttaattaggttaaaattaagttattggtaggagttgtatttttttttggaggttcgagattttatttttttaagttttttagattttagaggtttttaagattttttgatttatgggttttaaagttagtaatggttggtttagtttttattatattacgttatttttaatatttttttttgttttttgttatttataaggatttttgtgattatattgggtttatttggatgattttgaatattttttttattttaaggttgagtagaaattttaattttatttttaattttaatttttttttgttatgtaatagtatatttataggttttgggtattaggacgtgaattttttgaggtatggtattttgtatgtgaagttgtggaaagtatttggaaatattaagtatttggaagtgttggattttttttttaatatcgagttaaaatatattcgtttttgatttttatttatatatagatttttgttttgttatgtcgaaaatacgtggtaatttttgaattatttgttttataaattgtgaatttacggtggtgttttttttttgagtttggtagaaattgtagttttataaaattaaataattatttggattattgtaaattatataaattaagtatatttattgaattgtttcgttttttatataaatatttttaaaaatttgttagtcggaattatttttggagttttaatttttttaagaggtgttggtagtatttttatgagttatgatatatgttatttttttagtattttttagaattttttatttattttttatataatttagtaaagttggtattatttgtatttagttggataaaaatattaaggtttagagaaattgagttttttaaagatatgtaattgtgttgatgaattgaagtgtatgtatatatttatatatatatattaatttgtttaataaatttttaatttgtattatttttttaatagatttattgagaatgtagagattattttttttattatttatattattgaagaatgagtgaagaaattagtatttattaggtgttaggtatatggtattttgtttgggaagtagtggttagttgaattaaatagatttttagtatttgttatatggtatatttaattatatttagtttttggatatgtaatttaaaattttatatagggttgatttttaaggtatttgtagtttttttggggatataaataataaaggtatgattttaatagtgtatatagtaagtttagagggggtaagtttgaaatgattaggaaataatatataaggtagttttttagaggaagaggtgatagtttttataggttgaaggaatagtagaaataaagatttagagattagagtgattattatataattgatatagtatttgtaaatagttttttaatttattttagatagttaattttagagagtttaaattgtggtttttttagagtaggtagtatgatttggaatataattggtaagatgttaattaatagtattggttttaagttgtttttgaagaataatatgttgaatttaaaataatttgtgaatagaaaagtaattgaggtttaattttggtggcgatttgtttagtatataattataggtaatatatattatagatgtttaataaatatatttaaggaagttagtaatttaggaagttataaaagaatattagagtttatagtaggattttaagttggtagttagggaattgatttatattgttttagtagaaaaatttatggtaaaattttaaaattaggagattttatagagaaatttagatttttgttttttttttaaaattgatagttaaattttatgtggtgataattatttaatattgagtaatgattgttttttttaggtaggaaattgttttttattttgttattatgtcgtttattttgtattatattttagtaaggttgaatgttttttggtatttgtattatttttagttgttattttttttttttgtatttttatttttacggaaggtagaagataaaagattaagaaaaatgggagaaagtagatattgtgtatatgtgtaaaggaggaaaatgtttatttatttaatatgaaaataaaggatgttagaatttaaagaaaaaatttgaagatgttagttttttttttttatttgtttgttttttgtaggtatttgagtttttgatagtagtgttataattaggagagagggaatttttttgatagagttaatggtatggtatttttgttaaaatacggatatttttttaggtttggtttttattaagtgtttatatattgataagattgatatttttttttgaatttttatttaattgtggaaatagaaatatgtagaatagttttagtaaaagtaggatttattaaaaggatagaatattatttataaaatgttgtagggttatggggaaattataattattttatttattttttttagggtttatattatttgtttttttttttttatttattttgtttttttgtatagatttgtaattattaatttgtttatttttggttttttttttttagtgttagtttgttttgttttagtggtgatttaggtttttatgtacgatgcgttgttagttttgtttaagtgtttattattatttttgtaatttttttttaaattttttgaatagagaaattgatttaaagtagattagttgtgttatagggtatgtaaggttgattttttcgaaggttacgatttggatattttttttaagaaagtagttgagaattaatgattgatatttttgttgttatgattatttgattaaaataggttagtaatgtagtattttattttattttatttattttaattgtttttgcgttaagtaatgattaagtaaagtgtattatttaagtaaagtatttgtaggttatttagttgagatgtttgtttatttaaagaaaataggataggggtaaatgagattttattataggtagtaataggagggattaagaagatttagatgattaggaaatattttgtatatgtttattttgttttaaaggattttattttgtttatgaaagtagggtattagaagtagttattatatattgagtttttattatatttgtattatttttaattattataaaaattttgtaaaggtttgttaggttttacgggagaagaaatagatttagagaggttttagtattttatttaaggttagtggataagtggatgattattttggaattgtgtacgtgatgatatttagaggaagaagagaggatttttttttttggatgttttttttgtagaataagaaatattttttgttattatagtagaatttttttatattgtattgattagaattgggtcgtatgtttttttttaagttaggtattggtttgattttattgtgtgaaaaatgtatagattttggttaattaaggggatgggtgtggaattattaattttgagtatatatgtataagaaaagtatattgttgaataaagttgagttattagtaagaaagaaatttggggataggtttgggaataataagtagtatttgttgagagtttattatatattatgtatttttgtaagtattttatatgaattagtttatttaatatttataattaatattatattttggtagatagtttaggttttaatttagatttgatattaatgtttgtttttttaattatagtttattttagtattaagtgatagtttgattatagattttagtagaatagtgttagtatgttgacgttttaaagtttatcgtgtgtatattttaaatgaatatttttgttttttttaaaaaaatgaaattagatatagtaataatcgtattgtagattagtatttttgtgatagtttattattttagaataattaaggatattaaaatttttgattacgtgtaagggtggtaggattatttaagagagttagagtatatattgattttttttatttgtaaatttttaaggtgatgtatttttaaatatatttttttgttgttgttttgagtttaatttgttttttacgataaaatgtgtaaatttttaaagtatcgttgtgtgtgtgtgtgtgtgtgtgtgtgtgtgtgtgtatgtatttttttgttaggttgtaaatggaatggtaattttttttggttttttttttaagatggtaaagtaaagtgaattttatgtagaattttaattttatagtttaatattaagaaggatagtattttaagttgaaattttttttaaaatgtttggtttattttatttaaaggaaatgtattttatattatatgttatttaaaaattttggttaattttttttttaatgtgttattggatattaagtagaagtataataatatagaattagtagattttatgaataagatggggtatatgggtgatttatttttttggtaggtagtatatttattatagttagtgatttgtttgatatttttttgttattgtataaattaaggattttattatatgaaatatttttagggaaaaattaggattagtaaatgtataatttaggagagattttttgggaatatattagttttggtttttggaggggaataaatttgttaaattataaaagttatattattaatttttttaggaaagtgtatatatatataattttatatataattttgagtttagaggatttagatttttttgtaatttgtttgtaaatattatttagtttagagattatttttataaatattttggttattttttagtttttttttggataatagttattttaatagatattaagtaatattagtatagatttttttgttgttgttttttagtgttttattaggtagaattttagtttttataattttttgatggtttaatggtatttttatttattattgtttagtatttgtgtatttatttttttatttaaattttaatttttttgaggtcgagaatttggtttggtttagggttaggataataagtgtttagtaggtatttgttgaatgtttgatttggtttttagttttggaagtgaatagtatgagtattgaaggtaaaatatttgttagtgattttaatgagaggttggtttttaagtatgaaatgtagttagaatagagattaagaattagtgtattttagttatgagaatattgttgaataaggtaaaggagagagtaaaaagggaatttttaagtttaggttgggaaggtgaaaggaatttgtgaatgtattttttattattttaagaaggaattgtgatattttataatattgtgatattttataatgtaataggatattgtgatatatttagttagttatttggatgtttttagaatatatttttttaattgtttttatgttgtttattaaaaataaataattaatatttttgagatttattttttgttaagttttatgtgttattttttttttttttttttatttttttagatggagttttattttgtcgtttagattggagtgtagtggggcggtttcggtttattgtaatttttgtttttcggttttaggttttttaagtagttgggattataggtatgtgttattaagtttaatttttgtatttttagtaaagacgggtttttattatgttgtttaggttggttttgaatttttgatttaatgtgatttattcgttttagttttttaaagtgttgggattataggtatgagttattgttttcggtttattttatttttttataaaaatttatttatggtattattttagagaagaggaaatagatatagatagaataaataatttgtaggtggtggatttgaaattagagtttaggtagtttgattttagtatttattttttaaattattgtggtattttgtttttttttgagtttttttaaattaaatatttaaataataaaatattttatttagtataatagtatatgtatatagtttaaatagtattgaaaggtttgtaatagtatagtggatttttgttttattttatttaatttttttagttttttttagaagtaattagttttgttttttaatttttttttggtatttgtttatttttttgtttttattttagtcgttttttgtggatgattgtcggttagtgtcgttttttgttttttttttttagtgaaattattttgtaatttttggttaaatatttagtgtttatattaaataaatattatgtataattgaggattgttttatattttgtttgttagttttttttttgttgtagttattgttgttttttaaatttttagttagttttttttgtgataatttttaatttattttacggtatgtaatagtttttttatatagttttttgtaatgttagttatattagatatttttttatttaatttatttttgtagtttttatatatttttagttatgtagattgaattttaagtttttttttttgttttttgtagagaaaataagttttagttttttgttgaatgagggtagggttgttatttattattggattaagagaggggatttaggtatttagttattttttaaatagtagttatttaaattttttttggtttaggatatagttttttagggtttttttaattgattattacgtatttatttatttttttgtttttaaaattgtatgttgttattttttttttttgtgtttttgtgggtttttgtttaaaattaataaaagtaaatagtatatttttaaatttagtgttagttaagtttgaaagaggaagtaagattggataaatttattgtagatatgtatgaaaatgtaggttattagaaataaaagaaataaaaagtttttatagtaatattattagttagaatgattattattgttattttggagtattttattttaatttttgtatgtgtataagttgggtaggtagtaattggatgatgttatatataggtttgagtatttttaatttgaaaatttgatatttaaagttttttgagtattgatatgatgtttagaggtgatgtttaaaggaatgtttattgtagtatttgggattttggattttgagattagggatgtttaattagtaagaataatgaatgtaaatattttaaaatttgaaaaaatttgaaattaagaatttttatagttttaaatatttttgataaggtatatttaatttatatattgtttatgggttattttttttatgtttgttagtatgttaagatttgtaaatgttgtttttatataaattgttgtgtatttattttttgttgtggtttattgatatttttagtttatttttattttagtattatattaaaataattatttgaataaagaagatttatatgataaacgattttttaaaataaaaaatattataattgtttttattttaagtgttaatattattttgtgtttagtgttgatttttaaattatttttattttattttgttttattttatttagtttgtagatggtagaattgttttatttgaatagtaattttgaaggtttcgttttatttagtgtgttttgatattggaatgagaagtgattaaatgaatagtttttttttttattagagaagaagtaaattaatgttagagatagggagttatattaagaaagtattggataatttatttttttatttggtttatttttattttatgatttttgtatgtttggattataaatgaattagagtttataaatgaattagagtatgatgtttaagttgtattatatgtaaattgttgaatttttttaattattttagttagagtaatggagtttaaatttgttttatattaattataaagtagtttgttttgtatttgtattttaagagtttgtttgtattaaattttttttttaatttagagattttttagtatttatgaattaattattaatttaaagttttgatataattgagtttgttgaagtatgagtattttgtttttaggataaaagaaatattttagggaagaagaaattagaattagattagtgtattatatttgaaattgaagttagaattatgttgtagaaaaattggaagagtttatttgaggaaatataggaattgtttagagggattattgtaaaatttagtgattggtaaattgtttatgtagtagaaatggtagggaaaatagtaataagttaagtaaaaaattttaatgtattgtgttattttgttgatgtaaaaaaagagtaaaatagttatgagttatgagattttatttttaaaattagtaagtttaaatataaagtattggattatatatattataatagttatttaaaaatttttaaaaatgttttgtaattgttgtggaagggtagattttataagttaattagatataatttgttagttttataagaaggagtagaatattgaagtgattataaaacgttaaattttaattaaattttgagaattttgtgaatattaattgaaaaatttgtgtaatgagtgtagtaaattatttatttgtagttgtgggaaattaatattaggaaacgtaattggtgtatattttaaggtttttttaatttgataagagaatggtagaatgtatagtttattggaataaggagggagtttgtatataagtttaaatgtaaattaattaatattaggtaaaggataaaattttattttaaggagtttagaaaagtttatattattttagtagagttgatagtagttataaagggtagatattaattatgtgtaggtttgttattttaagtttattttacgattgtgtaattatttttttattagaaaaatacgtttggaaaagatattatatagtgttttaattaaaagagggtatgttagaatgaaatatgtatttttattaatatattaatgtttatgaaatgatttttttagtatgaaagtttgaggatagattagttagaataattataaaatatattgtatatttaatttttcgtaataagcgagtgtaatttattaagagatagtattgaataatggagatgtttaaaatatttttttttggtttttgttatttttattttagagtaaagataatgatttattatagaatttttgtattattataatttagataagtaattttaatttattttatgaagggtgattaaggaacgattatgttttttttatttttaaaatatgaaaatttttgaggtttttgatgtggtaatttgaaagataataataaatgtagaggttttataatatagtttttaatgttaagagtaatggaaatgtgaaggttttttaggtgagagattatagtaggagatagaattataaaataaatgtgaattgtgtcgtgataattggaattaaagtatataaatattggagagagattttaagagaattaagttagtatttgtcgtaaattggaatttggttatagaagtattgaggtttatttagttgtttttttgaaatggaattttttgatatataaatgtaatatgtatatatttatgaaatattttgtttataatgtttggtttgaattttttgatagaaagaatatattgggatttttttttttttaagtttttgttttcgaaaagaggttggttttttatcgtggtgttatttaaaagataagagtttttttttgtttatttttttttttttttttttttttttttagaataagtgagtttgttattttgagtttaataaaataaatgttgaggtttaggttgatagtatattttttaagtaattgtttttgatttttttattaagttatgtaaaaaagaaaaaggtagtagatatattatatagtgtagaggattagaaagtttattttgttatttttaaatgtatttagtgtgttaagttttatgtacgttttaagaatttttgtaattaagtgtaggattgttatggtttggatttggagatgtattattaatgttataagtttttttgtgtgtaagagagtatgtgtgtatgtgtgttttttaagtgtatttttttaattttagtttatttaagaatttagttttttagtattttatagataaaatattatggttgtatttagtagtttgtattattttttatttatttaatattttaattataaggatttattttattaagtaaaaaatgtaaagattttgaaagttattttttagttataatttagtattttaattagaggtagtttgggaatttagtgaaattgttttagttatagttattgagagttatggtggattggagttggatggttttgttttttagtgttttttaaaataacggtgtttcgtaattaggagttaggaaatttattgtggttatttttttttttgttttttatatataatgtatttagagataatttgtttttttatgtatttgaaatatttattgttagtagtaaaagtggtatttttgttttgttttttttaggtagagttttggtttgttgtttatgttggagtgtagtgattttggtttattgtaattatttttttttagattcgagtgatttttatgttttagttttttaaatagttgggattataggcgtgtgttattacgtttggttaatttttaaattttaatagagtggggtttcgttatgttggttaggttggttttaaatttttggttttaaatttgtttatttcggtaaaagtggtgttttaatataagaattttgtatgtttaaggtggggaaaaggtttataaggatatttgattagatatatgaagaatgtttatatggatttgatatgtttggtttgttatatttggatttttgagtgaatataagttattaataattattaattaattgatgatttatatttgtaaggaatattgagatgtaaagttagtatagttttgagagtttagtatgaagattcgtattttgtaattagtttggattgtggtttttttattgatgaaatgggcgtgtttgatttggattttggtttgggttgtgttatttttggggtattaggagtgataattttatttttttagtttttttagaatttggtgttagttgagagagagaaagggtaagatagatagagattaaatgttgatagttatattggattggagaatgtgatttagatttgtggttttttaagattgggttttttagtataattttattttagattttgaattttttgttttagagggagattgtgtgtgtataaagtaaatacgtatattcgaattgttgttttatatttggtgggttttgatggtaagaatatagagaggtggggtttgtggagttgtttttgaaaggtagcgtcgtgtgtgtttagtacgtggatggaggagttgataggaaattgtaggttgtttatgattaggaagtttttaaaataaggaagagagtgaggtaggtatgtatgtttgtattttttttttagatttttagagtgaaggaaaagtggagaggtatagaaatttttttttaaatattttaaagaggtggaagcgtttttattacgaagttataggaaatttttatttgaaaatgtagtataagttatttagttttttaagagaaatatttatttttatttaatattagtgtttaatttttttgtttttaattttaaaatattaggggagataaaagaagttttgtttttttatatttgaaatatgttagttatgttatagtgttttgtttgtttgggtttggaaagttgagtaatttgaagagagaatagggtttatggaaagttataggggatggacgtatttgttattatggtattttattagtaaattgtaatttaaaagttatggtgtttttgaatgtaattttggacggtggattgggaagtgtagtcggataaatatatagtgtttgttttttcgatatttaaggaaaatgtagttatgttttattgggagattattttggtttgaggtttatttttttggatttttagttgaattgtggtatgtaataaaatgtgaggttaatttaattatttaaattttgattatttttgataaggtaaacgtttttttttatatttattagtaggaatttttgaattttgaatattataatattagatgaaaataaaaatagttagttttttaaagtttgattttgattattttgttgtcgattattagaatcgtgtttttgttgttgttgttgttttgttgttgttgttttatttggttttttttttggttattttatttgtaaatttattttgtagaaataaaagggaaaggaggaggtgaaatttaaattaattttaaattaattttttttttttttttttgatttataagtatttggtttgagaagatgtatagaatattggggaattatgaaaatagagtttaaaatattttaaaaaatatttttgtggttataaaaaattgaattttatgtttttatataatttattggagatttagtttattagttgggaattttttagattttggaatatttttttttttaaattgaatttgacgttaatttatttgaatttatattgatgttttatgaggtgtattatttgttgtggtttatttttttttttttttaattttagg

SEQ ID NO: 1424 - DNA, 19787 bp, Artificial Sequence
  chemically treated genomic DNA (Homo sapiens)
tttgaaattgaaaaaaaggaaagatgagttataataaataatgtattttatgaggtattaatataagtttaagtaaattaacgttaaatttaatttgaaaaagaaggtattttaaagtttaaaagatttttaattggtaaattaagtttttagtaaattgtatggaaatataaaatttaattttttataattataaaagtgttttttgggatattttaaattttgtttttataattttttagtgttttatgtatttttttaagttaggtgtttataagttaaaaaaaaaggagaaaaattgatttaggattgatttaggttttattttttttttttttttttgtttttgtaaaatagatttataggtaaaatgattaaagaaaaagttaaataaaataataataataaaatagtaataataataaaaatacggttttgatgatcgataatagaataattaagattagattttaagaaattggttgtttttatttttatttaatattatagtatttaagatttaaaggtttttattaataagtatgaaaggaaacgtttgttttgttaaggatgattagaatttaaatggttaaattaattttatattttgttgtatattataatttaattggggatttagagaagtagattttaaattagaatgattttttaatgaaatataattatattttttttaggtatcgaaaaagtaaatattatgtatttgttcggttgtattttttaatttatcgtttagggttatatttaagagtattatggtttttagattataatttattaataaaatattatggtaataaatacgtttattttttatagttttttatagattttattttttttttagattatttaattttttagatttaaataagtaaaatattgtagtatagttaatatattttaaatgtggaagaatagggttttttttgttttttttgatgttttagggttaaaagtaaggaaattgagtattaatgttaaatgagaataaatattttttttgggaagttgaataatttgtattgtatttttaaatggagattttttatggtttcgtgataaaggcgtttttatttttttgaagtatttaagagaaagtttttgtatttttttattttttttttattttgaaggtttggagaaagaatgtaagtatgtatatttgttttatttttttttttattttaagaattttttgattatagataatttgtagttttttattagtttttttatttacgtgttagatatatacggcgttgttttttaaaagtagttttataggttttatttttttgtgtttttgttattagggtttattaggtatgaggtagtaattcggatatgcgtgtttgttttgtatatatatagtttttttttaaaatagaaagtttaaagtttaaagtggggttgtattaagaagtttagttttagaaggttatagatttaagttatattttttaatttaatgtaattattagtatttgatttttatttgttttatttttttttttttttaattggtattaaattttaagaaggttggaaaagtagaattattatttttaatgttttaaaaatgatatagtttaaattaaagtttaagttaaatacgtttattttattaatgagaaaattataatttagattgattataggatgcgaatttttatgttaaatttttaaagttgtgttaattttatattttaatgttttttataaatatggattattaattaattaatggttattgatagtttatatttatttagaaatttaaatatagtaaattagatatattagatttatgtgagtattttttatatgtttaattaaatatttttataagttttttttttattttgaatatgtagaatttttgtattaaaatattatttttgtcgaggtgggtagatttgaggttaggagtttgagattagtttggttaatatggcgaaattttattttattaaaatttaaaaattagttaggcgtgatggtatacgtttgtaattttagttatttggggggttgaggtatgagaattattcgaatttgggaggagatggttgtagtgagttaagattattgtattttagtatgggtaatagattaagattttgtttgagaaaaataaaataaaaatattatttttattattgataatgaatattttaaatgtataagagaataggttatttttaagtgtattatatatgaaaaataggaggaaaaatagttataatgagttttttaatttttaattacgaaatatcgttattttggaagatattgaagaataaagttatttaattttagtttattatgatttttaataattgtagttgaaatagttttattgaatttttaagttatttttagttgaaatgttaaattataattagaagatagtttttaaaatttttgtattttttatttagtaaaataagtttttgtgattaaaatattaaataggtaaaaaataatgtaaattattaaatataattataatgttttgtttataaaatgttggagaattaaatttttgagtgaattaaaattagggaagtgtatttggaaaatatatatatatatatatttttttatatataggaaaatttataatattagtgatgtatttttaaatttaaattataataattttatatttaattgtaagaatttttaaaacgtgtataaagtttaatatattgaatgtatttggagataatagaatgagttttttaattttttatattatgtggtgtgtttattgttttttttttttttatatggtttgatgaaaaaattaaaaatagttgtttaaagaatgtattgttagtttgagttttagtatttattttgttaagtttagaataataaatttatttgttttggggaaaaaaaaaaaaaaggaggggggtgggtaaaaaaaaatttttattttttaaatagtattacggtaagaggttagttttttttcgaaaataaaggtttaaaaaaaaaaaagttttaatgtgttttttttattaaaaagtttaagttaggtattatgaatagaatattttataaatatatatatattatatttatatattaaagagttttattttaaagaagtaattaaatggattttaatgtttttatagttagattttaatttacgataaatattaatttaatttttttaaagtttttttttaatatttgtatgttttggttttagttgttacgatataatttatatttattttatgattttattttttgttataattttttatttaagagatttttatatttttattatttttgatattaaggattatattatgaaatttttgtatttattattattttttaagttattatattaagaattttaaaaatttttatattttaaaaataaaaagaatataatcgttttttagttattttttatgaaatgaattgaaattgtttatttgaattatgataatataaaaattttgtagtagattattatttttattttgaaatgaaggtgataaaaattaaagaaagatattttggatatttttattatttaatattattttttgatagattatattcgtttattacggagagttaaatgtgtaatatattttgtagttattttaattaatttatttttaggtttttatgttagaaaaattattttataagtattaatgtgttaataaaagtatatattttattttagtatatttttttttgattagaatattatatggtattttttttagacgtatttttttgatgggaaagtaattatataatcgtaagataaatttgaagtgataggtttgtatataattaatatttgttttttatggttgttgttaattttattaagatagtgtagatttttttagattttttggaatggaattttattttttatttaatattaattaatttgtatttgaatttatatgtagattttttttttattttagtaagttgtatattttattatttttttgttaaattaagaaggttttaagatatgtattaattacgttttttagtattagttttttataattataggtaagtagtttgttgtatttattatataagttttttaattagtatttataaagtttttaaaatttagttaaaatttaacgttttgtagttattttagtgttttgtttttttttataaagttagtaaattatatttaattggtttgtgaagtttatttttttatagtagttataaaatatttttaaaaatttttaaatgattattgtaatgtatgtggtttagtattttatatttaaatttgttgattttaaaagtaaagttttatgatttataattattttattttttttttatattaatagaatgatataatatattaaaattttttgtttagtttattgttgttttttttgttatttttgttatatgagtaatttattaattattgaattttatagtaatttttttaagtaatttttgtatttttttaaatgggtttttttaatttttttatagtataattttgattttaattttaaatatggtatattaatttaattttagtttttttttttttaaagtattttttttattttaagaataaaatgtttatattttagtaaatttaattatattaaagttttaaattgatgattgatttatgaatgttaaaaggtttttagattaaaaaaaaaatttaatataagtaaatttttaaaatataaatgtagaataaattgttttatggttaatatgaagtagatttaagttttattattttgattaaagtaattaagggaatttagtagtttatatatggtatagtttaaatattatgttttagtttatttataggttttagtttatttataatttaagtatgtaaaaattatgaaatgaagatagattaaatgaaaaagtaaattatttagtatttttttagtgtggttttttgtttttaatattaatttgttttttttttaatagggagagagattgtttatttaattattttttattttaatgttagaatatattaaataaaacggagtttttaaaattgttgtttaaatgaaataattttgttatttgtaggttggatgaaataaggtagaataaagtaaaagtaatttaaaaattagtattaggtatagagtaatattaatatttggaataaaggtagttatagtattttttgttttaaaggatcgtttgttatataagttttttttgtttaaatagttattttggtgtggtattggagtaaaaatagattgaaaatgttaatggattataatagaaaatgaatgtataatagtttgtgtgaaaatagtatttataggttttggtatgttaataaatataaaaaagataatttataagtaatatataggttgagtatgttttattagaaatgtttgggattataagagtttttaattttagatttttttagattttggaatatttgtatttattatttttattggttgagtatttttaattttaaagtttaaaattttaaatgttataatgaatatttttttgagtattatttttgagtattatgttagtgtttaaaaagttttggatgttagatttttagattagagatgtttaaatttgtatatggtattatttaattattatttgtttagtttgtatatatataaagattgaaatgaaatattttaaaatgataatagtagttattttagttagtgatattattataagggttttttattttttttatttttgataatttatatttttatatatgtttataataaatttatttaattttatttttttttttaaatttaattaatattaagtttaaaaatgtgttgtttgtttttgttaattttaagtagaaatttataaggatatagagaaaaggaataatagtatataattttggaagtagaaaagtaaatagatacgtaataattaattaaagagattttagaaagttgtattttaagttagggaggatttgggtggttgttgtttgaaaagtagttagatatttggatttttttttttaatttagtggtaggtaataattttatttttatttaatagaagattgaagtttgttttttttgtagagggtaaaaagaagagtttgaagtttaatttatatagttgaggatatataaaaattgtaaaaataagttaagtgagaaagtatttgatgtggttgatattatagaaaattgtgtggagaagttattatatatcgtgagataaattagaaattattatagaaaaaattaattaaaaatttaaagggtagtaataattgtagtaaaaagaaagttaataaataaaatatgggataatttttaattgtgtataatatttgtttaatgtaaatattgaatatttgattaagaattataaaataattttattggggagggaaaatagagggcggtattgatcggtagttatttatagaaaacggttaaaatagaaatagagagatgggtaaatgttagaagaaagttaagagataaaattagttatttttaaggaagattgggaaagttgggtgagatggggtagagatttattgtattgttataagttttttagtattatttaaattatatgtatgtattattgtgttaaatgaaatattttattatttaaatatttaatttaaaaaaatttaaggagaagtagaatattatagtgatttagagaataggtattggaattaaattgtttaggttttaattttagatttattatttataagttatttattttatttatgtttgtttttttttttttaaaatggtgttataaatagatttttgtaaagaaataaggtaggtcgggagtagtggtttatgtttgtaattttagtattttgggaggttgaggcgggtggattatattaggttagaagtttaagattagtttggataatatggtgaaagttcgtttttattaaaaatataaaaattaggtttggtggtatatgtttatagttttagttatttgggaggtttgaaatcgggaggtagaggttgtagtgagtcgagatcgttttattgtattttagtttgggcgatagagtaaggttttatttaaaaaaatagaaagaaagaaagaaggtaatatatgggatttggtaaagaataagttttaaaaatgttagttatttatttttgatgggtagtatagaaataattaagagggtatattttggaggtatttagatagttggttagatgtattataatattttattatattgtaagatgttataatattgtagaatattatagtttttttttggagtaatgagagatgtatttataggttttttttatttttttagtttaaatttgaaggttttttttttatttttttttttattttatttagtagtgtttttatgattaaagtatattaatttttgatttttattttaattatattttatatttgaaaattaattttttattaaaattattggtaaatgttttatttttagtgtttatattatttatttttaaagttaaaagttaaattaggtatttaataaatgtttattgaatatttgttattttagttttagattaaattagattttcgattttaaaaggattaaaatttagatgagaagataaatatataagtattagatagtagtagataaaaatgttattagattattaaagaattatgagagttgagattttatttgatggaatattggaaaataataataaaaaaatttgtattagtattatttaatatttattaggatggttattatttaaaaaaaagttaggaaatgattaaaatgtttatggaaatagtttttagattaggtggtatttatagataaattatagggagatttgagttttttggatttagaattatatataaaattgtgtatgtatgtatttttttgaagaagttagtggtatagtttttatagtttaatagatttgtttttttttaaaaattagggttaatatatttttaagaaattttttttgaattatatatttgttgattttaatttttttttaggaatgttttatataataaagtttttgatttatatagtaatagaaagatattaagtagattattagttatagtaaatgtattgtttattaaaaaaatgaattatttatatattttattttgtttatagaatttgttgattttatattattatatttttatttagtatttaatggtatattagaaaagaggttagttagaatttttagatagtatatggtgtagaatgtattttttttgaatgaaataaattaaatattttagaagagattttagtttggaatattgttttttttggtattaaattataaaattaaaattttatatgaagtttattttattttgttattttgggagaagagttaaaagaaattattattttatttatagtttagtaaaagaatatatatatatatatatatatatatatatatatatatataacgatattttgggaatttatatattttgtcgtaaaaggtaaattaagtttaagataataataagaaggtatatttaagagtatattattttagaaatttatagataggagaagttaatatatattttaatttttttaaatagttttgttatttttatacgtagttaagaattttggtgtttttaattgttttaaaatgataggttgttatagaaatgttagtttataatgcggttattattatgtttgattttatttttttaaaaaaagtaaaaatgtttatttaggatgtatatacggtgaattttaaaacgttagtatgttgatattgttttgttgaaatttataattaagttattatttgatattgaggtagattatggttaaggaaataggtattggtgttagatttgggttgaaatttgaattatttattagagtatagtattagttgtgagtattaaatgagttgatttatgtaaagtgtttataagggtgtatagtatatagtaagtttttaataaatgttatttattatttttaaatttatttttaaattttttttttgttggtagtttaattttgtttagtaatatattttttttgtgtatatgtatttagagttagtgattttatatttatttttttgattagttaaagtttatatattttttatatagtgaagttaagttagtgtttaatttaagaaagggtatacgatttaattttggttaatataatataagaaaattttgttgtggtaatagaagatgttttttgttttgtaaaaaagatatttaagaagaaaggtttttttttttttttttggatgttattacgtgtatagttttaaagtggttatttatttatttattaattttgggtaaaatgttaaaatttttttgagtttattttttttttcgtgaaatttggtaaatttttgtagggtttttatgatggttagaagtaatgtaaatatagtgagagtttagtatgtgatggttatttttaatattttgtttttatagatagaataaaattttttaaaataaggtaaatatatataaagtattttttgattatttaaatttttttagttttttttgttgttgtttgtagtaagattttatttatttttgttttattttttttggatgggtaaatattttagttgagtagtttataagtgttttgtttagatgatatattttgtttggttattatttagcgtagaaataattaaaataaataaaataaaataaaatattgtattattggtttattttagttagatggttatagtaatagaaatgttaattattgatttttaattatttttttaaagaaaatgtttaaatcgtagttttcgaaagaattagttttgtatgttttgtagtataattggtttattttgggttagtttttttatttaaggaatttgaaaggagattatagaaatgatggtgagtatttaaataaaattgatagcgtatcgtgtataaaggtttgaattattattgaggtaaggtaagttgatattgagaaagaaaagttaggagtaaatagattgataattgtaagtttgtataggaaaataaagtaaataagagaaagaagataaataatatgagttttagaagaaatagatggaataattatggtttttttatggttttgtagtattttataagtgatgttttatttttttaataaattttatttttattagagttattttatatgtttttgtttttatagttaaatgagaatttaaaggagaatattaattttattagtgtataagtatttaataagaattaggtttaaaagagtattcgtgttttggtagaaatattatattattaattttattaaagaagtttttttttttttggttatagtattgttgttaaaaatttagatgtttataaaaaataggtaggtgagagaagaggattagtatttttaggttttttttttagattttgatattttttatttttatattaaatggataagtattttttttttttatatatatatataatatttgtttttttttattttttttggttttttgttttttgtttttcgtagagataagagtataagaaaaaaaaatgataattagaggtgatgtaaatattaagggatatttagttttgttaagatgtaatatagagtaggcggtatagtgataaagtaggaagtaattttttatttaaaaagaataattattatttagtgttagataattgttattatataggatttaattattaattttaaagagagaataaaaatttagatttttttgtaaagttttttgattttaaaattttgttataagtttttttgttaaaataatgtgggttagttttttggttgttaatttggaattttattgtaggttttagtgtttttttataattttttagattattagtttttttagatatgtttattgaatatttataatatgtattgtttataattatatattaggtaaatcgttattaagattgaattttagttatttttttatttataggttattttaaatttaatatgttattttttagagataatttaaaattaatattattaattaatattttattaattatattttaaattatgttatttattttgaaaggattataatttaaattttttgaagttaattgtttagagtaggttgaaaaattgtttatagatgttgtgttaattatataatgattattttggtttttgggtttttgtttttgttgtttttttagtttgtaagggttgttatttttttttttaagaagttgttttatatattattttttgattattttaaatttattttttttgagtttattgtatatattattgaaattatatttttattgtttatgtttttaaagagattataaatattttaaggattagttttatatagaattttggattgtatgtttaggagttaagtatgattaaatgtgttatgtggtaaatattgagaatttgtttgatttagttggttattattttttaagtagggtattatgtgtttggtatttaatagatgttaatttttttatttattttttaataatgtaagtggtaaaaaagatagtttttgtatttttaataaatttgttgagagaatgatataaattaaagatttgttaaataaattaatatatgtatataaatatatatatgtattttagtttattaatatagttatatgtttttaggagatttaatttttttaagttttggtgtttttgtttaattaaatgtagatgatgttaattttattaggttatgtgagaagtgaatgagaaattttagaaagtgttaagaaaatggtatatgttatagtttataaaaatgttgttagtattttttaaggaaattaaaattttaaaggtagtttcgattgataaatttttaaagatatttgtgtgaaagacgaaatagtttaataaatgtatttaatttatatagtttatagtaatttaaatagttgtttagttttataaaattatagtttttattaagtttagagaaaaaatattatcgtaaatttatagtttgtaaaataaatagtttaaggattgttacgtgttttcggtatggtaaaataaaaatttgtatgtaggtgaaagttagaagcggatatattttggttcggtattaggaaaaaagtttaatatttttaaatatttagtatttttaaatattttttatagttttatatgtagaatgttatgttttaaaaggtttacgttttaatatttagaatttatgaatatgttgttatatggtaagagggaattaaggttaaagatggaattaaggtttttatttaattttgagatggggaaaatatttaggattatttagatgagtttaatgtaattataagggtttttgtaagtggtagaaggtagaggggagtattaagagtgacgtaatgtgataaagattgaattagttattgttgattttgaagtttatgagttaaagaattttagaaatttttagaatttggaaaatttaagggaatggggtttcgagtttttagaaaagaatgtagtttttattaatagtttgattttagtttagttagatttattttggatttcggatttttagaattatgagatgtgaatttgtgttgttttaagttattaatttttggtaatttgttgtagtagtattagaaaattaatttggttttttttgagatgttatgttttttttttgatagatggtatttaaattggggtagataagttgtttatggtatatgtttaggggatagggaataggtaaaaaagtattatgaggatgtagataaggattgtttgtttaattgagtttttaaaggtattaaattgggtttatgtatattttttttttttttttttttgagatagggttttattttgttatttaggttaaagtgtagcggtaggattatagtttaatgaaacgtttaatttttgggtttaacggatttttttgttttagtttttggagtagttgggatgttagtacgtttggttttttttttttttttttttttttttaagtagagacgggggttttattttgttgttcgggttggtttttaatttttgggttttagtaattttttagtttcgttttttaaagtgttgggattataggcgtgagttattacgtgtatatttttgtgtgtgattatttatggtattttttttgtatagagagtttgtaatatttttaaagatttttaaaaggatttgtttgataaataagattaagagtattttttttagattatatttaatattaaatttttaatattttatgattttttaaggtagtgagttttaaagtttattttattaaatgttaaaataaaatattaaaatttatttaatatttgtaaaatgtagatttttgagttttatattagattagatcgaatttttaggagttggaaaaaagtttaattttaataaatttggaggagggaagagaaggaattttgtatatattgttaaagtatttttgttttaaggaatatgttatgaaatattatattaaaaatgaaataaattgtttttattaaggaatttttaggaattttaatatatttattttattatatgattttgtgtgattttttttttttgagtttaaggtagtttagaatatgaaggtaacgtttattagatttatttaaattaaaatttattttgtagagtgttaggaacgatgattggtaggtaatacgttatattaaaaaacgttagttttattttttattttcgtttttttttaatttttttttaaaataaggaaaaataatattcggtttgttattttgtatattgttaaatattgtaagaattgtgttaattgtattaatattattattaaataataattttttataataaatttttggtatgatttattttttaaatgtttgtttttttaagcgaatatttgtttgaaatatttttttggatttttgtttatcgtgatgtcgtaggaatttataaatttaagttttttacgagttatggcgtggggtaaaattcgattggttttaatgaaaatattttttaatagagagaggtttagagaataagtaagaatttttaatagtggttttttaatttcggtaattttgggtagttttttttcgttcgagacgtttgataattttaaagaaatttgagttttgattggaaagggggttgagggaggagagtttgggaattttttttgcgttttataaataatttaaattttaaggtaaggttataaagttatataaattagggggtttagggtagagtcgagtttttttagttgttaagaaagttttttatagtatgtattaggttaagtcggcggattttaatcggagaaagaggaaagggaataaggagttcgcgtatttttatatttaaaagtaggtttttaattataattgtttttgttttaggtttattatttagttatatagagaagttgagcgagtttcggttatttatttcgaagttattgcgtgttgtgaaattatttttaattagtttcgcggtttatagattatttaagagttttttttattagttttacgtttcggcggtcggggaagtttataagataacgtagtagtcgcggattatagtttagtttttaggaggtcgttattttgacggtttttttattggttgttcgtagtatagtttgatgtttagtattaaggtttcgtttttcgtatggttggttacgtttttagacgttagcggtgtttttaggttttttagatttgaattttcgttttttaatttagtttcgtttttaattacgttggttttgtttttcgggaagttaggtgcgtcgttggatattttagtcggcggggttttattagatttcggttttcgtttcgttcgtttcgttttcgggttgtttttagcgtcgtttgattgtatttgcggtttcgttgtcgtattttaggttaagcgtcgcgcgtaaagtcgtgcggagattggaggtcgcgcgggtttttggtttgggttatgtttggttgtgatgttcgggagggagattgttgttttcggagatgcggcgcgtaggtaggggcggggttatcggtgttcggtatttttaggaggagaggtttaggcgggattcggcggttggagttgggcgtagggtagcgggtcgggcgtttagttgcggggcggggtttcgggtttggtcgttcgttatttcggcgtatcgcgattttggcgttcggaagtaaggttgcgaggttttaggagattagtggtttcgggcggggcgtttcgatggcgggagttgggcgttaaacgttggaaagaagtaaataattgagagaggagagcgtttaggtgattttatcgggtatttattaggaaggtaggttagagaaggaatcgtgaagtatcgaagtggagttggggcgaagatcgcgttttttaagttttttttttgcgttttgacgattagttaggcgtttggggggacgtttggtattcgggagacgtttgtcgaatcggagttgtgttttagttgttagcgttttgtttttgagtagttgttttttgtttattttcgtttagatgaattgtgggatgattatgggaacgatttttttttaagtcgaagttaaagggaaatttatttttacgttgtatgtagttttcggttatttatataaattaatagttttatggagcgttttttatacgtttagagatagggatacgtaagataaatggtttagggtttggagaattagacgaataagtagttttagtataatatgataaattttatttaagaggtagggaaattttttaaaattagtttttttattttttttattttattttttttatttatattttttttagggttgaaaattttaattaaaaagtagtaattcgcgggagattttattgttaaatatttgttaattatttttttgtttgaataagtgatttttttaaattagtaaagacgattttgaaaatagaatgttgtataggtaagattggatgagagagagaagattttggagataggataggtaattggagatcgtttttgggtaagtgtgtatggagaagtgttcgtatttttaattagtaaattttagtgtaatgttattagaatgagtattaaagagagttttaagggattcgagaataaattaggatttttaaattaaatatggtttatagatagtttggtggataggtatgttttttttttgttgtatttaatgtttatgaaaaatttgagttaattttttttttttttttttttttttttgatacgttttgtttttgttgtttaggttggagtgtagtggcgtgattttagtttattgtaatttttgtttttttggtttaagcgatttttttgttttagttttttaagtagttgggattataggcgtatgttattatatttagttaatttttgtatttttagtagagattgggttttattatgttggttaggttggtttcgaattcgttattttaggtgatttatttttttaagttgtttaaagtgttgggattataggtgtaagttattacgttttgttaagttaatattttaaaatttagaattattttagttttttttaaaattttagaatatatggtgatattgggtttttatttttttatgggatttggattgcggttattagtgaatattatttttatagagggtgttggttaggttattatagtttttattatttatattggatttgtatatttagttaaatatatgagtttttttagatatttgtatttgtttggttttgtataaatatataaaaatagtaataagaaaagttttaagaagttataaaattttattgtagttttagggggttatgggtaatggaaagagatagtttttttggttttaaggaaggggaatgtttaattgtaagtgattaatttaacgaatatttagtgagcgtttattatgtgttaggtattgtggatttataagtgtaagttgtatttggtttttttttttttagaatatgttgtatagtggaagagataaattagtaaagagataaagatggtatgataatatgatatagtttgatatatgacgatatgatttagatgggaaagtttaaggtagtttaggagtatatatttgaatgggttagagaatattttaggaaatagtgaaagtatttattgaggtttaaaggattaggaagatataattatatgtaatgaaagtaaggatattttaagtaggggaagtagtatgtatataattttagggttgtttttgattatagatatggtgtgtttttatattaagtttggtgttttggaatataaagtaggggttagagatttgagatgaagttaaagagaaaagttagtgagaggtaaagtcgttgggtttttgggtcggatggggatttggagaatttttttgtttagttaaaggattgtaaatgtattaatcggcgttttgtgtttagttaaaggtttgtaaatttattaattagttttttgtaaaatggattaattagtaggatgtgggtggggttaaataagggaataaaagttggttattagagttagtagcggtaatttttttcggttattttttaggttgtggaagttttgttttttcgttttttataataaattttgttgttgtttattttatgggttcgtattatttttatgagttgtaatattttttgcgaaggtttgcggttttatttttgaagttagcgagattatgaatttatcgggaggaacgaataatttgcgtgttatttttaagagttgtaatatttattgtgaaagtttgtagttttatttttgaagttagtaagattacgaatttattagaaggaagaaattttgaatatttgaacgaataaatttcgtatatattatttttaagaattgtaatatttatcgtaagggttcgcggttttatttttgaagttagtgagattaagaatttacgggaaggaattaattttggataaattaggattagatttaaagggtttgttaagtaaattttagatttttaaattaagggtaatgagataattagtaggatgattgaagaaggtttggggattgttggttagagttaaaaagattagaggtatggagatagattaggaagtcgtggtaggtatttaagtaagagatgttgtaggtttgagtgagggagtaaaattaggaggttttggttattgattagatgtgtgtagtgagaaaagaagttaagaatgatttttaggtttttgatttagtgattggggtttggtggtttattagaaagagaatataggaggaagaaatagtttatgatgggtgtgttgtggatatgttgagtttgaggtatagttttagtatgtggtattatatattgagtgtatttagtagggttttttagagggatagaattaatggaatatatatataaagggaagtttattaagtattaatttacgtgaatttaagatttcgtaataggtcgtttgtaggttgaggagcgaggagagttagtttgagttttaaaattgaagaatttggagtttagtgtttaagtcgggaagtatttagtacgggagaaagatgtaggttaggttagtttttttttttatatttttttgtttgtttgtattttagttatgttggtagttgattagattgtgtttatttagattaagggtgggtttgttttttttagtttattgatttaaaatgttaatttttttttggtagtatttttatagatatatttaggattaatattttgtattttttaatttagttaagttgatatttagtattaattattatattgggtattgtttttaagttaggagagagaattggattggagataaagatttggaagatttgtttattaaaattttcgtttttaagatttgtgtatttatattattttgtttttgatagatatttttttttgaatatatattataaaagatattatatattttttttgaatattttgtagtttatttaataatttttattattatttgtagtaatatttttaagtgatttatgttttatgtattttttttttgtattttaaagattttttaggtattaagtgtattattttcgggttagatttagtttatgataataatttttgatttggttttatagttttgaaattaaatttttattgattggtttttgaattgattttttttaatattagtaaaagttaaggagtgtttttttaaaaaagaaagtatttatttagaaatcgtatattgaagtttaggttgaaaaatgtaaatatgagtaagttgtttttattttttagaaatttgggtagttgtaaatgtatatttataattaatatatattagtaatgggtagtggggtatggggggaaaggatgaagttttattaggggatgataaagtattttgtaagtatagagggaggggaaggttattttatatagtgatttatggaagattttatggagaatatggtattttagattggttagatggaaattaaaaagaagatattagggttagtatatgttttgttttaagaggtagtattatataatattgatcgtttttgttatgtgggagtattatgggtttattgtttagttttgtttttttaagggaaattggaaattt

SEQ ID NO: 1425 - DNA, 14032 bp, Artificial Sequence
  chemically treated genomic DNA (Homo sapiens)
gagtttgagattagtttggttaatatggtaaaatttcgtttttattaaaaatataaaaaattagttaggtgtgggggcgggtatttgtaattttagttatttcggaggttgaggtaggagaattgtttaaatttaggaggtagaagttgtggtgagtcgagattgtattatcgtattttagtttgggtaataagagtaaaattttattttaaaaaaaaaaaaataaaaagaaaagaaaagaaaagaaatgatattattttaaaatgataagtattttttttaaaatgatattttgagtagagtttttaaaaggaatagttgaggttaggtttagtggtttatgttttgtaattttgagttttgggagattgaggtaggaggatgttttgaggttagaagtttgagataagtttgggtaatatagtaagattttatttttataaaatatataaaattaaaaataattaattaggcgttgggggggtatatttgtagttttagttatttaggaggttgaggcgggaggattgtttgagtttaggagtttgaggttgtagtgagttatgattatattattgtattttagtttgggtgataaagtaaggttttatttttatttaaaaaaaaaaaggaataattgtgaatgttagtagatatttattgtttagttagtgatatttagttatttggagttgggtataaggatagtttatttttttggagggttattttttaggttataaggtataggattaaatttttttattttgggattttgtatttatattttttgaaattagaaattttatttttttttttaattaagattttgatatgggataataaaattattaatgaatagttttgtataacgtgggaaatgtaataaaaggtgaaggtaataaaaggtgaagtttttagttatttcgcggtgatatttattcgtaagaaataaaagtaattattatttgtttaatttggtcggtttattttgtatgtgttgaagaaaattattttagaattttattttttatattgaatgtcgataattggatgtatttataagtttttttggaagaaaatagtttgtgattttaagatgggaaaatagttttcgaaatagtgagaaataatatattttttatttttatatatataaaaagagtttgtttttttcgatgtttttaggtgttgttggaatgatttgttttttcgaagttatcgttttattttttattttgaattgtttcgtagattttagtaaagtatttagtagggattattttatttgaggcggtgatgggggtttttttgggaaggttttttagttttgtttgttttttttttataggaagatagatgtttaggtgggttgggttgggggagaaaggagaggaggagtagaacgtgatgtgggggtttttgtgaggaggggggttgatggatggtggtgatagttggggtgtaggtttggaggaaggagtaggttatataggtttttggagtgggagagttgtggttatttttgtaggttttgtaaaggtttaaggttgggatttgttagaattaggatagagagacggttttttgggtattttatatttattacgttttttgtttttttatttgggaagatattgggttgttatatgttattttgtttttattttatatttatagttttttttatttttttttttttgtttatttggtgttggttttttgtatttagttttttatttttagtaaaagtaaataatcgtaaaatatttaaatgatattttgtgtagggttttgattatttgaggttggcggtttcgtgtagtggttttattggtttttattggttttttttagttttttttgttaatttttttgagtttttgttggagagaggggtttggatcggtagtttgtagtttagaattttttaggatttttttattagttaaaagtagaattttcgaagtttcgttttgaggtttttttagatggtggattttttagggatagtgtggagggtttttttatttttgtttttagattaaagattttttaggtaagggtagggtttggatttttggtttttatagtatggttagttttggagtggtattgtgggtaataattgggtggtgtagggtagaattagtatttaggttatttttagtgtagttttatagagtttttggtagattagtgtttttaatttatagtagaagatggatagggtttttttcggggattttttttttatggtttaagggtggtttatgagttagagtttagtaggtcgttatatttgggtttgtcgtttttaggtagttagttgttagtagcgtttacggagttgtaagagtgggggttagattgtggggaatgggtggaggagggaaatttggttggatatagtgtttcgggatataagaggtgtttttttaggggtgaagttttttttgtaaggtttgacgggagtggggggggtttttttggagaataatgttatgttggttatcgggttattaggttgatcgagtgtagatatttattagttatttgtagggtttgacgagaggagattgtttcggttataagggtttgtgatttcggaggtaatgtcgtatgagagtgttgtttggcgcgttgttttggttgatttatatatttttatttcgattttttaaaattaatttttttttaattgttttttggttttagtaacgttttgggtttgttttgtataagtaattaaatggtttttttttatattttgggcggtttttggagtttttgttatagtttttgatggggaggggtgaggggtgaggggtagttttgtcggagtttttgatggggaggggagagggtaggggatttgggtgggtaggggttatgggtagtgtttttatattattgtttataaataagggagttttatttagttggtgggtgttttttttttattattttgtgtttgggatattgattttttttttatattagtaagtatttagagttggtagttggtttaattttgatatattttatgttaaaagaaatggtgggaggtaggtgtaatgaatgagttggggggtatgttttttttttttgaaggcgtatggaaagtttattttgtttattttttgttattatgtattttttaaagcgttatttattagggagttgagttttttaagttgaaggcggatttattgtttaattaggggtgttagaagtttttaggggtttttaggttaggtagtggggtgtgaatttttatttttgtttttttttttggaaattggtaagagggtggagagagttttttttggattttgtttggaggttagggatttttgtaaattgtttatgtgttgtgggaaggggtagaagggatgaggtttttttttttttattagttttcgttttttttatttgggatcgggaggtgggaggggttgtttggaggggttatattttttttggtagttttggtttttggttgtgtttgtaggtttgagtgtaaaattttttagtagttttgtgaggtggttttattagtttttttttgatagatgaggatagtagggatggtattgggtttttaggtaattgtgttatgtgttttttattattttgtttatggttggtttttttgtttttatttaaggggtttatttttttttttgttttatggggataaatagaagttgtttttttagttatagtttttggtttttattagtttggttatggtgatttatatttttgtttcgataaagaaataagaagtattttttaatttataatttttgattagaagttatttttagttgtgggatagttgtagggtggggttaggagttttatacgtttattttgggttatttatttatttgtttatatatatttgtatattatatatatttgtatatttttggcgttagggacgtttttttttaatagtgtggggttttttttttttataggggtagtgaggttattttttagggtatggttttatgagtttagtttttgtgtgagtattttttggttttagtttttttatttgtataatagatttaaagatagtttcgattttatagggttgtggtgaggtttttatgagtttatatgtgtaacgtatttgggtcgtgtttgtaatgttttgattttgttggtagtagggagggtagcgtttgttgtagggtttttatattttttttgtaggattttgtatttagtattagtgtttagtggggtagaggagtaagttttttggtagatttttttttttaaatttttttcggttgtgtttatttttcgtttgtttttttttttggtttttttttttttagtttttttattttgtagtttaggaaatttagaaaagattttattagatttaatttataggttttatagtggaggtttcgtagggtttggtttttgttttttttaggttgtttttttttcgcgtatatttttttggacgttgtatatttagagttttttagttgttttacggtttttgtttaagttttttttttttttaaataaaaatcgttatttttgtttcgattttagtttgggttagttttttttttttttttttacgtggtttttttatttttatgtgtttttttttcgggtgggttggtacgttagatcggggattgaattagaattaagatgttttttgttttaggattttttttttattacgaaaaggttgtagatgttgttcgttaattcgatttattgtttgtagtcggtagttcgtttatttattttggtcgagtttttgggtttttaatttttaggagtttcgttttatcggggtttcgtttttttttaggtatcgttttttttcgtttcgtggaatttggttttggaggaggtgggttaaggattttatgtttcgttttttgtttcgtttttatttcgttttatgtattggtattcggaggggtttagttgacgtcgtattttacgtgacgtcggtgtcgggcgaatatggcggcggttatcgggtgagtgttgcgtttttttcgttttttttcgttggcgtggagaggggtatgggtgtttcggtcggatcgcgggtgagagcgttagtcggggtcgttgaatgtcgcgggtaggcgttttttttcgttggttcggagttttagcgtcggtcggcgagttgtacgtttcgagttagggttagcgcgggggtcgtagtttttttttatttttttggttggtttcggttttatttgttcgcgtttggcggttttatcgtgtgcggttgcggtgggggttggggtcgatacgtatgttcgttgttaagattttcgggtaggagggcggcgttgcgaggattttagggattcgggcgtttttcggaggaggcggtattcgagacggatttggaattttttttttttagtagggtatttttttattttttttaggggttaaatgttatttttttagggaatttttttttaattatttattttattttttgtgtttttattattatttgataaattatatagagtattgtttgtatttgttttttattttttttgtatttagagtgtaagggtaggtatgttatttgttttttagtagttcggtgttttgtatatagtaggtgttttatattgggttaaatgaaagaaagttgagtggtcgtagtgggaggaagggtggatagatgggtttattagagcgttgggcggaattttttagatagggagtatttgagtttagggtaagggataaaggttgagagtttagagtgttttggggataggggtgtatgtttggggttggttggaaggtgtggtgttttaggtggcggttttagattttgttttgatgggttggaagggttttgttataagttgtttgatttgttttttaaagattaggtttttttgagttatgtgtgagtttaatgggagaaggtgtgggtttggtggtatagtggggtagggggggtatggtgtaggagggagtagtattttagatgttaggttggaaattgaggttagaatgggggatttagtggattgaatgtatttttttttttaagatatagggaaaatggtaatagaaagtgggttttaagttggtttttaaggttgagggagtttagagtatataaattaaatattttgtgggtatttgttatattttaggaatagtagtgggtttttttttaaggtatttataggttattggaatagatggatatatgggattttgttatttatttgtttgtcgtgtggttttgttatttgtaaaggaggggtatggattttgagtttagataaagtgtgggaaggttttattttttgggtgatttttgtgttagttttttagtaatgagattttttttaggtagagaatagtgtagataaagttttagatgggtgttacggaatttagggttagatttttgaatttagtttgtgatttttttaaagggtagattgagtaggttggtgtttagttgtgggtgtgttgtttttttggttaggttggttcggtgtttatagggagtgttaggggttgtatttgggtttaggattttaagttggtttgagatttgttgtttttttgaaggaattaagttgatgtttggacgggagtaagtttggaattgattggattttggaatgagagtttttttttttttttttttttttttttttttgagacgtagttttgtttttgttgtttagtttggagtgtaatggtatgatggtttattgtaatttttattttttaggtttaagcgagttttttgttttagttttttgagtagttggaattataggcgtgtgttattatatttagttaattttttgtatttttagtggagatggggttttattatgttggttagattggtttcgaatttttgattttaggtgatttattcgttttcgttttttaaagtgttaggattataggtgtgagttattacgtttggttttagaatgagagtttttttagtagaatcgattttttgggttattatatagggtgggtgagggaggtaaaatagagtggtaggttttagagaggtttgttattgagagggtgtgggagtttttagagtttggtagtttttttgggaagagttattttagtttggtatggggtttttttatgtattttgagtttgaggttgattttagtggttttttttagagtagaatgattaagtgtgtttttcgtaaagtttagtttttagttatatttatagaatagattatagagttaggtataacgaggtatgatgttagtaagttacggttattgtcgtgggtttattgggagttgggtttggttgtttgtagaattttattagagtttgggatagagggggttcgtgagagttttaggtgattggggtgtgttttatatgatttggggagtaggggaagttttaaattagtattttagatttaatttgaaatttaagaatttattttgaatgtatttttttttttaagatgtggggtgttttagggttgattttatttttttttgttagtttgggtgtaggttttaggttgagatagagtgcgttgaggttattttttatttttttatggagaggggtttttattttatggtatttggtggtattgttgttgtttttttaagtaatgtttttagttttttatagataggattgataatttgaaatttgttagttttagttagatttgtttgtatttgtttttttatatggttttttttatttttttttttttttgtatatttatttaattagttttggaatgtttttgttttttatatgattttttacgtatttgtaggtttagtttagatggtttttttttttagaagttttttttagttttcgggtaaaggtttagtgtttagaattttagaatatttagttttttttttagtagtatatttttatacgtttgtttattgtgggttaggagttgtttttttttatgttttttttagtatttttagaatttttggggtttttttgtattcgtagggttagtttgtggttgttttgtgattggtgtttggtgaaatgaatgaaaaggggatttattttaaattagtttagtattttattttgtttttttgggagatttttagtgattgagggaaggagttatggtggggaatggggatagaatttcgaggggtaggatgaagaaatagttttaattttttaattgagtggtttttaggagttgttgtagagttaaaaagaggtaaaggtgaattgttttgggcgtgtatttttgttgagtcgtaggttatattggagttagtatttttttggagagttttttgtagaatttatattttgggttaagagtttaattttataatgtgaattttgtgttttaggagtagaagatttaggtcgattgggggttagggacgggtgggtttatgggaggtaggttggttattgagtatttttgtgttttttttggtttttttttaggttttgattttatatagttgttttttggtttttgtgtatgtttggtatttttattcgttttaggagatagaggtgtaaggtggaggttgttggttagttgttttaaggttttgtttcgtcgtggtaattttttttagtttggcgtttacggtttggtgtttagtgggttgtttgagtatttgtttggtgtttggttttacgttggaggttgaggggaggaggtggttggtttttggttggttttttttattgggaatttagcggtgtgattttgtttagaagtggttttatattttattttttttttttttttgagagggagttttatattggagtgtaatggcgcgatttcggtttattgtaattttcgtttttcgggtttaagtggtttttttgttttagtttttcgagtagttgggattataggtgtttattattatgtttggttaatttttttgtatttttaatagggatggggttttattatgttggttaggttggttttaaatttttgatttcgtgatttatttattttagtttttttaagtgttggtattataggcgtgagttattatatttggttagtggttttatattttagtgtagagatttttttttgtttgtgcggtagattttacgggtattagtgaaatttacgtattattttcggtattaggtttttttttgttttttgttttttgttttttttgaaacggagttttgtttttttatttaggttggagtgcggtggtttgattttggtttattgtaattttcgttttttagatttaagtgatttttttgttttagtttttcgagtggttgggattataggtgtgtgttattatgtttagttaatttttgtatttttagtagatataggggtttattatgttggttaggtggtatcgaatttttgattttaggtgatttgtttatgtcggttttttaaaatgttgggattataggtatgagttattatatttggttggtataatgtttttaaatgtatgataataagtatataatattataaaagtaaaatttaattatatggaaatataggtattaaaatgttatataaatttgagatagggtttcgttttgttttttaggttggagtgtagtgttgcgattttagtttattgtagttttcgtttttagtgtttaagcgttttttttgttttagtttttcgggtagttgggattatatgtataagttattatttttgattaatttttgtgttttcggtagagatgggtttttgttatgttgtttattttggtttcgaatttttgtttttcgtagtgttgggatgataggtatgagttattgcgtttggtttaattattttaattttgaagttgtggggataaaagtgatattttgagatattggaagagtaataatatggtattaaaatatttttgatttttgttggtgatagattaatatgtattgttgatattgagtagtttgttgtttatgttaataattgaagaaaatgtaaattcgaattggaggttagagaaaataaaggtatagtttttttttatttagtagatggagtttttgaatttgaggatgaatttttgggggtttttaggttttaggtaagagttttgtacgtggttgttgaggagagggtgttttagtattgatacgggggtgtgggttgtgtggagatagagacggtttgtgggggtagtggtattatattttttttgaggattggttttagttttggttatttcgtttttggttttgggttgtttattgggttttggttgtttttagggtagcgggggttttggtttttggggtttagagatttgttttgtgggtttttgaggttttggagtttttgtgttttgtttgtttgtagtaaagtatggtttatttattttgggatttggggatgataatggtttttgttttttaaattttgggtgttagttaataaaagttgtagtagaaatttgttagagatgttttgttggtgttatatttgtcgaatttgtaggaagaattcgtttgtgttgattttgagtttgatagtttttttgggggtttggtttatgttatgggaaattaaagggtatgtttttataaaattttattatttggtgttttgtaattaatgattgtagtatattgttttgtttcgtggtttaggttagttttttttatgtttagagttttgtatagggtgggttttgttttggcggagttttatggagaaataagtatggttgtagattttttttgtagtggtagttgagtgtttaaggagaaggtggtttattaagttttttgtttagtttttgggattttagtttgggtgttttgagaaatttgttttttagaaggttttgaataaggggaaggttagtttttttgtgagtattataggtgggggtatggtgttaggttatggggagttagtatttgttatgattaaggagtgtggttaggtagggagaggggagtgtgggagaggtgggttgggttgggttatgtaggttggtggttgaggatgggtattttcggtcggttatgttattcgacgattgtggttgaggttgtttatagtagggtttcggtgttattgtttttaagttgttggggattttgtagagacgagttttgtttttgtgtttattttattatgggtttttttgagtgaagggaaagggcgtgggaggttatgggggatattcgagtataaggtgttggtgattgtatttttagtttttgatagtatggttatttgggatgtggttatgtttacgaatttttatcgatttttttttgtttttttattttaatggttgagcgtggtagaaaagtagttttagtttagaggaagttttggtcgttggtgtttatttagttatttgtttatttttttgggagggtaggaagggtacgtgggggagcgggcggggttttagttatgttagtatgtgcggttgtttttgattttttattttttttgggtaggttgggattttagggttgttttttgttttgttgcggttgatgtggtatttttttattttatagttgtgtgtgtggtttcgtgtgttatttagtagatatgtgttgagcgtttgttgtgtgttaggtaaggtattaggcgagggtacggtagtgatcgaggtaatttggagttttattttttagtgtttttattcgaggcggcgggtcggagaatattaggaagtattaggtagtattcgttgcgtttaggttggaaggtgttgtgtgttaagtgttgtgttagttagggatttggttttacgttaggagtttattttagggggttattaaggagagttgagagaggggacgatatatagagttgtgcgaacgttaagggaaggtaggtatatgaggttaggggtaggaggagagggaggaagatagtggaaagaagagtggggaatttggttagaaatttagtaggggttgtgttgtggggtagggcgttgttattagagtagtagttttggatggaggggtgtttttagttatttagttttagagtttttagggagggagttaggggagtggatttattgtttttttttttttttttttgattttagttttatgtgtttgtcgttggtttagtgcgtttggagataggaggtagcgtgtatgttgaggaggtcgggtaggttggtttttgggtatagtgtaggggggtgtatttggagggtaagtggggaaattttaggttaggattagtaggggattgggtaagagaagagttgtaggtttaaagagggaggtcggggaagattattcggaaaaggtcgtattggagttaagatgtgtaggaggtgtgatttgtttatgtgattttggtaggagggttaggtttttgagggttttatgtgaggtgagtgtgaggtgttttagattattttatcgtgttgtgttgtgagggtaggttttatttatagttttattgtagtttttaggtagagttttttgttcgtattagttttgggatgtttttgtttttttgattttcgtgtttatttattgttttttggttggagagtcgtaggggtttttttttgtatattttgtttttgtttattttttttttattttatttttattatttttttatattcggtttttagtttgtttgttgggattattattcgtttatttatttattttatagatatcgatatttgttttgtttttgtttttagggagtttatatgttatttggagggttagtaaataaataaatgaagagtgatgggggttttagagagatacgaagagagttgggggatggggtgggtaggaaaggggtatttttgtagaggttggggtgggtaggaaaggggtatttttgtagaggttggggtgggtaggaaaggggtatttttgtagaggttgggtaaaagggtatgggatgtttttgggaagagtattttttatagggcgtcgtagcggtaaaggttggagtgttttgggggtttagggaagagcgaggatgttcgtgttatagtagaggaagttaagggtgaattgggggtttggattttttgtggttggggagtgaagtttgtatttagagaagttagttggtacggggttgggtagggagtgtgtgttgggattggtattttgaaagggtttttttggtagaaggtgtagattaggttacggggaagttgcggttaagagtatcgttgagagttgtttgtagttgtttagacgggatatggggaggtggttttggggatggggatgtgtaatgagggtagattttgttggtggttaggaggtgggatgagataggaggttaggatggtttttgggattgtttaggtgtaggtgttttgtgtcgggggaggttggggaggagcgattttggtttaggtgtattttttgtttgttgagggtggttgatgggtttgtgagtttggagttggatattattagtttgtagatgtagatggttttttgagttgaaggattgggtaagtttagttgagttgagggagggagttagttagggaagaggttttagggttgggttaagttggtttttagtagggaggttgagtcgggagttaggggtttgtttggtagggagtttggatcggttgttgttggagaaggttttcgtagagagagtggtttttagggttatgggtattaagtggttagtgaggattggggatttgttgtagattcgggagcgtggggttattgtggtttgttgggtagttggttggggggtagaggagtaggggggtggagttaggatagtatgggtggtggaggggagataagtttttgtggtttttagggggattagtgaggggttgtttttgggttataagtaggtggagtttgggtagtttgtttcgtgttgatgggggttttacggtaggttcgggttttcggttatttcgattttaggtgtgggtatgtttggagatgttaatagaggtttgtgtggcggtgtgtgtttttgtttttgtaga

SEQ ID NO: 1426 - DNA, 14032 bp, Artificial Sequence
  chemically treated genomic DNA (Homo sapiens)
tttgtagaggtaagagtatatatcgttatataggtttttgttagtatttttaagtatgtttatatttgaggtcggggtgatcggaggttcgagtttgtcgtgggatttttattagtacggggtaagttgtttaagttttatttatttatgatttagaaatagttttttattgatttttttgaggattataggggtttgttttttttttattatttatgttgttttgattttatttttttgtttttttgttttttaattaattgtttagtaggttatagtgattttacgttttcgaatttgtagtaggtttttagtttttattggttatttggtgtttatgattttgggggttattttttttgcggaaattttttttaatagtagtcggtttaggttttttattaggtaggtttttggttttcggtttaatttttttgttagaggttagtttggtttaattttggggttttttttttaattggtttttttttttagtttagttgagtttatttagttttttagtttaaaggattatttgtatttgtagattgatgatgtttagttttagatttatagatttattagttatttttagtaggtagaagatgtatttgaattaaagtcgtttttttttagtttttttcgatataaagtatttgtatttggatagttttaaaggttattttggttttttattttattttattttttggttattagtaaggtttatttttattgtatatttttatttttagggttatttttttatgtttcgtttggataattgtaggtaatttttaacggtgtttttggtcgtaattttttcgtggtttggtttgtattttttgttagaagggtttttttaaaatgttaattttagtatatattttttgtttaatttcgtgttagttggtttttttgagtgtagattttattttttagttataagggatttagatttttagtttatttttggttttttttattgtggtacgggtattttcgtttttttttaaatttttagaatattttagtttttgtcgttgcggcgttttgtggggaatgttttttttaagggtattttatgtttttttatttagtttttgtagaaatgttttttttttatttattttagtttttgtagaaatgttttttttttatttattttagtttttgtagaaatgttttttttttatttattttattttttagtttttttcgtgtttttttagagtttttattattttttatttatttgtttgttggttttttaggtaatatgtaagttttttgagggtagggatagagtaggtgtcggtatttatggaatgaatgaataaacggatggtggttttagtaagtaggttggaggtcgggtgtggagagataatggggatgaggtggaggaggagtaagtaggggtagggtgtgtaggagggagtttttgcggttttttagttagggggtagtgggtgggtacggaggttaaggaggtagggatattttagagttggtgcgagtagagagttttgtttggggattgtagtgaagttgtggatgaaatttgtttttatagtatagtacggtgaagtggtttggggtattttatatttattttatatgggatttttagaggtttgatttttttgttagggttatatgagtaggttatattttttgtatattttggttttaatacgatttttttcggatggtttttttcggtttttttttttgaatttgtagttttttttttgtttaattttttattagttttggtttgaggtttttttatttgttttttagatatatttttttgtattgtgtttagaggttaatttattcgatttttttagtatgtacgttgttttttgtttttaggcgtattgagttaacgataggtatatgaggttggggttaggaggagagggaggaagatagtggatttatttttttggttttttttttggggattttggaattaaatggttgggggtatttttttatttagggttgttgttttgatgatagcgttttgttttatagtatagtttttgttgggtttttgattaggttttttatttttttttttattgtttttttttttttttttttgtttttagttttatgtgtttgtttttttttaacgttcgtatagttttgtgtatcgtttttttttttaattttttttagtggttttttggagtaaatttttaacgtggggttaggtttttggttaatataatatttagtatatagtattttttaatttaaacgtagcgggtgttgtttggtgttttttggtgtttttcggttcgtcgtttcgggtggaaatattgggagatggagttttaggttgtttcggttattgtcgtgttttcgtttggtgttttgtttgatatatagtaaacgtttaatatatatttgttgaatgatatacggggttatatatatagttgtgggatgagaagatgttatattagtcgtagtagggtaggaagtagttttggagttttagtttgtttaggaagggtggagggttagaagtagtcgtatatgttgatatgattagagtttcgttcgtttttttacgtgttttttttatttttttaggagggtgagtaggtggttgggtggatattagcggttagagttttttttgggttggggttgtttttttgttacgtttagttattgggatgaaagggtagagggaagtcggtgagagttcgtaaatatgattatattttagatggttatgttgttaggagttaaaagtgtagttattagtattttgtgttcggatattttttatggttttttacgttttttttttttatttaggaaagtttatggtgggatgggtatagaggtaaaattcgtttttgtagaatttttaatagtttaggggtaatgatatcgagattttgttatggatagttttagttatagtcgtcgaatagtatgatcggtcgaaaatgtttatttttagttattagtttgtatagtttagtttagtttattttttttatatttttttttttttgtttggttatattttttaattataataggtgttggttttttatggtttgatattatgtttttatttgtaatgtttatagaagggttggttttttttttgtttagaattttttgagagataaattttttagggtatttagattgggattttaagggttgagtagaaaatttgataagttattttttttttgaatatttagttgttattgtaaagaaaatttataattatgtttatttttttatggggtttcgttagaatagaatttattttgtgtagggttttgagtataagaagggttagtttgagttacgaggtaaggtaatatgttatagttattaattataggatattaagtaataaagttttatagagatatgttttttgattttttatggtataaattaagtttttagagagattgttaggtttagagttaatatagacgaattttttttgtaaattcggtaaatgtagtattaataaaatatttttaataggtttttgttgtagtttttgttaattggtatttagaatttaaaaggtaaaagttattattatttttaggttttagggtaaataagttatgttttgttgtagatagataaggtataagagttttagggttttagagatttatagaataagtttttgagttttagaggttaggattttcgttgttttggaaataattaagatttagtaagtagtttaggattaagaacggagtgattaagattgaggttagtttttaaggagggtatgatgttattgtttttataagtcgtttttgtttttatataatttatattttcgtattagtattgggatattttttttttaatagttacgtgtagggtttttatttaaggtttagggatttttaaggatttatttttaaatttaggggttttatttattagatgggaaaaagttatatttttattttttttaatttttaattcgaatttatattttttttagttattaatataagtaataaattatttagtgttagtaatgtatgttaatttgttattaataaaaattaaaggtattttaatattatgttattgtttttttagtattttaaaatattatttttgtttttataattttaaagttaaagtagttgggttaggcgtagtggtttatgtttattattttagtattgcgggaggtaggaattcgagattagaatgggtaatatggtaaaaatttatttttatcgaaaatataaaaattagttaggaatggtggtttgtgtatgtggttttagttattcgggaggttaaggtaggaggaacgtttgagtattggaggcggagattatagtgagttgagatcgtaatattatattttagtttgggggatagggcgagattttgttttaaatttatgtaatattttgatatttgtatttttatataattgggttttatttttgtaatattatgtatttattgttatatatttaaaaatattatgttagttaggtgtggtggtttatgtttataattttaatattttaggaggtcgatatgggtagattatttgaggttaggagttcgatattatttggttaatatggtgagtttttgtgtttattaaaaatataaaaattagttgggtatagtggtatatatttataattttagttattcgggaggttgaggtaggaaaattatttgaatttgggaggcggaggttgtagtgagttaagattaagttatcgtattttagtttgggtgaaagagtaagatttcgttttaaaaaaaataaaaaataaaaaataaaaaaaaatttgatgtcgagaatggtacgtaggttttattgatgttcgtggggtttatcgtatagataaggaaagatttttgtattagaatgtggagttattggttaggtgtggtggtttacgtttgtaatattagtatttggggaggttgaagtgggtgggttacgaggttaggagtttgagattagtttggttaatataatgaaattttatttttattaaaaatataaaaaaattagttaggtatggtagtgggtatttgtaattttagttattcgggaggttgaggtaggagaattatttgaattcgggaggcggaggttgtagtgagtcgagatcgcgttattgtattttagtgtgagatttttttttaaaaaaaaaaaaaaaatgaaatgtggagttatttttagatagggttatatcgttaagtttttagtaggagaggttagttaaggattagttattttttttttttagtttttagcgtggggttaggtattagatagatgtttaggtagtttattgggtattagatcgtaagcgttaggttggagagggttgttacggcggaataggattttgaggtaattggttagtaatttttattttgtatttttgttttttggggcggataggggtgttaagtatatatagaaattaagagatagttgtgtggagttaggatttggggaagagttagggaaggtatagggatatttagtggttagtttgttttttataggtttattcgtttttagtttttagtcggtttgagttttttgtttttggagtataaggtttatattgtggggttgggtttttgatttagaatgtgaattttgtagaagattttttagaagaatgttgattttagtgtaatttacggtttaataggggtatacgtttagggtagtttatttttgtttttttttggttttgtaatagtttttgggagttatttagttaaagaattaaggttatttttttattttatttttcggaattttgtttttattttttattatgatttttttttttaattattgggagttttttaggaaagtaggatgggatgttggattaatttagagtaaattttttttttatttattttattaagtattaattatagggtagttatagattggttttgcggatataaaagaattttaggggttttaaggatgttaggagaggtatgaagggaagtaatttttaatttataatgggtagacgtgtaaaaatgtattgttggggagaaaattgagtgttttggagttttgagtattaaatttttattcgagggttgggaaaggtttttgggaaagggaattatttgagttgggtttgtaaatacgtgaagaattatatagaggataagaatattttagggttagttgggtgagtgtgtaagggaagaagggaatggaaaaagttatgtgggagagtagatgtagataggtttggttggagttgatagattttaaattattaattttgtttgtggaaagttaaaagtattgtttaaggagatagtagtagtgttattaagtgttatgggatagggatttttttttatgaggggatgggaggtgattttagcgtattttgttttaatttgaagtttatatttaggttagtaagagaaagtaggattaattttgaaatattttatattttaaaaagagagatgtatttagagtagatttttgagttttaaattaaatttgagatgttagtttagggttttttttattttttaaattatatggggtatattttagttatttggaatttttacggattttttttgttttaggttttggtaggattttatagataattaaatttaatttttagtgagtttacggtaatggtcgtgatttgttggtattatgtttcgttatgtttgattttatgatttgttttgtgagtgtggttaggagttgagttttgcgggaaatatatttaattattttgttttaaaggaagttattggggttaattttaggtttaaagtatatgggaaagttttatattagattgggatggttttttttaaggagattgttaggttttggaagtttttatatttttttaatagtagatttttttaagatttgttattttgttttgttttttttatttattttgtgtggtggtttagagaatcggttttgttagaaaagtttttattttggggttaggcgtggtggtttatatttgtaattttagtattttgggaggcggaggcgggtggattatttgaggttaggagttcgagattagtttggttaatatggtgaaattttatttttattaaaaatataaaaaattagttgagtgtggtggtatacgtttgtaattttagttatttaggaggttgaggtagaagattcgtttgaatttgggaggtggaggttgtagtgagttattatgttattgtattttagattgggtaataagagtaaaattacgttttaaaaaaaaaaaaagaaagagaaaaagaaaagtttttattttaggatttagttagttttagatttgttttcgtttagatattagtttggtttttttaggagagtagtaggttttaggttagtttggaattttgaatttaaatgtaatttttggtattttttgtgagtatcgagttagtttaattagagagatagtatatttatagttgggtattagtttgtttagtttattttttaaaagggttataggttggatttaaggatttgattttgagtttcgtgatatttatttgagattttgtttgtattgttttttatttgaagggagttttattgttgaaggattagtataaaagttatttagggagtgaagtttttttatattttatttgagtttagagtttatgttttttttttgtaaatggtaagattatacggtaagtagatggatgatagagttttatgtgtttatttgttttagtggtttgtgagtattttaagggaagatttattgttatttttggaatatagtaggtgtttataaaatatttgatttgtatgttttaagtttttttaattttgggggttaatttagaatttattttttgttgttattttttttgtattttaaaaagagagatgtatttagtttattagattttttattttgattttagtttttaatttggtatttggaatattgtttttttttatattatgttttttttattttattgtattattagatttatatttttttttattgaatttatatatagtttaggggagtttaatttttaaaaaatagattaagtagtttgtaataaaatttttttagtttattagggtaaagtttgaagtcgttatttggaatattatattttttaattagttttaggtatgtatttttgtttttagaatattttgaatttttaatttttgttttttattttgggtttagatgttttttatttgggagatttcgtttaacgttttggtgaatttatttgtttatttttttttttattacgattatttagtttttttttatttagtttagtatggagtatttattgtgtgtaaggtatcgggttattgagaagtaggtaatatatttgtttttgtattttaaatgtagagaagataaagaataagtataaataatgttttatatagtttattaggtgatgatgagggtataaaaagtgggatagatggttagagaaggattttttgagggggtgatatttggtttttgaaagaaatggggaagtgttttgttgggaaaagggaattttaagttcgtttcgaatatcgtttttttcgggaagcgttcgggtttttggggttttcgtaacgtcgtttttttattcgggggttttggtagcgaatatgcgtgtcgattttagtttttatcgtagtcgtatacggtggggtcgttagacgcgggtaggtggggtcggagttagttaggagggtggagaggagttgcggttttcgcgttgattttgattcggagcgtgtagttcgtcgatcggcgttgggatttcgggttaacgggaagaggcgtttattcgcggtatttagcgatttcggttgacgtttttattcgcggttcggtcgggatatttatgtttttttttacgttagcgggaaagagcgagggaggcgtagtatttattcggtggtcgtcgttatgttcgttcggtatcggcgttacgtgaagtgcggcgttagttgagttttttcgggtgttaatgtatggggcggggtaagggcggggtagggggcggggtatggagtttttgatttattttttttagagttaaattttacgggacgggaaggggcggtatttggggaagggcggagtttcgatggggcggggtttttggagattgggggtttaagagttcggttaggataaatgagcgggttgtcggttgtagatagtaggtcgggttagcgggtagtatttgtagttttttcgtggtgggagggaggttttgaagtagaggatattttgattttggtttagttttcgatttggcgtattagtttattcgggagaagaatatataggaataaagaaattacgtgggaggagaggagggagattgatttaggttagggtcggggtagaggtggcgatttttgtttaagaagggaaagggtttgagtaaaggtcgtggggtaattggaggattttaaatgtgtagcgtttaggagaatgtgcgcgagagaggggtagtttaagggaagtaagggttagattttgcggggtttttattgtggggtttatgagttaagtttggtaggattttttttaggttttttgggttgtagaatggagaagttggaggaagggaagttagggaggagggtaggcgagaagtgggtatagtcgagaagggtttaggagggagagtttgttagaaggtttatttttttgttttattgggtattggtattgggtgtagagttttgtagagaaggtgtagggattttgtagtagacgttgttttttttattgttaatagagttagggtattataagtacggtttaaatgcgttgtatatgtgagtttatagaaattttattatagttttatgaggtcgagattatttttaagtttattatatagatgaggaaattgaggttagagagtgtttatatagaggttgagtttatgaagttatattttgaggagtgattttattgtttttgtgaaggaagggggttttatattgttgggggagggcgtttttggcgttaagggtgtatagatgtgtgtggtgtatagatgtgtgtggataggtggatgggtggtttaggataggcgtgtggggtttttgattttattttgtagttgttttatagttggaagtggtttttgattaaaggttgtgggttgggggatgttttttgtttttttatcgaaataaggatgtgggttattatggttaggttggtgggagttaggggttatgattggagaagtagtttttgtttgtttttatgaagtagggaggagaataggttttttaaataggagtaagggagttagttataagtagggtagtgaagggtatatggtatagttatttggaagtttagtattatttttgttgtttttatttgttaggagagagttaatggggttattttatagggttgttagagggttttatatttaaatttgtaggtatagttagagattaaagttgttaggaggaatgtggtttttttagatagttttttttatttttcggttttagataaggaaaacgagagttaatggaagagggggggttttattttttttatttttttttataatatatgggtaatttgtaggggtttttgatttttaggtaaggtttaagaggagttttttttatttttttgttagtttttaggaagaagaatagaggtaaggatttatattttattgtttggtttaggggtttttgagaatttttaatatttttagttaagtagtaggttcgtttttagtttaagaaatttaattttttagtaagtggcgttttaaaaaatatataataataaagggtgagtagaatgagttttttatgcgtttttaaggaaggaaaatatattttttagtttatttattgtatttgttttttattattttttttgatataaaatatgttaaaattaagttagttgttagttttgagtgtttattaatatgaaaaagaagttaatattttaaatataaaataatggaaggaaggtatttattaattgagtggagtttttttgtttgtggatagtaatatggaggtattgtttatgatttttgtttatttaggttttttgtttttttttttttttattaggggtttcggtagggttgttttttattttttatttttttttattagaggttgtggtaggggttttagaagtcgtttagaatatgggagaagattatttagttatttatgtagggtagatttaggacgttgttggagttaggaggtaattgggggaagattgattttagagagtcgaagtgggagtgtgtaaattagttaaggtagcgcgttaggtagtatttttatgcggtattgttttcgaggttataggtttttgtggtcgaaatagttttttttcgttaagttttgtaggtggttggtagatgtttgtattcggttagtttggtagttcggtagttagtatagtattattttttagaagggttttttttattttcgttaggttttgtaaaagaagttttatttttgggaagatattttttgtgtttcgggatattgtgtttagttaggttttttttttttatttattttttataatttagtttttatttttgtaatttcgtggacgttgttgatagttggttgtttggagacggtaggtttagatgtggcggtttgttaggttttgatttatgagttatttttgggttatgaaggggaggttttcgggaagagttttgtttattttttgttgtggattgagggtattggtttattagaggttttgtgggattgtattggaggtagtttggatgttggttttgttttgtattatttagttgttgtttatagtgttattttaggattggttatgttgtgagggttagggatttagattttgtttttgtttagaggatttttggtttggggatagaggtagaggagttttttatattgtttttggggagtttattatttgggagggttttagaacggggtttcgagggttttgtttttggttaatggggagattttgggggattttgagttgtaagttgtcgatttaaatttttttttttagtaggagtttaggaggattagtagagagaattgaaaagagttaataagagttaataaagttattgtacggggtcgttagttttagatggttaaagttttatataagatgttatttgggtgttttgcgattgtttgtttttgttgagaatagaagattggatgtagaaagttagtattaaataaatagaagaggaagaatagaggggattgtgggtgtgagataggggtagggtggtatatggtaatttagtgtttttttaagtgggaaagtaaggagcgtgatgggtgtggaatgtttaggagatcgtttttttattttggttttggtagattttagttttgggtttttgtagggtttgtagaggtagttatagtttttttattttaaaggtttgtgtggtttgtttttttttttaggtttatattttagttgttattattatttattaatttttttttttataggagtttttatattacgttttattttttttttttttttttttttagtttagtttatttgggtatttatttttttgtagaaaagaggtaggtagagttgaggggtttttttaaggaagtttttattatcgttttagatgaagtggtttttgttgaatgttttgttggggtttacgaggtaatttaagatgagaaatggaacggtggtttcggaaaagtaaattattttaatagtatttgaaaatatcgaaggaaataagttttttttgtgtgtgtggaaatggggaatatattgttttttattgtttcgaagattgtttttttattttgaaattataagttgtttttttttagagagatttataaatatatttaattatcgatatttaatataagaaataaagttttgaaatggttttttttagtatatgtagagtgagtcgattaggttgggtaggtgataattatttttattttttacgagtgggtattatcgcggagtggttagaagttttattttttattgtttttattttttattatattttttacgttgtgtagggttatttattggtaattttattattttatattaagattttgattaaaaaaaaggatgaaatttttaattttaaaagatatgagtgtaaagttttagagtaggaggatttggttttatattttgtgatttgaagagtaattttttagggggatggattgtttttgtgtttagttttaagtgattgaatgttattgattagatagtgggtgtttgttggtatttataattgtttttttttttttttaaatagagatggggttttgttttgttatttaggttggagtgtagtagtgtgattatagtttattgtagttttaaatttttgggtttaagtaattttttcgttttagttttttgagtagttaggattataggtgtgtttttttaacgtttagttaattatttttaattttgtatgttttgtagagatggggttttattatgttatttaggtttgttttaaatttttggttttaaggtatttttttgttttagttttttaaagtttaggattgtaaggtatgagttattgagtttggttttaattgttttttttagggattttgtttagggtgttattttaagaaggatgtttgttattttaggatggtgttattttttttttttttttttttttttatttttttttttttgagatggagttttgtttttattatttaggttggagtgcgatggtataatttcggtttattataatttttgttttttgggtttaagtaatttttttgttttagttttcggagtggttgggattataagtgttcgtttttatatttggttaattttttgtatttttagtagagacggggttttgttatgttggttaggttggttttaaattt

SEQ ID NO: 1427 - DNA, 5418 bp, Artificial Sequence
  chemically treated genomic DNA (Homo sapiens)
ttatggttattagatatatttatgggtattattagattttataatggttaatgataataggaattatatggagtttaatagagaatatttgtttaatatatttttgttaatatatttaggaatttaatggagttttttagtgttttagttttaggatgttttatttaaaatattttttgaaagtttattttgatgtttattttagttattaaatattaaaataataaattggtgaatatgaattttataaattgtggttagttggtttaaagtgaatatatttgttattagtagaataaaaatagatgatgaaaatgaattaatatatttatatagttataattttattattagaatgagttttataaataagtataatataggattttaattttattagatttttaattttaaattttattttttttattaatagaatttttatttattttttaaattttaaaatttatatttatattatttttataaaaatatttatatgaaataaaaatttgttattgatttgttgttatttattattaattttaataggattgttggggaaaaaaagttttaattttttttttttttttgtatatttggtattttatagtttgaataataaaagttattaaattgatgatcggtgttatttttaatgtagtatgataatagttttaatttattaattattttaatatgttaggaatattaagtgttttttatgtatgaattaaataattttttaaaagatagatatgatttggttaaaagaatattttttggagtttgaataatgaggtaatttggttttgttatttgttagttgtgtatattaggttatgttgtttaatttttttgtattttaggttttttatttttaaaatggggataatattgttttttttatagagtttatggaaggattaaaaaagttaataaatttaaggtatttaaaataatgtgtgttataaataagttatatataaatgttagtaattattttttatgattattattattttttttagtgttatagaagagaaaaattaagtttatagagtttaaaatatttgtttatttttagataattaagtaggtaatagagtgggaattttaaattgtgtttttaattattatattatagtgttttttttaatttttttttttttaatgaagagattatattatatataatatagtattatttatatatgtaatataatttgatatataaatagtatattgtatatattataataattatagggtattaggtattttatttattatgtttagtggttttttattgaaatttgataagattagtttttgagatatggtatagtgttgatattatgtttatatttttcgagatgtagatgttttttgtttttgagtgtatgtattgagttattttgtttatatgtagagaaagaatgatttagttgttatttaggattatttggatttttttatattgtaaatattaaaatttgggtgtaagattgtaaaaatttagcgtgttgtttatttatatgtaaaattattttttttttttattttttttgttgttaatttagaaggggttttaagttttaggtttataaatatatatgaattataaaatattttgtaatagttattgtgttggatataggatatttaaaaatatagttatgttttgtttaataattgggatatatttcgagaaatgtattattaggtgattttgttattgtgtgaatattatagggtgtgtttatataaatttaaatggtatagtttattataaatttaggttatatagtatagtttattgtttttaggttataagtttgtatagtatgttatagtgttgaatattataggaagttgtaatataatggtgaatatttgagtatttaaatatttgtaaatgtagaaagatatagtaaaattatggtataaaagagtaaaatggtatatttttgtagggtagttattataaatggagtttgtaggattggaagtggttttggatgagtcggagtgtgagtggtgagtgaatgtgaaggtttaggatatgattgtatatttttttaggttttgtaaatattgtatatatttaggttatattaaatttataaaaaatattttttttttaataataaattaattttagattattgtgttttttatttataaattttttaatttttaaattttttgattttcgtaataatattttaaacgtattgtataattgtataaaaacgttttttttttatatcgttattttataagttcgtttttttttttatttagttatttatttattttagagaagaggtttttttttgttatttatattgtagtgtagtgatatgattatagttttttgtagttttaaatttttgggattaagtgattttttttgatttttattaaagatgtgtattattatgtttagttaatttttgaaaattgttattgagaagggaattgattaggtatttaggatgttttcgaatttttggttttaagcgatttttttgttttagttttttaggttgggattatatttatgagttatagagtttggttaattgttttttgttttgttttgtattttttattttttatatttttttgttaaaaattaagatgtaaaaatatatattagtttaggtttatacggagttaggattattagtattattattttttagttttttgttttgttttattagaagttttttatgggtaataatatgtatggagttgttattttttatgataatagatagatgataataatttatattttttgaaggatttatttgagattgttttacggttaatgttttttttataattagtagaaagagtatattttaaaataataataaaaagtatagtatagtaaatatataaattagtaatatagttgtttgttatttttattaagtattgtgtattatatataattttatgtgttatatttttatagaattggtagtgaatgggtttgtttatattagtatttttataaatatgttagtaatatattgttttttatgattttataattatgaggtaatgcgaattatattattaggtaataggaatttattagttttattataattttatgggattattgttatatatgtagtttattgttgatttaaatgttatgtgttgtattattgtatgtaagttatagagaattgtatttgaaaagattattatgtggtgggagaggtagataagtaggtaaataattgtaattatatattatatatgttaatatagaggtatattttaattgtttgaaggagtaaatatatggatatgttaaaattttattattattatttttaatatattattttcgttaatgtggtattttgaattgagtttttattagtatattgaaatagtgataaatgttataatttttgattttatagtgttttttagtttaggaaataaaattatttttaatattatgaaatatatatatatatatatatatatacgtatttttgtgtaatatatatatatgtgtgtgtgtgtgtgtgtgtgtgtgttatttgtgagaaataggaaagatagagttttgtaagatagaaaggtaagagaatataattatatatagttgttagggaagggttttttgaggaattgatatttaagttgatttcggaagtataaataagttttagttaggtgaaaaggtaggtagtgggagagtaggaggaagaaattatttagtttaataattaaattgtatatttttatagaagtttagttttattatatattagaatattagttttttatgtagtgggtttttgatattttttattattgttaataagtgtgatagagaatttttggttttgggttaagggtgtattttgttttaattaagagttaaagttatttttttttagagaagggaagattgtttatatggattttttttttttttttatgtgggattttattgtattttttttatcgttattttttattatttttatatttaatttttagatgttttgaatttttttgtagagagtattattgttttttattaatagtgtagtttattttattttgttattagtattggttgaagatatagtaggtattgggagatatggtttggtaaattttttttgtttttttttttggattgttatttaggatggaaataatgaagaaatagttaggtattaagtttttataaaaagaatgtatttaaatattatttttgtaatttttttaagagtacgagtaatgggaaaatagattttgcgttttatagtatattgggtgattgttggtggagtttggtaaatattatttagagattagggaagttttttatatttaggtgaaatttaaaagagttatcgtttagagattaaattaaatttattagtagtagaaaataattgcgaataatatatgttttatatataaagttattaaatttagtagtaataattggtagttgtagttgggaggttggaaaggaaataggaattgttagggttttgaaagtatttattgtgtaagttgtatgatgatagtagagaattttattgttaatataatataaaaaatattttttttttgatttaagttttgtttttaattttataaacgtgtttgtatgtaagttgaggttggaggttttagttaaggtagttgtttagagttttttttttttttttttttttttttttttttttttttttttttttttttttttttttttttttttttttttttttttttttggtaattttggttggttagaatttaagtttttttagtattattttagttttcgtatcgtagtttttcggtgtttattttaggttttcggattggaaggatagtcgggaataaaacgtgtcggcgaggtttaggagttattggttatagagatttagttcgagttttttatcgtattgagtattgagattttgttggaagttttgtcgtagtatgagtttcgtagtcgggttttgcgttttacgtttcgggttgttgtttttggggttgttgtttttgttatttgtggtcgttttcgttagcggtgagagtagaagttaggttgtgagggttggtagcggcgagggggagttcgggaagttttggggttggggaggaattttttaggattatgattatagttatatttaacggagagtttgttgagtgtttggttatagtgttaggcgttgtatttgtattttttatttggttagaataatttttgtttgggggaggtgtgatttatggtaaggaaaagaaggttgaaggtagtggaaaaagtttttaaagtatttttggttatttatggagttattattttttttttttttttttttttattttttttattttttttttagt

SEQ ID NO: 1428 - DNA, 5418 bp, Artificial Sequence
  chemically treated genomic DNA (Homo sapiens)
gttgagggggaaatggagagggtaagagaggaggaggggagggagtggtgattttatgagtagttagaggtattttagggattttttttattatttttagtttttttttttttattataaattatattttttttagatagaagttgttttaattaggtgggaggtgtaggtgtagcgtttggtattgtggttagatatttagtaggtttttcgttaagtgtggttgtgattatgattttagaggatttttttttagttttagggtttttcggattttttttcgtcgttgttagtttttatagtttggtttttgtttttatcgttggcgaaggcgattataagtggtaggagtagtaattttaggaatagtagttcggggcgtgaggcgtagaattcggttgcggagtttatgttgcggtagagtttttagtaggattttagtgtttagtgcgatgggaaattcgggttgggtttttgtggttaatgatttttgagtttcgtcggtacgttttattttcggttgtttttttagttcggaagtttgaagtggatatcgaggaattgcggtgcggaaattaagatagtattgggaagatttgggttttggttagttaagattattaaaaaaaaaaaaaaaaaaaaaaaaaaaaaaaaaaaaaaaaaaaaaaaaaaaaaaaaaaagaaagaaaaaaaaaaaaaaaaggttttgggtagttgttttggttgggatttttaattttaatttatatataagtacgtttgtagagttagaaatagaatttgagttagaaaaggaatgttttttgtgttgtattaatagtagagttttttgttgttattatgtaatttatatagtaggtgtttttaggattttgatagtttttgttttttttttaattttttagttgtaattattaattattattattgagtttggtggttttgtgtgtgaagtatgtgttattcgtaattattttttgttattaataagtttaatttggtttttaggcgatgatttttttgaattttatttgaatgtggaaaatttttttagtttttggatggtatttattaggttttattaataattatttagtatgttgtaggacgtaaggtttatttttttattattcgtatttttggaaaaattgtagaagtaatatttgaatgtattttttttgtaaaagtttagtgtttggttgtttttttattgtttttattttgaataatagtttagaagagaggataagaagagtttgttaggttatgttttttagtgtttgttgtgtttttagttagtgttagtgatagggtgagatgagttgtattgttggtggggagtagtgatgttttttgtaggaggatttaaggtatttgggagttgaatgtgagaatgatgggaggtgacggtggaggggatgtaatagaattttatataggaaaggggaagagatttatatggatagtttttttttttttgagaaagaatgattttggtttttgattagggtaaggtatatttttaatttaaagttagaggttttttattatatttattaatagtggtaaagggtgttaggagtttattgtatggaaagttgatattttaatatgtggtaggattggatttttatagaaatatgtaatttaattgttgagttgagtaattttttttttttatttttttattatttgtttttttatttgattaagatttatttatattttcggagttagtttaagtgttagttttttagagggtttttttttgataattatatgtaattgtgtttttttgtttttttattttgtagaattttgttttttttgttttttataggtaatatatatatatatatatatatatatatatatatatattatatagagatacgtatgtgtgtgtgtgtatgtgtgtattttatagtgttaaaaatggttttgttttttaaattggaaaatattatgaaattagagattataatatttattattgttttagtgtattggtagagatttaatttaaagtgttatattagcgaagatgatgtgttgaaaatgatgatgatgaagttttaatatatttatgtatttgtttttttaagtaattgaagtatatttttatattaatatgtgtaatatatagttgtaattatttgtttatttatttgttttttttattatatagtgatttttttaagtgtaattttttgtgatttatatatagtagtgtagtatataatatttaggttaataatagattgtatatatgataatggttttataagattataatggagttgataaatttttgttgtttagtgatgtgattcgtattgttttatggttgtaaagttataggaagtagtgtattattgatatgtttgtggggatgttggtgtaaataaatttatttattgttagttttataaaagtatagtatataaaattatgtatagtatataatatttgataagaataataaataattatgttattggtttatgtatttattatattatattttttattattattttagaatatattttttttattagttatagaaaaaatattaatcgtgaaatagttttagatagattttttaggaagtatgagttgttattatttgtttgttgttataggagatggtagttttatgtatattattgtttatgaagagtttttagtgggataaaataaggagttggaagatagtgatattgatgattttgatttcgtgtaggtttaggttgatatgtgtttttgtattttaatttttaatagaaaagtgtgaaaaataaaaaatataaaataaaataaaaaataattagttaggttttatggtttatgagtgtaattttagtttgagaggttggggtaggaggatcgtttgagattaggagttcgagagtattttgggtatttaattagttttttttttaataataatttttaaaaattagttgggtatgatggtgtatatttttagtgaagattaaggaagattatttgattttaagagtttgaagttgtagagagttatgattatgttattgtattatagtgtgggtgatagagaaagattttttttttaaaataaataaataattagataaaaaagaaaacgagtttataaaatgacgatataaagaaaaaacgtttttgtatagttgtataatgcgtttaaagtgttattacgaaagttaaaaagtttaaaaattaagaagtttataaataaaaaatatagtaatttaaggttaatttattgttgaggaaaaaatattttttataaatttagtgtagtttaagtgtgtatagtgtttataaagtttaaagaagtgtatagttatgttttaggtttttatatttatttattatttatatttcgatttatttagagttatttttagttttataagttttatttgtggtaattgttttatagaggtgtattattttatttttttatattataattttattatatttttttatatttatagatgtttagatatttagatatttattattgtgttataattttttatggtatttagtattgtaatatgttgtataggtttatagtttaggagtaataggttgtattatatagtttaggtttgtagtaggttatattatttaggtttgtgtaagtatattttgtgatgtttatataatgataaaattatttaatgatgtatttttcggaatgtattttaattgttaagtaaaatatgattgtatttttgaatattttgtatttaatataatggttgttgtagaatgttttgtaatttatatgtgtttatgaatttgaaatttgaagttttttttgagttaatagtagagagaatgaaggggagggatgattttgtatatggatgggtaatacgttgggtttttatagttttatatttagattttaatgtttgtagtgtaaaggaatttaggtggttttgagtggtaattgaattattttttttttgtatgtaaatagagtaatttaatatatgtatttaaaaatagaagatatttgtatttcgggaggtataagtatggtgttaatattgtgttatgttttaggagttggttttgttaagttttagtgggaaattattaaatataatgagtgagatgtttgatattttataattattatagtatatatagtatgttatttatgtattaagttgtattatatgtgtgaataatattatgttatatgtaatgtaatttttttattagagaaagaagagttgaggaaagtattgtggtgtggtggttaagagtataatttgaaatttttattttgttatttatttagttatttgaaagtgggtaagtattttaaattttataaatttgattttttttttttgtaatattggggaggataataataattataagaaataattattaatatttatgtgtggtttatttatgatatatattattttaaatattttaaatttattaatttttttaatttttttataaattttatgagggaggtaatattatttttattttagggatgaagaatttaaggtatagagaaattaagtaatatgatttgatatatatagttaataagtggtagagttaggttattttattatttaaattttagaggatgtttttttaattagattatatttattttttaaaaaattgtttagtttatgtatggaaaatatttagtatttttggtatattaaaatgattaataaattggaattgttattatattatattaagaatgatatcgattattaatttagtaatttttgttgtttaaattgtgaaatattaagtatataaaaaagagaggaaaattaaagttttttttttttaataattttgttaaaattaataatagatgataataagttaatagtaaatttttattttatgtgaatatttttgtaagaatagtgtgggtataagttttagggtttaaaaaatgaatgaaagttttgttgatgaaaaaagtagaatttagaattaggagtttagtaaggttgaagttttatattgtatttatttataaggtttattttaatgatagaattataattatgtagatatgttaatttatttttattatttatttttgttttattagtggtaaatatatttattttaaattagttaattatagtttataagatttatatttattaatttattattttagtgtttgatggttaaaataaatattagaataaatttttagggagtattttaaataagatattttaggattaagatattgagagattttattaagtttttaaatatattaataaaaatgtattgagtaaatattttttgttgggttttatgtaatttttattattattgattattatgaaatttaataatatttatgagtatgtttaataattataa

SEQ ID NO: 1429 - DNA, 5488 bp, Artificial Sequence
  chemically treated genomic DNA (Homo sapiens)
tttattttatttgaatgtgtagatagtgatttgtatattgaattgtgttgcgtgtgtgtgaagttagtttttggaatttattttagtaatattattttaaatatttatatttatttgttgttaattattatgggtatgtttagtttaatagtagagtagagtaagaaaaattaattaaaatgtatttggaagtagatttttaaataaagagggtaaagtattgtgtaatggttagttaggaattagggttaatttaggatggattattagtatttattatttggaagtggttaggttaggagttttttgtaataaagtttaagtgatgtaagtttttgtttttgtgttattgttttattaggaaagttttatatttttatttttttttttatttgtattgttttttgttttttaatagataattttgttgttttttatagagttatgttgaaagatgggaggaaaatgtatttggatttagaagtttttagaattaagaagatagtttagaaaatgttggaaggtgatgggttaggtgtttaatttgtttattttttgttaaatttgtttattttttaggaagggtaggattttaaagttttgatttttttgaatttttattttatttaagatatttatttttattgtattaaaatttaggtatgtttttatttttttttaaaaattatattttattttgagaaggttagttaaaagatgatagaaagaagatgaaaataagtaagtttagttttaatatagtatatggtttattttttaatttttggttaattattgtatagtgttttgttttttttatttgagaatttttttttaaatatatttttgttgattttttttgtttagttttattgttagattagatatgtttatgataattaatagattttataatggttaatgatataagaatttatatagagtttagtatagaatatttggttaataaatttttgttaaattttttagggatataatagagttttttaatgtgttaggatgttttgtttataatattttttgaaagattttttaatgtttattttagttttttaatgttgaaaatagtaaagttgttgaatgtttagttttgtaagttgtgattatttattttaaagtgaatatatttgttattagtagagtaataatatataataaaaatatatttagatattttataaagaaaattatggtattttttggaataataaaaaaagaaagttgaaagaaatttaaaattttgttttaatattagattatttagtaggtgatagagtggggatttgaaattttgtttttaatattgtattatattattttttttaattttgttttttcgaatgaggagattatattatatataatatagtattattggtatataaaataggatttattgtatagataatatattgtatattataatgattataggagaagaaataattttatttattttaatttgtacgtggattttggggaggtatttatgtattaagtatgtagtttataatttttgtgttattaaggaatgtttttattatttttttattattataggtttaatattttaaagtgttttgtttataaaataaatgtatatattaaataatagttaaaacgatatataaataaatacgtaataaagtagtaaatgtaaattgtaatttttttttttagtttttttttttaattatttaaagtagtttaagtattttatttatatttgtagtgttttattattgaaatttgttaacgttagtttttgagatataatatagtgttggtattatatttattttttatgagatgtaggtattttttatttttgtgtgaagttattgagttattttatttagatgtagagaaagggtagtttagttgttattcgttgttgtttgaatttttgtatgttgttaatattgaaattttcgggtaagattgtatagatttattatgttgtttattgaaatgtaaaattattttttttatttatttttttcgttgttaattttagttttagttttatggaaatgtatgaattataatatgttttgttatagttattgagttgtatattagatgtttaaaaatatagttaaatattgtttaacgatggggataagttttgggaaatgtattattaggtaattgtttttattgtgtaaatattatagagtgtatttataaaaatttagtatagtttattatatatttaggttatatgttatggtttattgtttttaagttataaatttgtatagtatgttattgtattgaatattgtaggtaaatgtaatataatgataagtatttgtgtgtttaaatatatttaaatatagaaaaggtatagtagaagtatgtttaaatagaaaatggtaaatttgtagagagtatttgttatgaatggagtttgtaggattggaagttgttttaggtgagttagtgagtgagtgattagcgaatgtgaaggtttaggatattatagttcgattttgtaggttgtataaatattgtatatttaggttatattaagtttttaaaaaatatttttttttatttaatataaattaattttagtttattgtaatatttttattttataaatgtgttaattttttaaatttttttatttttataataatattttatatagaatataaatatattgtatagttatataaatatatttttttttttttatttttattttataagttttttaatttttaatttttttattttttaaatttttttattgaaaattaagattttaatataaaaatttgtttatataaggttagaattattaattatttttttttatatttattttttattttatgggtaataagatatatggagtggttattttttaaaataataatgtttttttttggaatattttttgaagggttttttagaggttgatttatagttaattttttttttattagtaggagaaggagtttattttaaaataatgattaaagagtataatatagtaaatatataaattagaaatagtgttgtttattataattattaatttttatgtattgtatatatttgtatgttatatatttttatgtaattggaagtatagtaagtttgtttatattagtattattataaatatatgaataatatattggtttgttatgattttataatagttatggtattataaggtaataggaattttttagttttattatagttttatgggattattattatttatatagtttattattgtttaaaacgttgttatgtggtgggtgattgtatataagttatagagaattgttattgaagagattattattttgtgggagaggtagataagtggataaataattttgattatatgtgatacgtgttaatatagatgtatgttttaattatatgttttaattgttttaattgaatagatataggaatacgttaaagttttattattattatttttaatatattatttttattattgtagttattttgtattgagtttttattagtatattgaaatagtgataaacgttatgatatttaatgttatagtgttttttatttaagaaataaaataattttaaatatttttaaatatatagatatatatatatatatatatatatatatatatttataatatatgtgtgtgtatgtttgtgtattttgtgagaaataggaagaatagagttttgtaagatagaataataagggaatataattatatatagttgttagggaaggtatatttgaggaagtgatatttaagttgatattagaaatatgaataggttttagttagttgaataggtaggtgtagggagagtaggagaaagaattgtatatttttataaaaatgtaggtttgttgagtattagaatattagttagttttatttagtgggtttttgatattttttattattgttagttagagtgatagggaattttgggttttgggttgagggtgtattttgttttgattaagagttaaagttatttttttttagagaagagaaaacggtcgatatggatttttttttttttttcgtgtgggattttgttgtattttttttattgttattttttattatttttatatttaatttttagatgttttgaatttttttatagagagtattattgttttttgttaatagtgtagtttattttattttgttattggtagtgattgaggatatagtaggttttggaagatatggtttggtaaattttttttgtttttttttttggattattatttaggattgaaataatgaagaaatatttaggagttaagtttttataaaaataatgtatttaaatattatttttgtaatttttttaagagtaacgggaaatagattttgtattttatagtatattgggtgattgttggtggagtttggtaaattttatttagagattagggaagttttttatatttaggtgaaatttagaagagttattatttagagattaaattaaatttattagtattagaaaataattgtaaatagtatattttttaaatatatagttattaaatttaatggtaattaagattgaagttaggagtatatgggtagtttttgagttgagaaggaaataagaattgtttgggttttgaagttatttgttgtgtaagttgtttggtgattatagagaattttattatgatataatatagaaaatattttttttttaagatgtaagtagtgtttttaattttataaatgtaagtgtatataaattgaggttggaggtatgtatttttgtattattttttagttaaggtagttgtttttagttttttgttttgtaattttggttggttagagtttgagtttttatagtagtgttttagtttttgtattatagtttttcgttgtttattttaggttttcggattggaaggatagtgggatagtgacgggggataaaagaagtttggtgaggttaggagttattgtttgtagaattttagttcgattttttttgcgtattgggattttgttggaattttagttgtaatatgagtttcgtagttaggtttcgttttattcgcgttattcgttaggagatgttgtttttggcgttgttgtttttgttagttgtggtcgttttcgttagaggtgagagtagaaattaggttgggagggttagtagcggcgagggggagttcgggaagttttggggttggggaggaattttttaggattatgatcgtagttgtttttattgcgcgcgtgttgagtttgcgggtatagtgttaggtattgtacgtgtatttcgttatttgattagtataatttttgtttgagagaggtttgatttacggttaaggaaaagaaagttgaaggtagtggaaaaggtttttaaagtatttttggttatttagggagttataatttttattttttttttttttttatttttttttttttttttttagt

SEQ ID NO: 1430 - DNA, 5488 bp, Artificial Sequence
  chemically treated genomic DNA (Homo sapiens)
gttgagggggaaagggagggagtaagagaggaggaggggtgggagttgtgattttttgagtagttagagatattttagggattttttttattatttttagtttttttttttttagtcgtaaattagattttttttagatagaggttgtgttgattaggtggcgaggtgtacgtgtagtgtttggtattgtattcgtagatttagtacgcgcgtaataagagtagttgcgattatgattttagaggatttttttttagttttagggtttttcggattttttttcgtcgttgttggtttttttagtttggtttttgtttttatttttggcgaaggcgattataattggtaggagtagtaacgttaagaatagtattttttggcgggtggcgcgggtgaggcgggatttggttgcggagtttatgttgtagttgaggttttagtaggattttagtgcgtagggaaagtcgggttggggttttgtaggtagtgatttttggttttattaggttttttttatttttcgttattgttttattgtttttttagttcggaagtttggggtggatagcgaggaattgtggtgtaggagttaagatattgttatgaagatttagattttggttagttaagattataaaataaaaggttgggggtagttgttttggttaggaggtggtataaagatgtatatttttaattttagtttatatatatttatatttgtggagttagaaatattatttgtattttagaagagaaatattttttgtgttgtattatagtagagttttttgtagttattaagtaatttatatagtaggtggttttaggatttagatagtttttgttttttttttaatttaagaattgtttatatgtttttaattttagttttgattattattgagtttgatggttgtgtgtttgaagagtgtgttatttgtaattgttttttaatattaataagtttaatttggtttttaggtgatgatttttttgaattttatttgaatgtggaaaatttttttagtttttggatgagatttattaggttttattaataattatttagtatattgtaggatgtaagatttatttttcgttatttttagaaaaattgtagaagtaatatttgaatgtattatttttataaaaatttagtttttggatgtttttttattgttttaattttgaataatagtttagaagagaggataaggagagtttgttaggttatgttttttagagtttgttgtgtttttagttattgttagtgatagggtgagatgggttgtattgttggtagggagtagtgatgttttttgtgggaggatttagggtatttgggagttgggtgtgagaatgatgggaggtgatagtgaaggggatgtaatagaattttatacgggaaaggggaagagatttatatcgatcgtttttttttttttaaaaaagaatgattttggtttttgattagggtaaggtatatttttaatttaaagtttaaggttttttgttattttgattaatagtggtgaagggtgttagggatttattggatggaattagttgatattttaatgtttagtaaatttgtatttttgtaggaatatgtaatttttttttttattttttttatatttgtttatttagttggttaagatttatttatatttttggtgttagtttaaatattatttttttaggtgtgttttttttgatagttatatataattgtgtttttttgttgttttattttgtagaattttgttttttttattttttatagaatatataaatatatatatatatatattgtagatatatatatatatatgtgtgtgtatgtgtatttgtgtatttaaaagtgtttaaaattgttttgttttttaaatggaaaatattgtgatattagatattataacgtttattattattttaatgtattggtagggatttagtgtaaagtagttatagtagtgaagataatgtgttgaaaatgatgatgatgaggttttgacgtgtttttatgtttatttaattggagtaattagagtatataattggaatatatatttatattgatacgtgttatatatggttaaaattatttgtttatttgtttgttttttttataagatagtgatttttttaatagtaattttttgtgatttatgtgtagttatttattatataataacgttttgggtagtaatagattgtataagtgatgatgattttataagattatagtggagttaaaaaatttttattgttttgtgatattatagttgttgtaaaattatagtaagttaatgtattatttatgtgtttgtggtaatgttggtgtaaataaatttattgtgtttttagttgtataaaagtatatgatatataagtatgtatagtatataaaaattgataattataataaataatattgtttttggtttgtgtatttattatattatattttttaattattattttagagtgaatttttttttttgttaatggaagaagagttaattatgaattagtttttggaaggttttttagaaaatattttagaaaaagatattgttattttagaagatgattattttatatgttttattgtttatgagataagaaatgaatgtggaagaaagtgattgatgattttgattttgtataggtaaatttttatgttggagttttagtttttaataaaaaaatttaaaaggtgaaaaaattaaaaattaaaaagtttatagaatgagaatagaaaagaaaaaatatatttatatagttgtatagtgtgtttgtattttatgtgaagtattattatgaaagtgaaaaagtttagaaaattaatatatttataaaataaaaatgttatagtaagttaaggttaatttatattgaataaagaaaaatattttttagaaatttagtgtagtttaagtgtatagtgtttatatagtttgtaggatcggattgtaatgttttgggtttttatattcgttgattatttatttattgatttatttagagtaatttttagttttgtaagttttatttatggtaagtgttttttataggtttattattttttatttgagtatatttttattgtattttttttatgtttaaatatatttaggtatataaatatttattattgtgttatatttgtttatagtatttaatatagtagtatattgtataagtttgtagtttaggagtaataggttataatatatggtttaggtgtgtagtaggttatattaggtttttgtaagtatattttatgatgtttatataatgaaaataattgtttagtgatgtattttttagagtttatttttatcgttaagtaatgtttgattgtatttttaaatatttggtgtataatttaatggttgtggtagaatatattgtaatttatatatttttatggaattgaaattgaagttaatagcggagagaataaataaaagggatggttttatattttaatgggtaatatagtaggtttgtataattttattcggagattttaatattggtagtatataggaatttaggtagtagcgagtggtaattaaattattttttttttgtatttaaatagaataatttaataattttatataaaaataagagatatttgtattttatgaagaataaatgtagtgttaatattgtgttatgttttaggagttggcgttgataagttttagtggtaaaatattatagatatgagtgagatgtttgagttattttgaataattgagaaaaaaaattaaggagaagaattgtaatttgtatttattgttttattacgtgtttatttatgtatcgttttggttattatttaatatatatatttattttatagataaaatattttaaggtattgagtttatgatggtgaggagataataagagtattttttaatagtataaaagttgtaaattatatgtttagtatatgagtatttttttaaagtttacgtataagttggaataggtgaaattatttttttttttataattattatagtatatagtatgttatttatgtaataaattttattttgtgtgttaataatattatgttatatgtaatgtaatttttttattcgaggaagtagagttaagaaaagtggtgtggtgtagtattaagagtagagttttaaatttttattttgttatttattaagtaatttaatgttggggtaagattttaaattttttttaattttttttttttgttgttttagaaaatattatagttttttttatagaatatttggatatgtttttgttatatattgttattttgttagtgataaatatgtttattttaaagtaaataattataatttataaaattgaatatttaataattttattatttttagtattggaaggttaaaataaatattagaaaattttttagagaatgttgtaaataagatattttagtatattggaaagttttattatatttttaaagagtttaataaaaatttattgattaaatattttatgttgggttttgtgtgagtttttatattattgattattataaaatttgttaattattatgggtatgtttagtttaatagtaaaattgagtaagaaaaattaataaaaatatgtttggaaggagatttttaaataaagagggtaaagtattgtgtaatggttagttaggaattagagagtaaattatgtattatgttgaaattaggtttgtttatttttattttttttttgttattttttaattagtttttttagaataaaatgtgatttttgagagagaatggaaatatatttggattttaatatagtaagagtaggtattttggataaaataagaatttaaaaaagttaaggttttaaaattttgttttttttgggaggtaaataggtttggtagaaagtgaatagattaagtatttgatttattattttttaatattttttggattatttttttgattttgggagtttttgggtttaggtatattttttttttattttttagtatggttttgtaagagataatagaattatttgttgagaaatagaaaataatatagatggggaaggaggtgaaggtgtagggtttttttgatgaagtaatgatatagaagtagggatttatattatttggattttgttgtaaggggtttttgatttgattatttttaaatgatgagtgttggtgatttattttaggttagttttaatttttggttgattattgtataatgttttgttttttttatttgagaatttatttttaaatatattttaattgattttttttgttttattttattgttagattagatatgtttatgataattaatagtaaataaatgtggatgtttgggatgatgttgttgggatgaattttagaggttgattttatatatacgtagtatagtttaatgtataagttattgtttatatatttaggtggagtaga

SEQ ID NO: 1431 - DNA, 6047 bp, Artificial Sequence
  chemically treated genomic DNA (Homo sapiens)
taatttgaaagtattgtttacgtgtttattatgtttattattagatgtgataaattgaaataaaatagtagtttttttattgtatcgtggttggttgttttgttttttgttttgtgtgtatgtttgttttattatgaggttgtgtatttaggtggttaaatagttttgtaatgatagtttgggtttgaatttaggtattgtcgtttgttgtattagtttcgtgatatagggtatgatttagtttgttggtaacgtgggaatcgatgagtgttttttttatatagagtttttgcgagtattatttgaagtaatagttgtagggtttagatagtatttgatttatggtaaatgttagtttttatataatgagttgtatgttgatttaatatgtatgaaatatatgtggtaagggaggtttatggttataatttgattgatatgatttatgttattttttaaaagttttgtaataatgtaaattttggttttgaattattgatggtcgatatttttaaaaagaaaataatgatttattaattattttaagtcgtttgagaagtagaagttacggagtaggtagaatgatgtgttgtattgggtttttttttgtgttgagtgttgtgttttataaataatataatttggagtggttttttaggtcgtattttattttgaatgtttttttttgtaaatttgtatgagtttcggaggttattaggggaaggtacgatgttgtggaattatgataggttagtttttgtgattagtttgtgtttttaacgcggtgtttgttggttagttttagttattgattttaagttgtgtttagtatgaagggttaagaaagaaaatttaaaggattgatggagaaattgggtaggtttttgagaggtttatagtgtattttgaggttgatataaaatggaacggtgaatattgttggataaattgaatagattgtgttttttgttagtgagttttgaatataaatttttattttttaaggaagtacgtgataaatattaaagagttgtaatttgaatataaagttttttaagttaatggttattggtttattgttgtttgtgtttggtagggttgtagaaagagattagtagttataggcgttttttgtttggtaaatagatattttttgttgtatgggaattacgtacggggatacgtagtttttttttttgtatgagaataagtgggttttttttttgtatggaaatttaaatatggaagtttttataattattttggttaagttagtttaaggtatatgattttttttttatgaattgtacgatttattttttttttttttttattttgtattgattgattgatttatgttttttgaatatatttggttattttgtagttttttatgttgtttttatggtagaggggtatgaagtttagagttattggattatttgatagttatatatgattgtataatgtgttaggaggtatttagggtatgttatatatacggatttatttaattttatgagaattatttgaggaaagtataaatattgaattttattttgtagatgagaaaacggaggtagagggtaggggttgagtttggtgtttggtgtgatttagtatataggtgatagaatttagataagagatgatagatgtttatattttagttttgtagttttggttgtgtaaattttgtaaattatttatttagtttgatatttagtttatttatgaataatttttttttttatattgtttgaggatggaataaggtgatttttatgggttaagtaggatttgtttgaggatttttgtttagaacgtaagttttgaagtttattgagttcgtttgaatttattgtgttatgttcggatatttgttgttttcgttgggttttgagttttttaacgattatattagggtgttgatttgtgtgtttttgagatttgtatagcgtttggtaaatatacgttgtagttagaggttgtttgttttttgaagagttattttttgtttttttattttgttttttgttattgttggttttgtattttggttattagttatatgggatttattgatgtattttaaatgtattttgttttttttatttttatcgtttggtagaggtgtttattttggtataattattagttttttataatttttttttcgaggattatttttaagttcgtttttataagtttttttttttgatgatttagacggagtttgagttttttttttcggaattgtttttggtgtttttattgtttgatagttttagatatgttttttttggtgttttaattgtttatattttcgtatttagttttttaagaaattgtaaattttggtaggtagggttttttttttatttattttggttgatgtttaataaatattttttttttttttaggataaaaatagaaatttttttttttcgagaaggggaaatgtgttggagggttttgtataatacgtattaatgcgtagtgaaaggggttttatgttaattattggagatgtgaggtttagaatgggtttatttattagcggggttattttggggtttttttttatagagtgtttttgtatgtttatttataaaatagtgataataagatttgttttatttattttagagtttgagaggaattgaagtaatatataataaaggaatttaggtggtatgtgtatattatattgtaggcggtgtgtaaattacgtttggaagtatattttggtttattagaaataggtaattttttatattttaaagacgaagaaataagtttagaaaaatttagttatttgtttaaggcgatttagttggtttttgggaaagttggaaatagggttgaggtttgtgtgtttttaaagtgagtggacgttagttattgttaagtgatgttttttttatgtattagcgtgaaatatttgagatttttataaaagtgaaaaaagagtgattttttttttagatatgagtatggttaagttttgtatttataatttatataaatttgtgtttcgatattatttgatttgtgaataaatagtgtttatttttgtagatatttggtaatatagaggttgttattaaaagtatttgataatatttgaagatttgtagtgtttagtgaagtagttcgtttttttatgagcggaattagttattatgtttagaaatatgggggaaggagggagggtatttttttttttgtttgttggtggtatggtggatttatttaggagggtttaatggaggtatgtagatttttaaaatatgatggttttattgtgattttttttttgaggaattaggaagtgtttttgttattgtaatagatattataaggtgatgatgttgttgcgttggttattgtatagtgtgtaattatagtatttaaggttagagaatgtttaggttatacgttagatatttcggtgtgttttgtagaagtaatatattttttaaagtttattgattttttaggttattttttatttaatggaaatgagttgaatgagtaaatgacgaatttttagtgtgaagtaggaatgagagagagttaaagatagtagtatggtagatgtttggaatttgatgtaaggaagaaagataaagttttattaagtataaaattgtaaaattgtaatagtaagaagagatgaaaagtttatttattttttttgaatgtttaaattatttggaggttgtaattaattttacgtatttgttaatttgttgtaatatttataattagtatgtgtatttttttattacgggttgatttttttttaagaaggggaattcggtatgaattttgatttgttttttggttagagttaaaaaaaatattggtggtttaaaaaatttggtgtgtttaaggaggcggttacgaggtttttttttttttaaaattttttttaaatttgatttttttttaaaaggaatagggcgaaaaattttaagggggggcggggaattaaaatacgtttttttttaatttttagggttttcgggaaaaaaaaaacgttgtttttttttattgttttaggttttaataaattaacggaatataaaaggttttattttaggatttttaaatgggtttgggtaaatacgttttcgaaaaggttttttttcgatcgggttttatttttttggaaaggaaagcgtgatatatttcgcggaaagaagtaattttcgatttttaaataggggtttttataaaagttaagtaaaataatttatttttcgatcggcgggttttatattaagttttaggggttagatgagagatcggcgtttttatttttttttttttcgttatcgacgtttatagtaattgcggggtttatattcgtttcggcgttcgcgtttatttacggtttttttcgttttttcgggagatgttttcggcgttttatttcgcgtcgttatggcgcgtttcgtaaacgatgtgatttcggttttttgcggttttttttttttcggacgttgtttttgttttatttgtggcgttttcgttatttttagagtttttaattagagttttttagtttattcgcgaggttcgcgtatttgcgatgcggttttattagtagggattcgtttatttgtggcgttatttttgtttttgtcgtttttcgtatcgttagcgcggtttttatttacgacgattttcgcgtagatgtttttgtttatattcgttttagtttcggtttttgtttttagtcgcgttcgcgttttttttttcgtagttttttttatacgttcgggtttcgttcgttatcgtttattggcgttggggtcgggcgggggcgcgggcggggcgtcggtttcgagttaggcgcgcgcgggtagggtttttattgtttgttgcgtattcgtacgtgcggtttttttcggttttttcgttatggacgcggacgattttcgggtttttaagggttttttgcggaagtttttggagtattttttcggggtcggtaaggttatcggcgtgttgattagcggcggggatgtttaaggtgcgcgtttttttttcggcggcgagggagggacggacggacggagttggggagaatcgggcgaaggcgatggggtgatcggagagaagaggggggaagcgatgggggggattcggggaaaggtggcgaagcgatggggagaatcggggagaagagcggggaagcgatggggagaatcgggaagaagttcgcgttcggaagcggtaggggtatttgcggggcggtatgagtcggcgaggtagtttcggggtttttgttcggtggggcgggggaggaagggatatggcggtaggaatttttattcggaagattagtgagttttttattttcggttttgttttaaatggaatttggtagagggagtcgtttgaagcgttttcgggggtcgttttgtttttgagttgtaggacggggtcgggcgtttttttcgaagcgtgggtatagcgcgattattttttaagtgttttttcgttttttaatttcgtcgtacgttattttttagaatgtcgaggaagaaacggttgggttttcgcgcgttttttgtcgtttcgtgttttgcgcggcgtgggcggggttttggttgttgtaatgcgggacgcggcgggggtgcgcggggttttcgtttggcgtttttagggcggttcggtagtttttcgcgttttcgttgggagatttttaaaaagggttttttgcgttcgtatgtgttgtcgtttttcggttcgtgataaaaacgaaaattaaaatgggttttaggtttttttcgttagttttcgtagacgggaaggattaggaagcggggatttcgggatgttagcggcgtcgcggcgcgggtttcgggtttttttgttttgtaatgtggaagttgttttttaggaggggttcgaggttgggtttacggacgcgggcgcgtcgggaggatatttaatattgaagagcggaaggtggcggagattcggcgcgttttaggtttcgggtgtacgtgggggcgtcggtgttcggatg

SEQ ID NO: 1432 - DNA, 6047 bp, Artificial Sequence
  chemically treated genomic DNA (Homo sapiens)
tattcgggtatcggcgtttttacgtgtattcggggtttggggcgcgtcgagttttcgttatttttcgttttttaatgttaaatattttttcggcgcgttcgcgttcgtgggtttagtttcgggttttttttagagagtagtttttatattgtagggtagggaagttcggagttcgcgtcgcggcgtcgttgatatttcggagttttcgttttttgatttttttcgtttgcggaggttggcggggagggtttgggatttattttggttttcgtttttgttacgagtcggaaggcgatagtatatgcgagcgtaggaaattttttttaaaaattttttagcggaaacgcgaggggttgtcggatcgttttggagacgttaggcgggaatttcgcgtattttcgtcgcgtttcgtattgtagtagttaggatttcgtttacgtcgcgtagggtacgaggcgataggaggcgcgcggggatttagtcgtttttttttcgatattttagggggtggcgtgcggcggagttggggggcgggggggtatttaggaagtgatcgcgttgtatttacgtttcggaggggacgttcggtttcgttttatagtttagaggtagaacgattttcgagggcgttttaggcgattttttttgttaggttttatttaaaataaaatcgaaggtggaaaatttattgatttttcggatggaggtttttatcgttatgtttttttttttttcgttttatcgggtaaggatttcggggttgtttcgtcggtttatgtcgtttcgtaggtatttttgtcgttttcgggcgcgggttttttttcggttttttttatcgttttttcgttttttttttcggttttttttatcgtttcgttattttttttcgggttttttttatcgttttttttttttttttttcggttattttatcgttttcgttcggttttttttagtttcgttcgttcgtttttttttcgtcgtcgggaggggggcgcgtattttgagtattttcgtcgttggttagtacgtcgatggttttgtcggtttcggagaggtgttttaggaattttcgtaaggagtttttgggggttcgggagtcgttcgcgtttatggcgaggaggtcgaggggagtcgtacgtacgggtgcgtaataggtaatggggattttgttcgcgcgcgtttgattcggaatcgacgtttcgttcgcgttttcgttcggttttagcgttaatgggcggtgacgggcggggttcgagcgtatgggaggggttgcgggggagggggcgcgggcgcggttaggggtaggggtcggggttggggcgggtgtgggtaggagtatttacgcgggggtcgtcgtaggtgggggtcgcgttagcggtgcgggaggcggtagaggtaggggtagcgttataggtgggcgggtttttgttagtggggtcgtatcgtaggtgcgcgagtttcgcgggtgggttggaggattttggttgggggttttagagatgacgggagcgttataggtggggtaggggtagcgttcggaggaggggagatcgtagggggtcggggttatatcgtttgcggggcgcgttatggcggcgcgggatagaacgtcgggagtatttttcggaggggcgagggagatcgtgagtgggcgcgagcgtcggggcgggtgtaaatttcgtagttgttgtgagcgtcgatggcggggaggggaggaatgagggcgtcggttttttatttggtttttgaggtttaatgtagggttcgtcgatcgggaagtaaattgttttgtttgatttttatggagatttttgtttgaaaatcgggggttgttttttttcgcggggtatgttacgtttttttttttaggaaaataaaattcggtcggaaaggaattttttcgggggcgtatttgtttaagtttatttggaaattttaaagtgggattttttgtgtttcgttgatttgttggaatttgagataataaaaaaaaataacgttttttttttttcggggattttgggggttaaaaaaaaacgtattttaatttttcgtttttttttgaaatttttcgttttgttttttttgggggggggttaaatttggggaaaattttgggaaaaaagagatttcgtggtcgtttttttgggtatattaggttttttagattattagtattttttttaattttggttaaagaataggttaaaatttatgtcggatttttttttttgaaagagggttagttcgtggtgaagaagtatatatgttgattataagtattatagtaagttaataaatacgtggaattaattataatttttaagtagtttaaatatttaggaaaagtgaatgaattttttatttttttttgttgttgtagttttgtagttttgtgtttggtgagattttgttttttttttttgtattaagttttaaatatttattatgttgttgtttttgatttttttttatttttgttttatattggaaattcgttatttatttatttaatttatttttattaagtaaaaaataatttagaagattaatgggttttgaaaggtgtgttatttttgtaggatatatcgaagtgtttgacgtatgatttggatattttttggttttggatgttgtaattgtatattatataataattagcgtaatagtattattattttgtggtatttgttgtagtggtagagatattttttgattttttaggggaaaagttatagtaaaattattatattttgaagatttgtatgtttttattaaatttttttaaatggatttattatgttattaataggtaaagggagaagtgtttttttttttttttttatgtttttgggtatagtaattaatttcgtttatggaggagcgggttgttttattgggtattgtaaatttttaagtgttgttaaatatttttaatgataatttttatgttgttaaatatttataaggataggtattatttatttataggttaagtaatgtcggaatataaatttgtgtaagttatgaatataaaatttagttatatttatatttagggaaaaaattattttttttttatttttatggaaattttaaatattttacgttggtgtatggaaaaagtattatttggtagtgattggcgtttatttattttgaagatatatagattttagttttgtttttagtttttttaaggattagttgggtcgttttagataggtggttgaatttttttaaatttgttttttcgtttttaaaatgtggagaattgtttgtttttgataggttaaaatatgtttttaagcgtggtttgtatatcgtttgtaatgtagtatgtatatgttatttgaatttttttgttatgtgttattttagttttttttaaattttgagatgaatagagtaggttttgttgttattgttttatagatgaatatgtagaggtattttatgaggagaagttttagagtgatttcgttggtaaatgagtttattttaaattttatatttttagtggttagtatgaagttttttttattacgtattgatgcgtgttatgtaaaattttttagtatatttttttttttcgagaaaaaagagtttttatttttgttttagaaaggggaaaagtatttattaaatattagttaagatgaatgaaagggaagttttgtttgttaaggtttataattttttaaaaagttgagtacgagagtataaatagttaaggtattaaagagaatatgtttagggttattaggtaatgaaagtattaaaggtagtttcgagaaaggagatttaagtttcgtttgagttattagaagggaaggtttgtggggacgggtttggaaatggttttcgaaaagggggttgtgaggggttggtgattatgttaagatgaatatttttgttaggcgatagaagtaggaagagtaggatgtatttaaaatatattagtaaattttatgtggttggtggttagagtgtagaattagtagtggtagaagataaggtggagagatagaagatggttttttagaggatagatagtttttggttatagcgtgtatttgttaggcgttgtgtaagttttagggatatataaattaatattttgatatggtcgttgaggaatttagagtttagcgggggtagtaggtgttcgagtatagtataatgagtttaggcgaatttagtgagttttaggatttgcgttttgggtagggatttttaaatagattttgtttggtttataaaagttattttgttttatttttaaataatatagaaaggggagttatttatgaataaattaagtgttagattggatgagtaatttgtaaagtttgtatagttaggattgtaaagttaggatgtaaatatttgttattttttatttaagttttgttatttgtgtgttgggttatattagatattagatttaatttttattttttgttttcgtttttttatttgtaaaatagaatttagtatttgtattttttttaaatggtttttatgaggttgagtgagttcgtgtgtgtaatatgttttgaatattttttggtatattgtataattatatgtggttgttagataatttagtgattttaaattttatatttttttattatggaaatagtatgaagagttgtaaagtagttaaatgtgtttagagaatatgggttagttagttagtatagggtagaaaagaagggaaggtgaatcgtgtagtttatagaagagaaattatgtgttttagattagtttggttagagtgattgtaaaggtttttatgtttaaatttttatgtaagggggagatttatttatttttatgtagggaagagaattacgtattttcgtgcgtaatttttatgtaataggaagtatttgtttgttaggtagaaagcgtttgtagttattggtttttttttgtagttttgttaaatataagtagtaataaattaatggttattggtttaaaaagttttgtatttaaattataattttttggtgtttgttacgtgtttttttgggagatgaaagtttgtgtttaaggtttattaatagggaatataatttgtttagtttgtttaataatatttatcgttttattttgtgttagttttaagatatattgtaaattttttagaaatttgtttagtttttttattagttttttgaatttttttttttagttttttatgttgagtatagtttgaggttagtggttgagattggttagtaagtatcgcgttaaggatataggttgattataagagttaatttgttatggttttatagtatcgtgtttttttttggtggttttcgaagtttatgtaagtttgtaggaagagatatttagagtgaaatacggtttgaaaagttattttaagttgtattatttatgaaatataatatttaatataagaagaaatttaatatagtatattattttgtttgtttcgtggtttttgttttttaagcgatttaaaatgattggtgggttattattttttttttaaaagtatcggttattaatgatttaaggttagggtttgtattgttgtaaggtttttaaaaagtgatatagattatattaattaggttataattatgaattttttttgttatatgtgttttatgtatgttgaattagtatgtagtttattgtgtgagagttggtatttgttataggttaggtgttgtttgagttttatagttgttattttaggtaatgttcgtaagagttttgtgtgaggggaatatttatcggtttttacgttattagtaggttgagttatgttttgtattacggagttggtgtagtagacggtagtgtttgaatttaagtttaggttgttattgtagggttgtttgattatttgaatgtataattttatgataggataagtatgtatataaaataggagataagatagttaattacggtgtagtggaagggttgttgttttattttagtttattatatttagtgataagtatggtgaatacgtgagtaatgtttttagatta

SEQ ID NO: 1433 - DNA, 6702 bp, Artificial Sequence
  chemically treated genomic DNA (Homo sapiens)
ttcggtttaggtttggtagaaggtaggtataggaaatgtttgtggaatgaatataaatttatttagttgcggtgtgatttaaaatgggggatttagaaataatttattaggttttattttatggtttttcgttattttttttatattttattttttttttatcgttagttttttatttatatttattttcggttttatttagtttaattataaatttgttaatttttttttgatttataacgtttagtttttggaagggtgagtttgagaagggagagtagaggttagattttttagaagttagggtatatgtaggggaaggataagggaaaatgtttcgggagaggtttgtttgggttgagggagtaggggtatggggaggaggttgtagcgagcgggtttttttatttgttttttgtagtagagtagggtttagagtattgttgatgttttttatagtttttaggatttttagataggttagaggatgagttttggagtttaattaattgggtttttttttgtggattttagttttttaagagttttgggggttttagttttttatttattgtgtatttatgttttaaagtcgtttatataggttttttttgcgttggtgtttttttatttttttttaggtagcggtttttgttttcgttttttagttttagagttttatagatattcgtggaagttttattgggtatagttgttcggaatcggtttgggataggaggaattggaagattatagggatggttgggcgcggtggtttatgtttgtaattttagtattttgagaggtttaggtaggtggattatttgagattaggagtttaagattagtttggttaatatggcgaaatcgtttttgttaaaaatataaaaattagttgaggtcgggcgcggtggtttacgtttgtaattttagtattttgggaggttaaggcgggcggattacgagattaggagatcgagataattttggttgatatcgtgaaattttatttttattaaaaatataaaaaattagttgtagttttagttattcgggaggttgaggtaggagaatggcgtgaattcgggaggcggagtttgtagtgagtttagatcgcgttattgtattttagtttgggcgatagagtgagattttattttaaaaaaaaaaaaaaaaaattagttgggcgtgatggtataggtttgtaattttagttatttgggaggttgaggtataagaattatttaaattcgggaggtagaggttgtagtgagttgagattgtattattgtattttagttcgggttatagagcgagattttattttaaaataaaataaaataaaaaaaaggattttatagggagtttttttattttttaaagggttgaggtgttttttttgagtttagggataggaggtagtgtagagagagatttttgttttttttagtttttagttttggttttacgttggaagaagggggtttgggaagaagtttgggaaagggaattcgagagaaaggagaggatatggtatagaattggggggtaaaggttaaagggttggggttttcggaggcgagtttatttaatgggttttgtgttatttttggtcgtgtgtaggtttatttttatcgtggggttgtttttggagtttaagatttttcgggtaaagattttttgtatggttatggttgtaggataggaggtgtgagtgagtgtagatagttgattttttaaggaattagaaattttttgttttttaagatttttttttattttaagaaggtaggtgttggagttaaaaatattttataaaaaggttatagattaaagaggtaggcgtagtttttttttttatttagaatagtttttattttatttttttattttaagaatttaggggttttttatttatagtttttgggatgttatcgtttattaagtttttattttttttaagtttttatttaggttttttttttttatttttttggttaagtagtttgttttttatggttggtggtttttaaattttttttggtttttatttttttgtttcgaaatttttttgggtttttaattttttattaggttttagttttagttgtttttttttatttatttttgttgttttttttatagttttttttttttagatttttcggtgtttttagagtttgttttatttgtttgttttagtcgtttttttttttagtttttttaagtatttttagttttaggaggaaaaaaagtagaaatgttttttattttttttaagttaatattatgtttattttttattatttttatttttagggttggaagatttattcgatttgggatgttttcgttggaggtttggatggagtttcgagtttaggtggtagttgggatagtgttagtttatttttttttaggttgcgtatttatttttgagttattcggtttttagttagtttcgtttttttttttttttatttttttttttttatattgggttggtagttaagtgtttattatagtttgaagtagaagtttttggttttgggtatttgtttttttattaaaggttaattattattttttattttttgttttttaataatagtttttgttttaattttattttttgggaggagtaagggaggggttatagatgaggggtttttttttattttaggattatattttttttttgtaaacgttaagaggaatgagtgatttttaggaaaggttaggggtaatttgagttttgtaaggttggggagggggtttggaagaggggttgtaagattgacgtttatatatgtttagatcgttgggcgggtttttgtttttagtgggggaaaggacgggattttttattttagaaggcgagagggttttattttttagggtttttataacggttattttcggcgtcgttttattttattttttttaggttagttagcgtcgggatgagttaggggataggaaacgaatttagataggttttttcggttggtaaggcgttcgattgataacgttgggatagtatttgtcgttcggcgtggggattgtcggttagagtttttttttttatcgattgtgggcgtttagcgtacggttttagtttattaatgaatggggttgaattaatagtgaataaaaatgaatggatcgaggacgggtggttttttgtgagtttttgtacgtttggggttttttcggcgttttatttgtagtattgcggggaggtaggtttttgttttcggtagagatttttattttgtcggttttggggttagtgcggggtttgtttcgagtttttttgtagttatattagtcgatcggcgggggatatacggcgtttcggttcgattcggaggtttttttcgtcggcgtcggggtagcgcgcgttcggtgatttattttcgtcgttttttttttatttttgtttttcgtttcgtcggttcgcgcggttttttagtttttattttaggttatttgtttcgttattcgtttagttttttttttcgtttcgtttttttattttaggtcgtttttttcgggatttttttattttggggtaggggtgcggtgggttaggggttaggagatggcgggcggggagcgtcgttacgtgttcgggtgcggtttcgttcgagttcgttagtgatttagtcgcgcggttgtcgaggaatacggattcgaggggcgtcggggattgtgggattcggcgtggacgttagggatgcgcgtcgcgttcgggaggagagagaaaattaatttttttttcgttcgggtcgcgttcggtgattttttgtttttagtttaggtttcggaagtcgtttagttttcggcggcgggtcggaggaggcggttttatcgcggtcgtcgtacggtcgtttcgttcgtttcgttttttttaggtggttgtgagcgtatatttgattgcgaagaaatttaaagggttcgaagtgggatttttttttttttgaaaaagttgttatttttgtaatttgagtattttttcgtttcgaaaaatagtttcgtttgttaagtttcgcgggtgttcgcgttttgtgatttttgtagatataggttaaggggtacggtcggtgatttagatattgtttgtttggggcgggcggggttgggatgtggggtgaggttttgggttagagtcgatttagagaagggataattttttagattgagaatgggttttggtgaatttaatttgtacgattcgagaagacgttggggatagaagtggtttcggtgggtgtttttagttatgagagcgattagaggatttggttaaatttttttttgtttttttattatttgaataagtaaaattaagggtggtgaggcggtagcgcgtacggtttcgttttcgtttttttcgttaggcgggagatacgtttttagttcgtttttttttttcgtagggtttatacgggtcgggtcgggcgcgttttcgtgtagtcggtttcggtttcgatcgttttatgtattttcggtttcggcgtaggcgtaggcgcgggtatacgcgtcgtcgttcgtcggttttttttttcggcggaggtgggggaaggaggagttatttcgtttaattttgggtttttcgaattttttttaatttgttaaatttgtagtttgttaattttttttgtttttttttttttttttttttttggtttattttttgtttcgatattaaagtttggtttatatttagtgtaaattggagtaaattttattttttatttttttttcgttattttttatttttttgtattgttttttatcgaattttgtaaattttgtaatagggggagggatttttaaaattgtatttgtaaagttcggtgtttgggttggcgagtgggggagggagggaatggggagtaggtttcgtttttatcgttttttgtaaataaaaatttagcggggcggggggggggaggagtaggaagtggcggtgcgagggttgttgtatagcgagcggagtcgcggttcggacggtagcgcgtgtttcgagtttttcgttttttttcgttcgttagtcgaggtagttcgagtttagttcgcggttttagtagtagcgtcgagagtagttttagtagtagcgttatggtcgggtggaacgtttatatcgataattttatggcggacgggatttgttaggacgcggttatcgtgggttataaggattcgtttttcgtttgggtcgtcgttttcgggaaaacgttcgttaatattacggtattgcgaggtttgcgcggttcggggtattgtttcggtttggattttgagggagggatttgggtgggggcgggcgcggtttagggcgcgtagcgagaggttttgattgggtgtttgttttggaagcggcgcgaatggcggttgtacgtgagtgggttttttagttgttcgtaggttttatgttttaggcggcggcgtttatttcgttcgttatttcgtttttcgcgacggggcgttatattcggggtatagggcggggaggggcgcggcgttcggtgcggcggtttattttcgttttttttagggcggggcggggacgcgttttagtttttattggggattgggattgagaggggattcggggatttttggatttttagtttttcgttcggttgttagttcgcgtttttttattattgttttttttggtgcggaagggagttttaggcgcgtggttttggttttttgtttattttttgtgggtttttggttttttttaatttcgttagagagggcgaggttattatacgtttttttagtttagtacgttggatttaatatttttgcgaggttaatttcggaagttttttcgtttttttttttcgttattcggcggggtttggagtaggggaattttgtgagaagttttgagatagtataagcgaaagtatattggtttattatcgttgtttttattattatttttttgtttatattgttcggaagtggggagggggagcggaagtttaaaaggggggggaagggggttttcgggcgggaggggatcggatgtgggggtttggggtgaaagggggaggggggaaaggttttcggggtatttagattcgagagttggtttgtcgggtttggtttttgtttatttttaaaagttttttaattttttcggaaagtttttaggggtttgtttttttattttagagtagagatatttggagttaaattttaggttatttggagatttaggcgttcgggttttaatagtttttgtagaatttttgattaaataagggtaaagttgttttttttgtttcgttcgttttttttttttttttttttcgtttttgttttttttgaaggagagttttgagtatttaaaggttttttatttattttattgattttttttattttttgggtttattttttttattaatattgatatttaaatttttagaggagtatgttatttttttttttttggttttatattttaagttttagaattatgatttttttttgtattaacgttttatagtttttagagttttttatagtttattgatgtgtattgagtatataatttatatttagtttttacggcggggtggtttttagaagtggaagataggtgggtttttggagaatacggtgggaattttggtgtattgattaatttgatgggcgtttggttttttttttagt

SEQ ID NO: 1434 - DNA, 6702 bp, Artificial Sequence
  chemically treated genomic DNA (Homo sapiens)
gttggaagaggaattaagcgtttattaagttagttagtgtattaagatttttatcgtgttttttaaagatttatttgttttttatttttgagaattatttcgtcgtgggggttaagtataaattatatatttagtatatattaatgaattgtgagaaattttgaggattgtgggacgttagtgtagaaaaagattatgattttgaaatttagaatatggaattagggaggaagggatgatatatttttttagagatttagatgttagtgttaatggggaaagtaaatttaggaaataaagggagttagtgaggtaagtgaggagtttttggatgtttagaatttttttttaggaaaagtagaagcggagaggggaagggaggggggcgggcgaggtaagagaagtaattttgtttttatttggttaaaggttttgtaggagttgttagggttcggacgtttgggtttttaagtaatttagagtttagttttaggtatttttgttttgagatgaggaagtagatttttgggggtttttcgggaaagttggaaaatttttgaaggtggataggggttagattcggtaggttagttttcgggtttaggtatttcgggaatttttttttttttttttttttattttaagtttttatattcggttttttttcgttcggaaatttttttttttttttttttgaattttcgttttttttttttattttcgggtagtgtggatagggagatggtggtgggagtagcggtagtaaattaatatattttcgtttatgttgttttagaattttttataaagtttttttgttttaggtttcgtcggatggcgggaagggagggcgaggggattttcgggattggtttcgtaggaatgttgaatttaacgtgttgagttgggggggcgtgtggtggtttcgttttttttaacggagttaggaggggttagaagtttatagagggtgggtaagggattaagattacgcgtttggggttttttttcgtattaggagaaataatggtagagggacgcgggttggtagtcggacggggagttgggggtttaaggattttcgggtttttttttaattttaatttttagtaaaaattgaggcgcgttttcgtttcgttttgggagaggcggaagtgggtcgtcgtatcgggcgtcgcgttttttttcgttttgtgtttcggatgtaacgtttcgtcgcggaaagcggggtagcgggcgggatgggcgtcgtcgtttggggtataggatttacgggtaattgagggatttatttacgtgtagtcgttattcgcgtcgtttttagggtaagtatttagttagggtttttcgttgcgcgttttagatcgcgttcgtttttatttaagttttttttttagggtttaaatcggagtagtgtttcggatcgcgtaggtttcgtagtatcgtgatgttgacgaacgttttttcggggacggcggtttagacggagggcgagtttttgtagtttacgatggtcgcgttttgataggtttcgttcgttatgaggttgtcgatgtaggcgttttattcggttatggcgttgttattggggttgttttcggcgttgttgttggggtcgcggattgggttcgagttgtttcggttggcgggcggggggaggcggagagttcggggtacgcgttgtcgttcggatcgcggtttcgttcgttgtgtagtagttttcgtatcgttattttttgttttttttttttttcgtttcgttagatttttatttgtaaaggacggtaggggcggggtttattttttatttttttttttttttattcgttagtttagatatcgaattttgtaaatgtaattttaaaaatttttttttttattgtaaaatttgtagagttcgatggaaagtaatgtagaaggatggggggtggcgggagagaggtgaagggtagggtttgttttaatttgtattgaatataaattagattttggtatcggggtagggagtgagttagaagaaggaaggaaggagaaagtaggaggaattagtaagttgtaaatttagtaaattaaggagagttcggggagtttagggttaaacgggatgattttttttttttttattttcgtcgaagggaaggatcggcgggcggcggcgcgtgtgttcgcgtttgcgtttgcgtcggggtcgggagtgtatggggcggtcggggtcggagtcggttgtacgggagcgcgttcggttcgattcgtgtggattttgcgggaaaggaaggcgggttggggacgtgtttttcgtttggcggaaggggcgggggcgaagtcgtgcgcgttgtcgttttattatttttgattttatttatttaagtaataagaaagtaaagaagagtttggttaaattttttagtcgtttttatagttgaaggtatttatcggggttatttttgtttttagcgttttttcgggtcgtgtaggttgggtttattagggtttatttttagtttagaggattgttttttttttggatcggttttagtttagggttttattttatattttagtttcgttcgttttaggtaggtaatgtttggattatcggtcgtgttttttggtttgtgtttgtagaggttatagagcgcggatattcgcggggtttaataggcggggttatttttcgaggcggaagaatatttaagttgtaagagtggtaatttttttaagaaggggaaagttttatttcgggttttttgggttttttcgtagttagatgtgcgtttatagttatttggggagggcgggacgggcgggacggtcgtgcggcggtcgcggtgaaatcgtttttttcgattcgtcgtcgagggttgggcggttttcggagtttgggttaggggtaaggggttatcgagcgcggttcgggcggaaagggggttggtttttttttttttttcgagcgcggcgcgtatttttggcgtttacgtcgaattttatagttttcgacgtttttcgagttcgtgtttttcgatagtcgcgcggttgagttattggcgggttcgggcggggtcgtattcgggtacgtggcggcgtttttcgttcgttattttttgatttttggtttatcgtatttttattttagggtggaaaaatttcgggaggagcggtttgagatgagggggcggggcgagaggggagattggacgggtggcggggtaggtggtttggggtgggggttgggaggtcgcgcgggtcggcggggcggggagtaggggtggggagagggcggcgggggtgagttatcgggcgcgcgttgtttcggcgtcgacgggaagggttttcgagtcgggtcgaggcgtcgtgtgtttttcgtcggtcggttggtatggttgtagaggagttcggggtagatttcgtattggttttagagtcggtaaagtggagatttttatcgagggtagagatttattttttcgtagtgttataagtggggcgtcggaagagttttaggcgtgtagaagtttataaaaggttattcgttttcggtttatttatttttgtttattgttgatttagttttatttattgatgggttggggtcgtgcgttgagcgtttatagtcgatggggaaaggggttttgatcgatagtttttacgtcgggcgataagtgttgttttagcgttattagtcgggcgttttgttagtcgaaagggtttgtttaaattcgttttttgttttttaatttatttcggcgttggttggtttggagagggtaggatggggcggcgtcgagaatggtcgttatgaggattttaagaggtgagattttttcgttttttggggtggggggtttcgtttttttttttattgaggatagaggttcgtttagcgatttgagtatgtgtggacgttaattttgtagttttttttttaggttttttttttagttttgtagggtttaggttatttttggttttttttaaaggttatttattttttttgacgtttgtaaaaggggaatgtaattttggggtggggggagattttttatttgtagttttttttttgttttttttaaagggtggaattagaatagggattgttattgggagatagaaagtgggggatagtagttgatttttggtaagggggtaggtgtttagggttagaggtttttgttttaggttgtagtgggtatttggttgttagtttagtgtgaaggggggaggatggagagaaagagaggcggggttggttggggatcgagtggtttagggataaatgcgtagtttgagagggggtgagttgatattgttttagttgttatttagattcggagttttatttaaatttttagcgaagatattttaggtcgggtgaattttttagttttgggggtggaggtagtaaagggtgagtatggtattggtttggaggaagtgggggatatttttgttttttttttttttgggattggagatgtttgaaaaagttgggggaaggggcggttggagtaagtagatgggataaattttgggaatatcgaaggatttagggaaaggaggttgtgaggagggtagtagggatggatagaaaagggtagttagagttggaatttgatagggaattgggggtttaaggagatttcggagtaggaaaatgagaattagaaaggatttgaaggttattagttatggagaatagattgtttgattagaggggtggaaggagaaggtttaagtggaggtttgggggaggtgggggtttggtgagcggtggtattttaggagttatagataagaggtttttggatttttaggatgggagggtggaataagagttgttttgagtgggggagggggttgcgtttgtttttttggtttgtgatttttttgtagggtatttttagttttagtatttgtttttttggagtggggaagaattttaaagggtaagggatttttggttttttaagagattaattgtttatatttatttatattttttgttttgtagttatggttatgtagaaaatttttgttcgggaaattttggattttaggggtaattttacggtggaggtggatttgtatacggttaagggtaatataaggtttattggataggttcgttttcgaagattttaattttttggtttttgttttttagttttgtgttatatttttttttttttttcgggtttttttttttagatttttttttaagttttttttttttaacgtggaattagagttggaagttaggagaagtaggagtttttttttgtattgttttttgtttttgagtttagagaggatattttagttttttgagaggtagagagattttttgtgaggtttttttttttgttttgttttgttttgagatggagtttcgttttgtggttcgggttggagtgtagtggtgtaattttagtttattgtaatttttgtttttcgggtttaagtgatttttgtgttttagttttttaagtagttgggattataggtttgtgttattacgtttagttaattttttttttttttttttgagatggagttttattttgtcgtttaggttggagtgtagtggcgcgatttaggtttattgtaagtttcgtttttcgggtttacgttatttttttgttttagtttttcgagtagttgggattatagttaattttttgtatttttagtagagatggggttttacggtgttagttaggattgtttcgattttttgatttcgtgattcgttcgttttggttttttaaagtgttgggattataggcgtgagttatcgcgttcggttttagttaatttttgtatttttagtagagacggtttcgttatgttagttaggttggttttgaatttttgattttaagtgatttatttgtttaggttttttaaagtgttgggattataggtatgggttatcgcgtttagttatttttgtgattttttaattttttttgttttaggtcgatttcgagtagttgtgtttagtggggtttttacgggtatttatgaggttttggaattaagagacggagataaaggtcgttatttggggaaaggtgaggagatattagcgtagaaggagtttgtgtgggcggttttaggatatgggtgtataatgggtagaggattggaatttttaaggtttttgaggagttggggtttatagaaaggggtttagttgattgagttttaaaatttattttttggtttgtttaggagttttgaaggttgtggagaatattaataatattttgggttttgttttgttgtaaaaggtaagtggggaagttcgttcgttgtagttttttttttatgtttttgtttttttagtttagataggtttttttcgaaatatttttttttattttttttttgtatgtgttttgatttttgagaaatttgatttttgttttttttttttaaatttatttttttagaaattaagcgttgtggattaagaaaaagttgataaatttatgattgagttagatgggatcgagaataagtgtgagtgaagggttagcggtggggaagggatgaggtgtgggagagatggcgagaggttatggggtgaggtttgatgggttatttttgggttttttattttgggttatatcgtagttggatggatttgtgtttattttataggtattttttatgtttgttttttgttaggtttgggtcggg

SEQ ID NO: 1435 - DNA, 13377 bp, Artificial Sequence
  chemically treated genomic DNA (Homo sapiens)
agagaggggattttattatgttagttaggatggtttcgattttttgatttcgtgattcgttcgttttggtatttttaagtgttgggattataggtgtgagttattgtatagggtttttttttttttttttttaaatgggttaggtatgatggtttgtgttagttatttgggagattaagatgggaggattatttgaatttaggattaaggttgtagtgaattatgattgcgttattgtattttaatttggaatatagagtaagattttgatttaaaaagtaatatataaataaaagaaagaaagtaaaaagaaaattaaatgttatgtggaattttagattagattttggattagaaagagggtaggaatggggaaacgggggaaatttaaataaggtttatagaatatttaatagtattatattagggtttatgaatgtatttggttaatagaaaaaaaaagtaatttattagggttaattttttgggtttggtaattatattatggttatttatataagatgttgatattggggatgttggatggaaagtatgtgggaattttttgtattatgtttataattttaagtttagaattttgttaaaataaaaattaaaaagtataaatttttgaatttgagaaaaataaattttaggtttaatatgtttttaataggtttagttgaattaatggtataagtataaaagatatatataatatttaagggaaaaaattataaaattaaggtaatagttgaaattgtatttaaaaatttatgtagatagtcgttaaagatttaaggtttttagattatttgttttttgagttaaggtaataaatttaggggttagaatatatagggaaaatttagatacgaggtttaattttatattttttgtaagagattttattattagtattttttaaaaggtggttttttgatttttgtttgagtgattttgagaatggagggtttattattgtatttttttgggtgatttttagtttgtaagtttaagtgttattgatagtagtgagaaattggaaataatttaaatgaatagagttaggtaattttagttattaagatgatagagtattgcgtggttattgaaagtgataaaaatgtggtttattttaatgtatagaaatgtgtatatgtagtaatttaaagtgataagggtaaaatagaagttgtttttatataacgattatagttatgtttaaattttagtgtgtataataagagttggaagataatttagaaggttataaatagttgtaattttgagttgttttgattttttataaagtgatttatgtatagaattttaaatgaaatttagtaggtagaattttatttatttatttatttatttatttttgagattgagttttattttgttgtttaagttggtgtgtagtggtatgatttcggtttattgtaatttttgttttttgcgggtttaagtgattttcgtgttttagtttttcgagtagttgggattgtaggtgtttatcgttatgtttggataatttttgtatttttaatagagatagggttttattatattggttaggttggttttaaatttttgaatttaaatgattcgttcgttttggttttttaaagttttgggattataggtatgagttattatgtttagtttagtatgtagaattaaaaaaaaaaattttttattaagggatttggagattgttatgttaagatttattgagtatgtttttatggaatattagttagggaaggattttaaggttatgtttgagttttgtgggaaagtgatatgattgattagtgatgtttgttaatgatgatgaatgagtagtggtagtgtgtatgttatgtagttgttattttttttaaagatatttttatttttattgttattttgttatttttgtagattttttgaaagatgagtttgtgatatcgaaggtattatgtgtaggaagaaattttttttagttaaaagttataggattttgggtaagttattgggatataagatggtatgaaataaatatttgaagggaataaaagtaaaattttttataataatagttagtttgagaataggtgggtttaatagagaagattttgtggtattcgtgttgggttttgaaggatgaggagattttataggtgattatgttcgggaagggtattttatatggagggtatagtatggataaaggtatggaggtgaggaaataagaggttttttggggagaaaggaaagtgtaggttagttgtagaagatgattttggaaacgtaggaaatggagaatgttttgaatgttaagataataagtttgagttttatttagttagtagtgggtttttgatgagttttgatgtaagtgatgtttaaaggaaatgagattagaaggcgataagaaaaagtttgggtattattattatgaggggatttgaggatttagaatttgataaaattttttgggggtgtaggttagtaattagagttttgggataacggggtgtgggagttataattaagttttagtaagataattttttgagttttatttattgtttagagattttttgagttttgagttaggtatagggatgtaaaagttatgggttttgttttttgggagtttttagttatgtgggtttttttagatatggggggtagtagatagggtagattataggtaggagaggatttgggatttgatcgagttgttagaagattaattgagtaggtaggggttgtaggttttagggtttggtagttaagttgggatgttttagtttgatgtagtcgattagggattttcggaagggatttgttgtgattttttgggtgtttgcggaaggttagtttggtagtagttagatttttggagttttattagataagaaaagggtttttgaagtttttgttggggaatttggaggttttatatgatttaggggattttatgaattttgttatattaaaggatttggtaagattttaatgatttgggttaggcgcgtggtttatgtttgtaattttaatattttgggaggttgaggttggcggataacgaggttaagagattgagattattttggttaatatggtgaaaatttgtttttattataaatataagaaaattagttgggcgtggtggtacgtatttgtagttttagttatttgcgaggttgaggtaagagaattgtttgaattttgaaggtggaggttgtattgagttaagatcgtgttattgtattatatattggtgatatagtaagattttattttaaaaaaaaaaaaaagattttaatgattttataattttatttatttgttttttaaatatagggggattttttttaatttagggaaggtattttttattttgttttttattttatagtttaatgtatttttggggattatagggaggaatggaagttaagttggtttgagatattattaggtagggatttttttttttgtgttaggtttagttgatttttagttttttttttttttttttattataaggtttggggaagttttagggttttggttgggtagtgggtagtagtggttagagtggaaaattttttattagttggatgatattagtgtttatagatttggttttggttttttgtttggggtttgaggatttgataaatttgtttggagttttgagtgtggggtacgaggtcgtagagaggttattggtacggggattttttttttatttattttaaaatggagagttgttttgggttaggtgagtaggtattgggttagttttaggttattttaggtaatgggaagttggtagttgggaagtggggtgggagttgggggaggtgggggagggggtgtcgagatgagggatagaggaattaataaattagatttgggggttgtataagggtttgggagtgggttatgggagatataggtattttaggagaattgaagatagaagtagggacgtagcggggtagaagagagaacgaggaatagtagtagggcgtaggtttgtttttttttatatgtttttgttttaggtttttgatttaggtcggtataagaggtataattagaagttggtgtggtttattttgtgagtgtgttttgagtatttgttgaattatgataagtatttttttaaatgttttgtttgattttgaaagtttttgaagttgtttaaatagttgtgattttagttattgttattttagttttattattagtattagaattttcgatattgttattagtattatttttattattattattattgtaattagtattttagttattagttattgattttttgattttttgatatttttatttttttttttgagggtttgagggtgttaggagttaggagtggagttaaagttttaagtatataatttagagataagtagtttttaatgattttgtttatttagaagatatttagtagtgtttggagatatatttggttggtataatgggtggattgtttttggtatcgagtcggtagatgttaggaatgttgttaaatattttatagtatataggatggggtttataataaagaattatttgttttaaaatgtcgatagtattgaggttgcgaaattttggttatagattttatttattttagtattttgtttttatttttttttggttttcgtttttaaatgtatatattatgtttttggtttgggaataagacgtaatttttattattttattttacggtaatttttttttttatcgtttgtattttttggttttcgatgtttgaattaaaaagttaataagatgaaagtttgttgcggttatttttaagaaggaaaaatatatagaaacgatatacgaagtatagggtatattttgggttgaggttatggttgtttagggtagggaggtagcgattagattaattttgggcgtataaaagaggaaagagtgtttaggtttttattttattgcgattgtagaatttagagttgttttttttttgtggttagttggggattagtattatgaagtggatggtggtggttttggtttgtttttagtttttggaggtagtagtggttaagtgagtttgggatttggttgttggtgtagggagtttggatgggagtttaaagttttgtaaagggtaattgggttaggggatattttgtttgtttttattttgggatttttgttaggggaagggaagtttttttttgttgatgttagataggatatatgggtggaaggagatatagtttttgtttttaggaaattttttattaaagggaaaagtacgatttttttttttatttgatgaggaaagatggatttgaaatagaggtggtaagggtgattattgtttaagtagtttttgaatggtaggtgtggattttttttatagaagggagtaattttttttggataagggatattttatttattattttttttaaaagttgttttaaggttgaaaatttattggtagatgttaaaattatttaagtagaaatattagtaaatgtaaatttttatatttgaggggttaggagaaaattttggagtagatggtatggtttataggttattaggaaggcgtttagtttgttattttgtttgttatttttttatttaagagtattttttgaggttaagagttggttttttttagaaatttttattaatatgtatatttggtagaggtggttaattagtttttatagtttagggtgaaggggtttagtagagaatttttggagaatgtagagtttttagggaatggggattaagtagaattttggagtttagagtaaggttagagtggatttttagagatttttaagtaatggtagtaagtaagtttgggaaggagagtgtcgagggtgtgattgagtttataggatgggatagaaacggtgatttataagttttaattttagagttgatttgtgttttagattatttaggttaatttttcgtggttttggtgttttgagaggagtagtgatggggtttaggttatgcgattagtagttgggatagaattaggattttgtgttttgagttttagttagtgttgttgtcgttgttttatgttttgttatatttagttggtgttaggtgtttgagggttgtcgtagaaaggaattttggggtgaattttgttatttttgaaattttttttgtttttttttttgaaatagagtttcgtttttgttgtttaggttggagtgtaatggtacgattttaatttattgtaattttttgttttttaagtttaagcgattttttcgttttagtttttggagtagttgggattataggtatgtattattacgtttagttaattttgtatttttagtagagacggggtttttttatgttggttaggttggttttaaattttcgattttacgtgatttgttcgtttggattttttaaagtgttgggattgtaggtatgaattattgcggttcgttagtattagtttttaaaaaataattgtttttttttttattaattttttttttggttttttatatatttataattaatgaacgatttattgatagttagagtttgattttgaatattgttataatttaggaagaattttataattattatgtttttattttttttttttatgtttatttttattaattgaaattagatttttttttttttttttgagttgaagtttttgttatttaggtttgagtgtagtggcgtgatttaagtttattgtaatttttgttttttgggtttatgtgatttttttgttttagttttttgagtagttgagattataggtatatgttattacgttatttatttttgaatattagtatttgattattggtgataaatgagtgatagtatattttataagggttttggtatatttagtatgttaggttttgttgattgtggttaagagttgttgtataagtggatattttagtttttgggttagagagttaagaatatattttgttagagttttcgaattttttttagagaatttagtttttttagggggtttttgaattgtattatgatttataggttattttttatttattttttatttagagataatggtattgatagggaaaatgggaaaatgtagtagtttgtgaggatattgtttatttagtaatttttttttttatttattgttttttagtaaaggatttttgaatagtttttttaattttattttttttagtttttgttttttattttttttttttttttgagacggagttttattttgtcgtttaggttggagtgtagtggcgtaattttggtttattggaagtttcgttttttaggtttacgttatttttttgttttagtttttttagtagttgggattataggtgttcgttattatgtttagttaattttttgtattttttagtagaaatggggttttattatgttagttaggatggttttaatttgttgattttatgattttttcgtttcggttttttaaagtgttgggattataggtgtgagttattacgttcggttttttttttgtttttgttttgatttttagtttgatttttaaattttttttttaattatatattgatattagattatgtttttttatattttttggaaatgttggtagaaaatgaaatttatttttaatatttattatttgtaaatgtgtatttattgtgtttttttaagtagtttatgtaggttttgtggtagatgtaattttaggtatatttagtaagttaaagggttaaaatatttagtattgtcgtatatggtagtgagtagaattatagatgttgatgatattacgtaattagtatttttttatgtaaatgaaggttgttagtatgttattatagtgtttattttttgaagttggaatttatgttatttggttttattaagattaagtaggattattttacggtttttagttaataattgaggagaaattaatatgatgagagagcgagaagaaatggaattttttttaaagtagatttattttttttttttttttttattttgttttttttgatttttttttaatttttagaaattttatttttgatgatgtagttatatagttaagatttgttgagaaatttgttatttgagaataattgaaatattttaattaaaaggtattatatttttaagttatagattttttgaaatatttagaattttaatgttgttattttttatatggagagttttttaaaaaattatatgataaatttagaagttttttattagaataaaagataaatgttgaaaagatttaattatttttttatttaatatttagtgatatttatagaatgtttttaaatattgattatggtttttagttttagttgatttagatttttaaaataaaattattatggtaattaaaaaggtaaaagttgatattttgttaggtttattttttttatatgtagatcgattaagggtgtgtaggatatttatttaaagttgttgatttatttaaaatttgttgatgtagaagtatttagatatattatgtttttttttaattatttgtaagtttattagttttgggtattaggtgtttgttatattggatgatgtatattttaagtggaaatgttagaatgatggtttttgagaatacgaagggaaatttgtatatattagaaaaatataaaatagaatttttttttttgttaaatgggtgttaggttttattttgaaataaagtggttagagtatgtgtgagaggtgatttaaatatatttttttttttgattcgagtatatttgaggtggtattttttttattttttattttgtttgttggttaaggtgatttttattttttgtgttatttttaggagatttttattttatgattatatatgttttttttttagagaagttggtttgtttagtttaaattagtatggtgaggtgtaaagtagttttgtgttttttttgaatggatttattttgtttatatggtaggttagtgagtcgttatgataaatttgtaatgggaaaagggttgtgtaggagaggatgtgcgtgattagtagatttatagattagaaaatgaaattagaagaaagaatttttaaagtgttttttttatttgatagttttttatggagaggatgtggaatggttttttagtgttttttttttttggtttttggttgttttagtatatttttttttagtagaggagttgattttgcgaggtattagtgttttgggtgtggtgttgttatatttatttatagaaataattttttttttgtaggatttgaagttttgttgtattttatatgataagattttggtagtaattaaatttttgaagatatattaaggttaaaatggggatttgttaggtattaggttttgagttgtaagaggaggttatttagatgtgatttagttagtattgaatttttcgaaggaaaggatataaaaagtaaagtagagtaagttaaagatagtgttttggtgtgtttaagtttatgttgttttaatataatattataattattagttatatgtgatttaaaattaattaaaattaaaagtgtagttttttagttttattagtatattttaagtgtttagtagttacgtgtgattagttattatagtattggatagtattgtaatatatttagatagagaatattattaataataatgtgtaataataatgaattttttatttgtatatattttttatagttttaatatattagtgatatatatgattgatgatatatagagaatatatatagatagaaaatattgatattttttttattgatatatagagaatatattattgtagaaagttttgttggatagtgttagtttaagtggaagaatttgagaaataaaattttttttttgatttttatgaagagttttttatttttatataatttattggattaatgtattaaagttttttttgagacggagattagtcgttgggtttagtcgttattttaagattattggtaatttttattgttatttaagtatttttaatgatgatatgttgaattttcgtataaatgggggttaattaatgaagggagaaattatgatttgtaaataatttttagaagttttgtttaggattaggattgataagatatagtagaagtatgaatggtattttatgttttaggagaaaatatagggaaatatatatatagattttttagtatagagtgagataatttgttaaagatgttagggtaagagttataattttattaagggtttaatttgtattaggtttaatgataagtgttttgtatgttttatttttttaatttatagttttcgaaattagtataaatatttatatttattttatatgaggatgtataaaggtataaggatgtttggtattattaattttttttttttttaaaattttttaaaaattatttttaaaaaattttttttaaagagaatataatgtaaaaggaagaagagtttatgagaaaataaattagattttattttagattttgatattttttagttagagaatataattttttattgggaataaaagagttttaagttaatatatattttttaattatgatattgtatgatgttgttattttttttttaaaatgataataaaaatattatgtggataatagttttattatttatagtgtttttaatgtttattatatgaatttatttatttatttgtaaataatttttagttttagtttttttagttataatatgatattaatgaaaaatatttgtttttggaatatggaaattggatttaaattaaaggaattattgcgtgtggaagggttgtatatttaaggatattatattattttattttttattataaatttaggatatattttatattttatattttaatagtttattttttgttttattttttaaataaaaataattgtttgtaataaaagtattttggaatttgttttttttaaaataataataaaaaaaaaataaaagtttaaattttaaattagtttttttgaataattaaaattaatttttttattttatttgaatttattatttaaaaattttttataatgaattaatttgtttttatatttaagttaataaaattacggttgaagtaatatttacgtattatgtaaagtgaggttacgggtaaataaattattttaaaatgatgttgtaattatatttttatgaggtttatggttaggtaagttattttgggttttttattaatttatttgtgttaaataaaattaatattttaaagtaaaataatttaaataaaatttatatttggaaattaatatttaagaatagtagtatgaaattatagtttaattattttaattaagtaaaggtaagtataggtatataggatattaacgatagattattattattgttgtgaattatagatgttaattattaaagggaataaaaaaatttaagattatataagtttttatatgttagtgtgaggtatgatagtaaaaagttaattttaaatacgtgttatgtgtaagagtttttagtgatttggaagtggttgttgtatttaataattttgatgtttagatagaaaaaataaataaaatgttaaggataataaaaatgattaacgatatgatttttaatagatattttttttttaataggtttaatatatatatattatttaaattttataatagttttaagaggtaatattattatttttatttgataaatgaagaaattgagttttagaaaagtaatatttttaacgttttatagttggtatttggtagaatttaaatttatatttaagtattttgttattagtgtttgagtttttagtaattgttttagagtagattaaattgaaagaaaagattgatttttataaaattaatatattatgaaaaatttggagtattatttatattttataaaaattatggtttttatttttaattttttatttttattttttttttaaaaagggtaggtaatatattttagtttttgtatgtgtattttattagtataataagttggtaaatataaggtaaatgtttaataatatattaaagcgaaaaaggtttttatgaatattaagtgtattatcgttagtatttatttatttcgagtatggtttgaagtaaagcgggtttaattattttagaataattgtttatttatagtgattttttttttaaaagatcgaatatcgttttttttagttttttgtgtaaggtacgagtattttttgggttgggcgtagcggtttacgtttgtaattttagtattttaggaggttaaggcgggcggattatttgaggtcgggagtttgagattagtttgattaatatagagaaattttatttttattaaaaatataaaattagttgggtatggtggtttttgtttgtaattttagttatttaggaggttgaggtagaagaatagtttgaattcgggaggtggaagttgaggtgagtcgagattaagttattgtattttagtttgggtaataagagcgaaattttgttttaaaaaaaaaaaaaaaaattatatattttgggttaggtgcggtggtttatatttgtaatgttagtattttgggaggtttaggtaggcgagttacgaggttaggagattaagattagtttggttaatatagtgaaattttgtttttgttaaagatataaaaaattagttaggtatggtgataggcgtttgtaattttagttattcgggaggttgaggtaggagaattttttgaatttaggaggtagaggttgtagtgagcggagattgtgttattgtattttagtttgggtgataaaagtgaaattgcgttttaaaaaaaaaaaagtatatattttgaaaagggtaaagtttaaagttttttttttttttttggggaggaatttatgggatatttgatagtaaagggttagggagataggaggatttttgagatgaggtgaggagtgtatgtatggtgaaatgaatggttttttgaattttagagtaagtgttgagaagagttttgtaagaaagaggggaagaggtaaagggaggaagaaatacgcgcgcgcgtatatatatatatatatatagagagatagatagatagagatagagagtaaaaggttgagagagagaaaaagatatatatagataagggggaataaatagagtggtagggaggttgaagtatgtagttaagagaaggagagagagaaagagaggagtgggaagagaggaaggagggagggttttgttttatatgtaatttttttgtaga

SEQ ID NO: 1436 - DNA, 13377 bp, Artificial Sequence
  chemically treated genomic DNA (Homo sapiens)
tttatagaaaggttgtatatgaggtaaggtttttttttttttttttttttttattttttttttttttttttttttttttttaattgtatgttttaatttttttgttattttgtttgtttttttttgtttgtgtgtgttttttttttttttttagttttttgttttttgtttttgtttgtttgtttttttgtgtgtgtgtgtgtgtgtgcgcgcgcgcgtgtttttttttttttttgttttttttttttttttttataaagttttttttagtatttgttttaagatttagaaaattatttattttattatgtatgtattttttattttattttaagggtttttttatttttttggttttttgttgttaaatattttatagatttttttttaggaaaggaagagggattttaggttttattttttttaggatatgtatttttttttttttgagacgtagttttatttttgttatttaggttagagtgtaatggtataattttcgtttattgtaatttttattttttgggtttagaaaatttttttgttttagtttttcgagtagttggaattataggcgtttgttattatgtttggttaattttttgtatttttagtagagatagggttttattatgttggttaggttggttttgattttttgatttcgtgattcgtttgtttaggttttttaaagtgttggtattataggtgtgagttatcgtatttggtttaggatatgtagtttttttttttttttttgagatagagtttcgtttttgttgtttaggttggagtgtaatggtttgatttcggtttattttaatttttatttttcgagtttaagttatttttttgttttagttttttgagtagttgggattataggtaagggttattatgtttagttaattttgtatttttagtagagatagggtttttttatgttggttaggttggttttaaattttcgattttaaatgattcgttcgttttggttttttaaagtgttaggattataggcgtgagtcgttgcgtttagtttaggaaatgttcgtgttttatataagagattaggaggagcgatgttcggttttttgagagaaaaattattgtgagtgagtaattattttagaatggttgggttcgttttgttttagattatgttcggaatgaatagatattaacggtgatatatttaatgtttatggaaatttttttcgttttaatatattattgaatatttattttgtgtttgttaatttgttgtgttagtgaaatatatatataaaaattgagatgtattgtttgttttttttggagaagagatgaaggtggaaagttggaggtgaaaattataatttttataagatatgggtaatgttttagattttttataatatgttaattttatagaagttaatttttttttttaatttagtttattttaggatagttattaaagatttaggtattgataatagaatgtttggatataagtttggattttgttaaatattagttgtaagacgttgggaatattatttttttgagatttagtttttttatttattaaatagaggtaataatgttattttttaaagttgttgtgagatttagataatgtatatatgttaagtttgttaaaggaagagtgtttattaagaattatgtcgttaattatttttattatttttagtattttgtttattttttttatttaaatattaagattgttgagtgtagtaattatttttaaattattggaaatttttatatatagtacgtgtttggagttgattttttattattatgttttatattaatatgtgaaaatttgtataattttgaatttttttattttttttaatgattaatatttgtaatttatagtaatggtaataatttgtcgttggtgttttgtatgtttgtatttatttttatttggttgaaataattaaattgtagttttatattattatttttaaatgttaatttttaagtgtaaattttatttaagttattttattttaaaatgttagttttatttagtatagataagttgataaaaagtttaaaatgatttgtttaattatagattttatgaggatgtaattatagtattattttaaaatagtttgtttattcgtaattttattttatataatacgtaagtattgttttaatcgtaattttattagtttggatgtaaaggtagattaatttattgtgaaagatttttgagtgatgaatttaggtagagtaagaagattgattttagttatttaaagaaattggtttaaggtttgagtttttgttttttttttgttgttgttttgaaaaaaatagattttaaaatatttttgttatagataattatttttatttaaaaaatgggatagaaaataagttattaaaatatgaggtataaaatatattttaggtttataatggaaaataaaataatataatatttttagatatatagtttttttatacgtagtagtttttttggtttaaatttaatttttatgttttaagagtaagtattttttattaatattatgttatagttaaggaaattgaggttaagaattatttgtaaatggataaataagtttatgtaatagatattgagagtattataaataatagagttattatttatatagtatttttattattattttaaaggaaaaataataatattatatagtgttatagttgaaaagtgtgtgttaatttgaaatttttttgtttttagtaagagattgtattttttgattaggaagtgttagaatttagagtagaatttaatttgtttttttataaattttttttttttttgtattgtattttttttgagaaaaattttttgaggataatttttagagaattttggagaaaagaagagttagtaatattaggtatttttgtgtttttgtatatttttatgtaaaatggatgtaaatatttgtattaatttcgaagattgtagattaaaagaataggatatataaaatatttattattgggtttgatgtagattaagtttttaataaaattgtaatttttgttttgatatttttaatagattattttattttatattgaaaaatttatatgtatatttttttatatttttttttgaaatataaggtgttatttatgtttttattatattttgttagttttaattttaaataagatttttgaaagttgtttataagttataatttttttttttattaattggtttttatttgtacggaaatttaatatattattattaaaagtatttaaataataatgaggattattagtggttttagaatagcggttaggtttaacggttagttttcgttttaaaaaaaattttagtatattaatttagtaaattgtatagggataaaagattttttatagaaattaaagaaagaattttattttttaaatttttttatttagattaatattgtttaatagaattttttgtaatgatatattttttatatattaatgagagggatattaatattttttatttgtatatattttttatgtattattaattatatatattattgatatattgagattatagagaatatatatagatagagaatttattattattatatattattattgataatattttttatttgaatatattatagtgttgtttagtattatagtaattagttatacgtgattattgagtatttgaaatgtgttagtgagattaagggattgtatttttaattttaattaattttaagttatatgtggttagtggttatggtattatattaagatagtatagatttaaatatattaggatattatttttagtttgttttgttttgttttttgtgttttttttttcgaaagatttagtattagttaaattatatttgaatagtttttttttataatttaaaatttgatgtttggtaaatttttattttagttttgatgtgtttttaggaatttaattgttattaagattttattatatgaaatatagtagagttttaaattttataaagagagaattatttttgtaaatgaatatagtaatattatatttagaatattgatgtttcgtaaaattaatttttttgttaaaaaaaaatatgttggaataattaaaagttaaaagagaagaatattaaaaaattattttatattttttttatggagagttgttaaatgaaaagggtattttggaaatttttttttttgattttattttttgatttataaatttgttgattacgtatatttttttttgtatagttttttttttattataaatttgttatggcgatttattaatttgttatatgggtagagtaaatttatttaggaaaaatatagggttattttgtattttattatattgatttaagttaggtagattagtttttttagaggaaaaatatgtatgattatgaaatggaaattttttaagagtgatataaaagataaaagttattttaattaataaataaaatagagaataaagagaatattattttaggtatattcgggttaagaaagaagatgtgtttaagttattttttatatatattttgattattttattttagaatagggtttagtatttatttggtaaaaagaggaattttattttatatttttttgatgtgtataggttttttttcgtatttttaaaggttattattttaatatttttatttaaaatgtatattatttagtgtgataggtatttagtatttaaaattgataaatttataggtaattgggaaagaatatgatgtgtttgaatatttttatattagtaagttttaaatagattagtagttttaaataaatgttttgtatatttttggtcgatttgtatatgaggaaagtaaatttgataaaatattagtttttgtttttttaattgttatagtagttttattttaaaaatttgaattaattggagttaagaattataattaatatttaaaagtattttataaatattattaagtattaaatgaaaagataattaaatttttttaatatttattttttgttttgatgaaaaatttttagatttattatataattttttaaaaaattttttatatgagagatgataatattaggattttaaatattttaaaaaatttatagtttgaaaatatgatgttttttaattggagtattttaattatttttaaatagtaaattttttagtaggttttaattatataattatattattagaaataaaatttttgggggttgaaggggaattaagaaaaataaaatagggggaaaaaaagagggtaaatttattttagagagaattttattttttttcgtttttttattatattgatttttttttagttgttaattaaggatcgtagaataattttgtttggttttggtgagattaagtggtataaattttagttttagagagtagatattatggtaatatgttgatagtttttatttatataaaagaatattaattacgtggtattattaatatttgtgattttgtttattgttatatgcgatagtgttgggtattttaattttttaatttattaagtgtatttagaattatatttattataaaatttgtatagattgtttaaagagatatagtgaatatatatttataaataataaatgttaaaaatgaattttattttttgttagtatttttaagaagtatgggaaaatataatttaatattaatatatagttaagaaaaagatttaaaaattaagttagaaattaaaataaaaataaaaagggggtcgggcgtggtggtttatatttgtaattttagtattttgggaggtcgagacgggaggattatgaggttagtagattgagattattttggttaatatggtgaaattttatttttattaaaaaatataaaaaattagttgggtatagtggcgggtatttgtagttttagttattagggaggttgaggtaggagaatggcgtgaatttgggaggcggagtttttagtgagttaagattgcgttattgtattttagtttgggcgatagagtgagatttcgttttaaaaaaaaaaaaagagtggggggtagagattgagaagggtagggttagagaaattgtttagaagttttttgttaagggatagtgggtgggagaagagattgttgaatgggtagtgtttttataggttgttgtatttttttattttttttattagtgttattgtttttgaatagggggtggatgaggggtaatttataagttatagtgtagtttaaagattttttggagaggttgaattttttaagaagggttcggaagttttgataaaatgtgtttttagttttttgatttaagagttggaatgtttatttatgtagtagtttttggttatagttaataagatttgatatgttaggtgtgttagagtttttgtgaggtgtgttattatttatttgttattagtaattaagtgttgatatttaagaatgagtggcgtggtggtatgtgtttgtaattttagttatttaggaggttgaggtaggagaattatatgaatttaggaggtagaggttgtagtgagtttagattacgttattgtatttaagtttgggtgatagagattttaatttaaaaaaaaaaaaaggaatttgattttaattggtaaaagtgaatatgaagagagaaagtagagatataatgattatagagttttttttggattgtggtagtgtttaggattagattttagttattaatagatcgtttattaattgtgggtgtatagagaattagggaaggagttagtggaagagaaaatagttattttttaaaagttagtgttggcgggtcgtagtggtttatatttataattttagtattttgggaggtttaggcgggtagattacgtgaggtcgggagtttgagattagtttgattaatatggagaaatttcgtttttattaaaaatataaaattagttgggcgtggtggtgtatgtttgtaattttagttattttagaggttgaggcgggagaatcgtttgaatttgggaggtagagggttgtagtgagttgagatcgtgttattgtattttagtttgggtaataagagcgaaattttgttttaaaaaaaaaaataaagaagattttagagatggtaaagtttattttagagtttttttttacggtagtttttaggtatttggtattagttggatgtgatagagtatggagtaacggtaatagtattagttgggatttaggatatagagttttagttttgttttagttgttaatcgtatggtttaggttttattattgttttttttaggatattaggattacgggaagttggtttgggtggtttggagtatagattagttttggagttggaatttataaattatcgtttttgttttattttatgggtttagttatattttcggtatttttttttttagatttgtttgttgttattgtttgggagtttttaggggtttattttggttttgttttaggttttagaattttgtttaatttttattttttggggattttgtattttttagaaattttttgttaaatttttttattttgagttatgaagattaattaattatttttattaaatatgtatattgataggagtttttgagaggagttagtttttggttttaggaagtatttttgggtagagaaataataggtaggatggtaggttgggcgtttttttgatggtttgtgagttatgttatttattttagagtttttttttgattttttaggtgtagagatttatatttattggtgtttttgtttagatgattttggtatttgttagtaaatttttagttttaaagtaatttttagagaggatagtggataagatattttttatttaaaaaggattgtttttttttgtgagaagaatttatatttgttatttaagggttgtttgggtagtagttatttttattatttttgttttaggtttatttttttttattagatgggggaagggatcgtgtttttttttttgataggaagttttttgaaggtaggggttgtgtttttttttatttatgtgttttgtttaatattagtaaagggagatttttttttttttagtagaagttttagagtagagataggtagggtgttttttggtttagttgttttttgtagggttttaggtttttatttaggttttttgtattagtagttagattttagatttatttgattattgttgtttttaagagttggaggtagattaagattattattatttattttatgatgttggtttttaattggttatagaggaagagtagttttgagttttgtagtcgtagtggagtgaagatttgggtattttttttttttttatacgtttaagattagtttaatcgttgtttttttgttttgggtagttatgattttaatttagggtgtattttgtgtttcgtgtatcgtttttgtgtattttttttttttgagggtggtcgtaatagatttttattttattgattttttggtttaagtatcggaggttaggaggtgtaagcgataagagagaaagttgtcgtaagatggagtggtgaagattacgttttgtttttaaattagaggtataatgtgtgtatttagggacgagggttagaaaaaggtagaggtagagtgttgggatagataggatttatagttagggtttcgtaattttagtgttgtcgatattttggaataaatagttttttgttgtgggttttattttgtgtattatagaatgtttaatagtatttttggtatttatcgattcgatgttaggagtagtttatttattgtgttaattaaatatatttttaggtattgttaagtgttttttggatgggtaaaattattgagaattgtttgtttttaggttatgtatttgaagttttgattttatttttaatttttagtatttttaaatttttaggggaggagataggggtgttagggggttaagaggttagtagttagtagttaggatgttggttataatgatggtgatggtgagggtggtgttgatggtagtgtcgggagttttggtgttggtggtggggttgggatgataatggttgaagttatagttatttgagtagttttagaggtttttaaggttaaataggatatttggagaaatgtttgttataatttagtaaatgtttaggatatatttatagagtaagttatattagtttttggttgtgttttttgtatcgatttagattagaggtttggagtaggggtatatgaagagggataggtttgcgttttgttgttgtttttcgtttttttttttgtttcgttgcgtttttgtttttgtttttagtttttttaaagtgtttatgttttttatgatttatttttaagtttttgtgtagtttttaagtttgatttgttagtttttttattttttatttcggtatttttttttttattttttttaatttttattttattttttagttattagttttttattgtttgaggtgatttggagttggtttagtgtttgtttatttggtttaggatagttttttattttggagtgagtgggaaaaaaattttcgtgttaatagtttttttgcgatttcgtattttatatttagggttttaggtagatttgttaggtttttaggttttaggtagaaggttaggattagatttgtaaatattgatattatttagttggtgggggattttttattttagttattgttatttattgtttagttagagttttggagtttttttaagttttataatgggggaggggagggaggattagaagttagttgggtttggtatagagagggaggtttttatttgatggtgttttaagttaatttagtttttatttttttttgtggtttttagaggtatattggattatgaggtgaaagataagatagggagtgttttttttgggttgaggggagtttttttatatttgggaagtaggtaaataaaattataggattattggaattttttttttttttttgagatggagttttgttgtgttattagtatatagtgtagtggtacgattttgatttaatgtaatttttatttttagagtttaagtaatttttttgttttagtttcgtaagtagttggaattataggtgcgtgttattacgtttagttaatttttttatatttgtagtagagataggtttttattatattggttaggatggttttaattttttgatttcgttattcgttagttttagttttttaaagtgttgggattataggtatgagttacgcgtttggtttaggttattggaattttgttaaattttttaatatagtagaatttatgggattttttaagttatgtgaggtttttagattttttaataaaagttttagggattttttttttatttggtaggattttaggagtttggttgttgttaggttaatttttcgtaaatatttaagaagttataataaatttttttcgagagtttttgatcgattgtattaagttagggtattttagtttggttgttagattttggggtttatagtttttgtttatttaattgattttttgatagttcggttagattttaagtttttttttgtttgtggtttgttttgtttgttgttttttatatttgaaaaaatttatatgattagaagtttttagagagtagagtttatggtttttgtatttttgtgtttggtttagagtttaggaaatttttgaataatagatagagtttaggagattgttttgttggggtttagttatagtttttatatttcgttattttagggttttgattgttagtttatatttttaggagattttgttaaattttgggtttttaggtttttttatggtggtggtgtttaggtttttttttatcgttttttagttttattttttttaagtattatttgtattaaaatttattagaagtttattgttaattaaataaaatttaaatttgttattttggtatttaggatattttttattttttacgtttttaaaattattttttataattaatttatatttttttttttttttaggaggttttttatttttttatttttatgtttttatttatgttatgttttttatgtgaaatatttttttcgagtatagttatttgtaaaatttttttattttttaagatttagtacgaatgttataaagttttttttgttgagtttatttatttttaaattgattgttattgtggagaattttgtttttgttttttttaggtatttattttatattattttatattttagtgatttgtttaaaattttatagtttttaattgaaagaggtttttttttgtatatggtattttcggtattataaatttattttttagaagatttataaaaatgataaaatgataataggaatgggaatgtttttggaagaggtggtaattatatagtatgtatattattattgtttatttattattattggtagatattattaattaattatgttatttttttatagggtttagatatggttttagaatttttttttagttaatgttttatgaagatatgtttaatgaattttgatatgataatttttaagttttttaatggaggatttttttttttaattttgtatattaggttgggtatggtggtttatgtttgtaattttagggttttgggaggttaaggcgggcggattatttgagtttaggagtttgagattagtttggttaatatggtgaaattttgtttttattaaaaatataaaaattatttaggtatggcggtgggtatttataattttagttattcgggagattgaggtacgagaattatttgagttcgtaggaggtagaggttgtagtgagtcgagattatgttattgtatattagtttgggtaatagagtgagatttagttttaaaaataaataaataaataaataaataaaattttgtttattaaattttatttaaaattttatatatagattattttgtaaaaaattaaggtaatttaaaattataattatttgtggttttttaaattattttttagtttttattgtgtatattgagatttgaatatagttgtgatcgttgtgtaaaggtaatttttgttttgtttttgttattttggattattgtatatatatatttttgtgtattaagataggttatatttttgttatttttagtggttacgtagtgttttattattttggtagttaagattatttggttttatttatttgggttatttttaattttttattgttattaatagtatttgggtttataagttaaaaattatttaaaggagtataatagtgagttttttatttttagagttatttaagtagaggttaaaggattattttttgaggaatattggtagtggggttttttgtagagggtgtgagattgggtttcgtatttgagttttttttgtatattttaatttttgagtttgttattttagtttaggagataagtgatttaaaaattttaagtttttggcggttgtttatataaatttttaggtataattttagttattgttttggttttatagtttttttttttaaatgttgtatgtgttttttatatttatattattagtttaattgaatttattggggatatattggatttgaggtttgttttttttaagtttaaaaatttatgttttttaatttttattttgataaaattttagatttaaagttataaatatagtatagagagtttttatatattttttatttaatatttttaatgttaatattttatgtaaataattataatataattattaaatttaggaaattaattttgatagattattttttttttttgttaattaaatatatttatgaattttgatataatgttattaagtattttgtaggttttatttaaatttttttcgtttttttatttttgttttttttttggtttaggatttggtttaggattttatatggtatttggttttttttttgtttttttttttttatttatgtattgttttttgagttagggttttattttgtattttaggttggagtatagtggcgtaattatggtttattgtagttttgattttgggtttaagtgatttttttattttagttttttaagtagttggtataaattattatgtttagtttatttaaaaaaaaaaaaaaaaaggttttgtgtagtggtttatatttgtaattttagtatttggggatgttaaggcgggcggattacgaggttaggagatcgagattattttggttaatatggtgaaatttttttttt

SEQ ID NO: 1437 - DNA, 7536 bp, Artificial Sequence
  chemically treated genomic DNA (Homo sapiens)
agtcgggattataggtatttgttattatgttcggttaattttgtatttttagtagagagggggggtttcgttatgttggttaggttggtttcgaatttttgattttaggtgatttattcgtttcggttttttaaagtgttgggataataggcgtgagtcgttgcgtttagtaagtgatttgttgttgtttttgagatggagttttatttttgttgtttagattgaagtatagtggtataatttcggtttattataatttttgttttttgggtttaagtgatttttttgttttagttttttaagtagttgggattatataggtatgtgttattatattttgttaaatgttcgtatttagtagagatggggttttattatgttggttagggtggttttaattttttgatttcgtgattcgtttgttttagttttttaaagtgttggaattataggtatgagttattgtgtttagtttataagtgatttttaaataaaagttttatgattttaatgttagagaacgtgtttataggaataaaggggatgtaaattaatttttttatttatttttttttttttttgaatttttttttttatgttaaagtaaattaatttttaaatagttttataattttaattttagaaattttatttataggaataatgggaatgtaaatggttagtatttggtgttatttgatttttagtaataaggaagtgggttaaagtatagtttgattaatatttagttatgattatatattagtttagaattttatatgtaatttttgttaattttgtgggggtggttttatatatatatgtgtgtgtgtatatatatgtgtatatatatatttatatatataattttttaatatgttgttggattaaatttattaatattttgtaaataatttttgagtatgagggatattagtatattatataatttatgagggatattggtatattattttatttatttaattttgtaatatatttgtttagtttgtggttattatggttatataaaataaattgagtagttaggtgtagtggtttacgtgtgtaattttagttttttggaagatcgaggtgagtttaggagttttagatttttgtttgagtttaggagttttagattagtttgggtaatatggtaagatttagtttttataaaaaaatttaaaaaattagttaggtttggtggtgtacgtttgtggttttagttttttaggaggttgaggtaggatgatggtttgagtttaggaggttaaggttttagtgagttgtgtttatattattgtattttattttgggtaagataatgagattttgttttaagaaaagaaaaaatagttgggtgcggtggtttatgttttgtaattttagtattttggaaggtcgaggtaggtggattatttgaggttaggagtttaagattagtttggttaatatggtgaaattttatttttattaaaaatataaaaaaattagtcggtcgtggtggtaggtatttgtaattttagttatttgggaggttgagttaggagaatcgtttgaattcgggaggtagaggttgcggtgagtatagattgcgttattgtattttagtttgggtaataagagtaaaattttatgtaaaaaaattaaaataaaaaagaaagaaagaattaaaaataaattggggttgagtttagtggtttatttttgtaattttagtattttgggaggttaagataggaggattatttgagtttaggagtttgagattagtttgggtaatagacggagattttatttttaaaaatgaggagttgttttttttttttttttttttgaaagagtttatatatgattgatgttatttattttttgaatatttaaaaatttttagtattgaaattggggtttttttatggaaatattttttttttttttgagatagggttttgttttgttttgtttgttttgagatagagttttatttttgttatttaggttggagggtaatggtataattttagtttattataatttttattttttaggtttaatttattttattgttttagttttttaagtagttaagtattaaggattataggtatttattgttacgttcggttaatttttgtattttttgtagagatggggtgttattatgttgtttaggttggttttgaatttttgggtttaagttattgatttattttggttatttaaagtgttgggattataggcgtgagtttttgtgtttggtttttttatttatttttaataatgttaatatttttaaaatataaaagttgtttttttttttttttttttttttttttttttttttttttttttttttttacggtttttttttttttttttttttacggtttttttttgatgtcgagttgaagttggattgtattgttgttattttggtttattgtaatttttttgtttgatttttttgttttagtttgtcgagtgtttgtaattgtaggcgcgtgtcgttacgtttgattggttttcgtatttttttggtggagacggggtttcgttgtgttggtcgggttggtttttagtttttaatcgttagtgattcgttagtttcggttttcggaggtgttaggattgtagacggtgtttggtttatttagtgtttaatggtgtttaggttggagtgtagtggcgtgatttcggttcgttataatttttattttttagtcgtttgttttggttttttaaagtgtttagagtgtagtttttgttcggtcgttatttcgtttaggaagtgaggagcgtttttgtttggtcgtttatcgtttgggatgttaggagtttttttgtttggttgtttagtttggaaagtgaggagcgtttttgttcggttgttattttatttaggaagtgaggagcgttttttttcggtcgttattttatttaggaagtgaggagcgtttttggtcggtcggttatcgtttgagatgtggggagtgtttttgtttcgtcgtttcgtttgggatgtgaggagcgtttttgttcggtcgcgatttcgtttgggaggtgaggagcgtttttgtttagtcgttttatttgagaagggaggagatttttcgtttggtaatcgttttatttgagaagtgaggagatttttcgttcggtagtcgtttcgtttgagaagtgaggagtttttttgttcggtagttatttcgtttgggaagtgaggagcgtttttgttcggtagttgtttcgttcgggagggaggtgggggttagttttcgttcggttagtcgtttcgttcgggagggaggtgggggggttagtttttcgttcggttagtcgtttcgttcgggagggaggtggggggttagtttttcgttcggttagtcgtttcgttcgggaggttaggggcgtttttgttcggtcgtttttattgggaagtgaggagtttttttgttcggttagtcgtttcgttcgggagggaggtgggggggttagtttttcgttcggttagtcgtttcgttcgggaggtgaggggcgtttttgttcggtcgtttttattgggaagtgaggagtttttttgttcggttagtcgtatcgttcgggagggaggtgggggagttagtttttcgttcggttagtcgtttcgttcgggagggaggtgggggggttagttttttattcggttagtcgtttcgttcgggaggtgaggggcgtttttgttcggtcgtttttattgggaagtgaggagtttttttgttcggttagttattttattcgggaggggggtgggggggttagttttttcgttcggttagtcgttttttttcgggagggaggtgggggggttagttttttgttcggttagtcgttttattcgggaggtgaggggcgtttttgttcggtcgtttttattgggaagtgaggagtttttttgttcggttattattttatttgggaggtgtgtttaatagtttattgagaacgggttatgatgataatggtggttttgtggaatagaaagttgggaaaggtggggaaaagattgagaaattagatggttgtcgtgtttgtgtggaaagaagtagatatgggagattttttattttgttttgtattaagaaaaatttttttgttttgggattttgttgatttgtgattttattttcgaattttgtgttttttgaaatatgtgttgtgtttatttagggttaaatggattaagggtagtgtaagatgtgttttgttaaatagatgtttgaaggtagtatgtttattaagagttattattattttttaattttaagtatttagggatataaatattgtggaaggttttagggttttttgtttaggaaaattagagatttttgtttatttgtttatttgttgatttttttttcgttattgttttatgattttgttaaatttttttttgtgagaaatatttaagaatgattaataaaaataaaaattaaaaaaatatatatataaaagttgaatttagatagaagttatgttattatatgaaatgataggagttagggttttttttttttttttttgaaatagggtttcgttttgttatttagtttgtagtgtagtggtataattatagtttattgtagtttaaattttttaggtttaagtgatttttttattttatttattttatttttttaagtagttggaattatataggtattattatatttagttaattttttttttttttttttttttttttttttttttttttttttttttttttttttgagatatagggtttttttatgttgtgtggtttggttttaaatttttgggtttaagtattttttttattttagttttttatcgtgttggaattataggtatgagttattatattcggtttagggtttttatttttgggtaaaatgtttttatagtattttttattattagttttaaagattagattttttttttatgtttcgtcgtttttcggttttattttgtttattgttatggtttaagttgatatcgtgttgattagattggtagttatgggttagaatttaattttgattatgaaagattatggttttgtggtttgtgtttttaataggattgttttcgaagtggatgattttttggttaatgaggtaaagggaattaaagtggtgggtgtttagtttttgaaagagatggtttttaagttgaagaagttttagcggattatttttttggtgaaggttgggtaagttgtggattattttattaaaaaattgatattattgttggatattggtgatattattattgatggaggaaattttgaatatagggatattataagacggtgttaagattttaaggttaagggaattttatttgtggggagcggagttagtggtggagaggaaggggtttggtatggtttattgtttacgttaggagggaataaagaagtatggttttatattaagattattttttaaggtgttgttgtaaaagtaggaattttgttgtgattgagtgggagatgagggagtaggttattttgtgaagatggcgtataataggatagagtatggggatatgtagttgatttgtgaggtatattatttgatgaaagacgtgttgggtatggtataggataagatggtttaggtttttgaggattggaataagatagagttagatttatttttgattgaaattatagttaatatttttaagttttaaggtgttgatggtaaatatttgttgttaaagattagggatagtgtagggtagaagggtatggggaagtggattattatttttgttttggagtatggtatattcgttatttttattggagaagtcgtttttgtttggtgtttgttatttttgaaggatgggagaatttaagttagtaaaaagttgaagggtttttaaaagttttagtttgatggtgataagaaattatttttggaggatatttagaatgtttttttatgtttttaagattattttttatgtttaaggttttatgttgttaaggtagggagttatcgagtttggttggatttttaattatggtgatattgttttgatgtggagagggggttgtattattagaagtgtatttttaggaaagataaaggatgcgtttgatcgaaatttagaattttagaattttttattggacgattttttaagttagttgttgaaaattattaggatttttggtggtgggtagttagtattggggtttaggttggtatttttatgttttgttttgttattgttttttttttttatgataagtatagatacgagatgtttttagttaattttatttaggtttagcgggatttttttggggtttatatttatgaatttttggttaaattagggtagtttatttatattaattggataggttacggtggtagtgtattattttcgttatataatgtttgatgatgatgatgttgtttttgttattttttacgattttatagattaggatattttatgagttttatggtattgttagttggttttttttttttttgagacggagttttattttgtcgtttaggttggagtatagtggcgcgattttggtttattgtaagtttcgtttttcgggtttatgttatttttttgttttagtttttcgagtagttgggagtataggcgttcgttattatatttagttaattttttgtatttttagtagagacggggttttattatgttagttaggatggtttcgattttttgatattatgattttttcgtttcggttttttaaagttttgggattataggtatgagttatttttggtttagatttttttaaaaagtgttgtaagagattttagaggaaggtatatagtttatttgtaaagtagttttgtaagagttgttgtgttttttgtttttgttttttgggattgattaggagttgtttatgtgtgtgagagtgggaattatttttttgtagtagtggttttcgtatgttttatgtgttggtgtggtttttattacgtagacgggaagggtttttgtgtattttgattaattggaatttttgtattatgcggttgaatttttttttttttttatttaataaaagttatattagattgataataaagaaagaaagaaagattaatagtgattttttttgggtagttaattgaggtagtttggataatttagttttttttttatttatttttattgttgattttttagttttaaaaataagtaaatttaaaaataaaataaaaaaggttaggtgtggtggtttatatttgtaattttagtattttgggagattaaggtgggcggattatttgaggttaggagttttagattagtttggttaatatggtgaaattttgtttttattaaaaaatataaaaattagtttggacgtggtggtttacgtttgtaatttcggtattttgggaggttaatatggatagaatataaggttaggagttcgagattagtttggttaatatggtgaaattttatgtttattaaaaatataaa

SEQ ID NO: 1438 - DNA, 7536 bp, Artificial Sequence
  chemically treated genomic DNA (Homo sapiens)
tttgtatttttagtagatatggggttttattatattggttaggttggtttcgaatttttgattttgtgttttgtttatgttggttttttaaagtgtcgggattataggcgtgagttattacgtttaggttaatttttgtgttttttagtagagatagggttttattatgttggttaggttggtttgaaatttttgattttaagtgattcgtttattttggttttttaaagtgttgggattataggtgtgagttattatatttggttttttttgttttatttttaaatttatttatttttgaaattagaggattagtaataaaagtggataaagaaagaattaaattatttaaattattttaattggttatttagggagaattattgttgatttttttttttttttttattattagtttgatgtagtttttattgagtaaaggaaaaagggaatttagtcgtatgatatagaggttttaattgattagagtgtataaagatttttttcgtttgcgtgatgggaattatattagtatatggggtatgcggaagttattgttgtaaggaggtggtttttatttttatatatatgaatagtttttggttagttttaagaggtaagggtagagggtatagtagtttttatagagttattttataaataaattgtgtgtttttttttggagttttttataatattttttaaaaagatttgggttaggggtggtttatgtttgtaattttagaattttgggagatcgaggcgggaggattatgatgttaggagatcgagattattttggttaatatggtgaaatttcgtttttattaaaaatataaaaaattagttgggtgtggtggcgggcgtttgtatttttagttattcgggaggttgaggtaggagaatggtatgaattcgggaggcggagtttgtagtgagttaagatcgcgttattgtattttagtttgggcgatagagtgagatttcgttttaaaaaaaaaaagggttagttggtagtgttatgaggtttatggaatgttttggtttgtggaatcgtggagggtgataggagtagtattattattattaggtattgtatgacgaggatgatatattgttatcgtggtttgtttagttggtgtggataaattgttttggtttggttaagagtttataggtgtgagttttaaaggaatttcgttgagtttggatgaggttggttggaagtatttcgtgtttgtatttgttatagaaggagagggtagtgataaaatagggtatgggaatgttagtttggattttagtgttgattgtttattattaagagttttagtggtttttaatagttgatttaagaagtcgtttagtaggaggttttgaggttttgggtttcgattaaacgtattttttattttttttaggaatatatttttaataatgtagttttttttttatattagggtaatattattataattgagggtttagttaaattcggtggttttttgttttagtagtataaagttttgagtataagagatgattttggaagtatagagggatattttgaatattttttaggaatgattttttattattattaaattggaatttttggggattttttagttttttgttagtttgaatttttttattttttagagatgataggtattaagtaaagacggtttttttaatgagggtgacgggtatgttatattttagggtagagatggtggtttatttttttatgtttttttgttttgtattgtttttgatttttggtagtaagtgtttgttattagtattttggaatttgagaatattggttgtgattttaattaggaatgagtttagttttgttttattttaatttttaaaggtttgggttattttgttttgtgttatgtttagtacgttttttattaggtggtatgttttatagattagttgtatgtttttatattttattttgttgtgcgttatttttataaagtggtttgtttttttattttttatttagttatagtagggtttttatttttgtagtaatattttggaagatggttttgatgtggggttatgtttttttgtttttttttggcgtgagtaatgaattatattaggtttttttttttttattattgatttcgttttttataaataaaatttttttggttttgaggttttggtatcgttttgtggtgtttttatatttagaattttttttattaatgatgatgttattaatgtttaataatggtattagttttttgatgaaataatttatagtttgtttagtttttattaggaggatgattcgttggggtttttttagtttggagattattttttttagggattgggtatttattattttggttttttttgttttattggttaagaaattatttatttcggagatagttttattaaaagtatagattataaagttatggttttttatggttagaattaagttttggtttatgattgttaatttgattagtacgatgttagtttgggttatggtagtggatagagtagaatcgaagagcggcgaggtatggaggaagagtttgatttttaaaattgataataggaagtgttgtgaaggtattttatttaaaaataagaattttaggtcgagtgtgatgatttatgtttgtaattttagtacgatgggaggttgaggtgggaggagtgtttgaatttagaggtttgagattaggttatataatataaggagattttgtgttttaaaaaaaaaaaaaaaaaagaaaagaaaagaaaaaaaagaaagaaagaagaaaaattagttgggtatggtggtgtttgtgtagttttagttatttgggagggtaaggtggataaggtgggaggattatttgagtttgggaagtttaggttgtaataagttgtgattgtgttattgtattgtaggttgggtggtagagcgagattttgttttaaaaaaaaaaaaaaagaattttagtttttgttattttatgtgatagtataatttttatttaaatttagtttttatatatatatttttttaatttttatttttattgattatttttgggtgttttttatagagagggatttggtagggttataggataatagcggagggaaggttagtagataaataagtgaataaaggtttttggtttttttaggtagaggattttgaggttttttatagtgtttgtgtttttgggtatttgagattagggagtggtgatgatttttaatgagtatgttgtttttaagtatttgtttaataaaatatattttgtattgtttttaatttatttaattttgagtggatatagtatatgttttagagagtatagggttcgggggtaaggttatagattaataggattttaaggtagaagaattttttttagtatagaataaaatgaaaagttttttatgtttatttttttttatatagatacggtaattatttgattttttaattttttttttattttttttagttttttattttataaaattattattgttattatggttcgtttttaatgagttgttgggtatattttttagatggggtggtggtcgggtagaggggttttttattttttagtaggggcggtcgggtagaggcgttttttatttttcgggtggggcggttggtcgggtaaggggttgatttttttatttttttttcggaagggggcggttggtcgggcgggggggttgatttttttatttttttttcggatgaggtggttggtcgggtagaggggttttttattttttagtaggggcggtcgggtagaggcgttttttatttttcggacggggcggttggtcgggtggggggttgatttttttatttttttttcggacggggcggttagtcgggcggggggttgatttttttatttttttttcggacggtgcggttggtcgggtagaggggttttttattttttagtaggggcggtcgggtagaggcgttttttatttttcggacgaggcggttggtcgggcggggggttgatttttttatttttttttcggacggggcggttggtcgggtagaggggttttttattttttagtaggggcggtcgggtagaggcgtttttaatttttcggacgaggcggttggtcgggcggggggttgattttttatttttttttcggacggggcggttggtcgggcggggggttgatttttttatttttttttcggacggggcggttggtcgggcgggggttgatttttatttttttttcggacggggtagttgtcgggtagagacgttttttattttttagacggggtggttgtcgggtagaggggttttttattttttagacggggcggttgtcgggcggagggtttttttattttttagatggggcggttgttaggcggagggttttttttttttttagatggggcggttgggtagagacgttttttattttttagacggggtcgcgatcgggtagaggcgttttttatattttagacggggcggcggggtaaaggtattttttatattttagacgatggtcggtcggttagagacgttttttattttttagatgggatggcggtcgggaagaggcgttttttattttttagatgggatggtagtcgagtagagacgttttttattttttagattgggtagttaggtagaggggtttttaatattttagacgatgggcggttaggtagagacgttttttattttttagacggggtggcggtcgggtagaggttgtattttgggtattttgggaggttaaggtaggcggttgggaggtggaggttgtagcgagtcgagattacgttattgtattttagtttgggtattattgagtattgagtgaattagatatcgtttgtaattttggtattttcggaggtcgaggttggcggattattagcggttaggagttggaggttagttcggttaatatagcgaaatttcgtttttattaaaaaaatacgaaaattagttaggcgtggcggtacgcgtttgtaattgtaggtattcggtaggttgaggtaggagaattaggtagggaggttgtagtgagttaagatggtagtagtatagtttagttttagttcggtattagagggagatcgtggaaagagagggagagggagatcgtggggagagggagaggagggagagggagagggagagggagagggagagggtagtttttatattttaagagtattgatattattaaaaataaataaagaggttaggtatagaggtttacgtttgtaattttagtattttgggtggttaaagtgggttaatggtttgagtttaggggtttaagattagtttgggtaatatggtgatattttatttttatagaaaatataaaaattaatcgggcgtggtagtgggtatttgtggtttttggtatttagttatttggggggttaaggtagtagaatagattgagtttgggaggtagaggttgtagtgagttgagattgtgttattgttttttagtttgagtgataagagtgaaattttgttttaaaataaataaaataaaataaaattttgttttaaaaaagaaaaaaatatttttatgaagaaattttagttttagtgttgaaaatttttaaatatttaggaaataaataatattaattatatataaatttttttaaaaaaagaggagaaaagaataattttttatttttagagatggggttttcgtttgttgtttagattggttttaaatttttaagtttaagtgatttttttgttttgattttttaaagtgttgggattataagagtgagttattgagtttaattttaatttgtttttagtttttttttttttttttgttttgatttttttatatggagttttgtttttgttgtttaggttggagtgtaatggcgtaatttatgtttatcgtaatttttgtttttcgggtttaagcgatttttttgatttagttttttaagtaattgggattataggtgtttgttattacgatcggttaatttttttgtatttttaatagaaatggggttttattatgttggttaggttggttttgaatttttgattttaggtgatttatttgtttcggttttttaaagtgttgggattataaggtatgagttatcgtatttagttgttttttttttttttgaaatagaattttattattttgtttaaggtagggtgtagtagtgtgaatatagtttattggagttttgattttttgggtttaagttattattttgttttaattttttgagaagttgggattatagacgtgtattattaggtttggttaattttttaaatttttttgtagagattaggttttgttatgttgtttaggttggtttaaaatttttgggtttaagtaggagtttaaaatttttgggtttatttcggttttttaaagggttaggattatatacgtgagttattgtatttggttatttaatttgttttatgtggttataataattataaattagataaatatattataaaattaaataaataaaataatatgttaatattttttataaattatataatatgttaatattttttatatttaaaaattatttataaaatattagtaaatttaatttaataatatattaaaggattatatatataaatatatatatatatatatatatatatatatatatatatatatgaaattatttttataggattgataagaattgtatgtagggttttggattgatatgtagttataattaagtattaattaggttgtattttggtttatttttttgttgttaaaagttaggtagtattaggtattgattatttgtatttttattatttttatagataggatttttgaagttagggttgtaagattgtttaagaattgatttgttttaatatgaggaaggaaatttaaagaaaaaaagaaataaataaaagaattgatttgtattttttttgtttttataggtacgttttttgatattggaattataagatttttgtttaagaattatttgtaggttgggtatagtggtttatgtttgtaattttagtattttgagaagttgaggtaagcggattacgaggttaggagattgagattattttgattaatatggtgaaattttatttttattaaatacgaatatttagtaaggtgtggtggtatatgtttgtgtaattttagttatttgggaggttgaggtaggagaattatttgaatttaggaggtagaagttgtagtgaatcgagattgtgttattatattttagtttgggtaataagagtgaaattttattttaaaaataataataagttatttgttaggcgtagcggtttacgtttgttattttagtattttgggaggtcgaggcgggtggattatttgaggttaggagttcgagattagtttgattaatatgacgaaattttttttttttattaaaaatataaaattagtcgggtatggtggtaggtgtttgtaatttcgatt

SEQ ID NO: 1439 - DNA, 10606 bp, Artificial Sequence
  chemically treated genomic DNA (Homo sapiens)
tttatagaaatggaattgttggtttaaagggtaaatttattagatttttgtgttatttagagtttgtttgttatatgtgtgaagaagagattaaattttattttttttatatagttatgtagttgttttaagattattgatttaaaataaaagtttattattattttattgatttgattcggtattaattttttatatgtatttggttttatttatagattttttattttgttttattggtttttttatttatgttttagtgatttaatgtgtgttttttttattttgtaaggttagtttattatagttttattagggaggggattggtattgtaataaagattgtatataagtagtttaaataagatagaagttgatttttttgttatgttaatagtatagaggtgagtggtttagggttggtgaggaagtattattattattgaggttaaggtggttgttttagtttttgttattttttagttagtagaaggtagaaaagggtttaaagatagtatgaatttttttttttagggttattatgtggaaatggtttatattagttgtttagaatttgtttatatggttattttaagttataaggaagatggagaaatgtagttttttgttggagagttatgtgtttgattaaaatttaggagttttattagtaaagaaagggaaaatggtttttgttataatggtgatttgatggtaaagattttaatgtagaaggtattggggtattgtaacgtaaataatggtataaatttttttttaggaatttataatagaggattggtgtagaggagtttaggatttatataggttttattttttatttttatatttgtgggattttttttgattagaattgtatttattatttttagagtttttgtatgttttttttttttttttgtatatgttgttgtatgtgtgcgtttttttttttttttttattgttttatttatatgtttttggaggtattaatttatttttgaggtaattattggggtttgttaatgaattaattggtaaaaagaagttttttagggaataaaagttcgatttcgtttatatttttgaattttttatttttttttttttgatattttttttgaatgtgataaagaatagataatttaagtgggttttttatatttatagaagattatatttatatataaaaggggatttgggtaatagataattaaattaaaggataggaaaaagttataaaaagaaagattttatagttttagagagattatatgatttattatttaaattgggatattttaaagagtttaaggaggttgggcgtggtggtttatgtttgtagttttagttatttgggagattgaggtaggaggattttttgaattttagaggttgagtttgattgtagtgagttgattgttggattgtattttagtttgggagatagagcgaggttttgtttttagaataagtaaataaataatttttttcgttttttttaaaaaaaataattataagtagatttttttggggtatatatatattttgattagttttttagttatatttgtttttaatattatgttattggtatttttttgaaaaatgtatttttttttaatatggttttattaagtttttttataaaattgtttgtaatttgttttttagttgtattttatggttaataaatttaatattatagatatttttaattgatttttttttatagattatgtcgatttaaaaggaagaagtgtaggtaaaatatggaaaggttatttgggttatggttgagaattgtagtttgggatatatttttaggttgttttgaagagtattttggagaataatggggaggtttaaattttttaagaaaaaaggatgaattaggagtgggggtgattgtaaagttgtttgttaagaatttttattggtttaaagaaataatattgggttgggtgtggtggtttatatttgtaattttagtaatttgggaggtcgaatcgggcggattatttgaggttaggagttcgagattagtttggttaatagggtgaaattacgtttttattaaaaatataaaaattagttgggcgtggtggtatgtatttgtaattttagttatttaggagtttgaggtatgagaattgtttgaattcgggaggcggaggttgtagtgagtcgagattgtgtttttgtattttagtttgggtaatagagtgagatttcgttttaaaaaaaaaaaaaaaaaaaaaaagttaataagggtgtttttttagagtaaattagaaagatggaattttttatatatattataatttaattatgggagttatattttattatttttgttatattttattggttagaagttagttatagttttagtttatatttaaggggaggaaattatagaaagatgtgaatattagagggtagagattatgggtattattttagaattgggaaatggttttgagattgagatttgtgtgtaggtggattattgggggttgtttttgggaataagttttgtaaaggagtaaggaaattagatttggatagaaaagggagaagttttaatagaggttttagttaattttatagatagttttgaagtagagttggttttttagagacgttttgaaatgaagtaaagaagttaggtttttggaacggtattaagtaattattaatggatgtttttgggaagtcggtataattttaggtaaggtagttttttttaatagagggtagtttttggggagaaatttagttgtgagttgttagtaattaatatttttagtagttaataataagtgttttagttttgaaagagggaatttgagtgatatattattattatatttggttaattagaatatttttttagttagtatatatatttttttagtattgtgaataaaagttagttgaatgagaaattgaaagtatttttgattggtttttttttgtaattaattaggttggtggtaggttaagtttttatttgtataggagtgtaattttgtaattttattttagtttttgattggttattttttgtaattaattagattgattatggattattattttatttgtatggggtatatattaagtggttaatgggaaatttttatcgggtatttagattttagaaaattttgtaattaagtttttgagttgtttgtttaggtttgtttttattttgtggagtatatttttgaaatcgtttttgtaaaaattataattgaggaaattatgatagtgaaagagattagatttaatttattttattttttttttaatttttaaaatgtttttgtttatttttgggtataggttaaattagttttgggaaagaatttatagtgtaaattttgagataaaattgataatagtttttttttttttttgttgggattagtttgtttttttttgtaggtgtaataaattagttataagattataaattatagtttaggggttatgtagtttttggttgtaagaatttgaatttttttaaattgtttttgggaataatattattattgtaaattttaagattagtgtttgagatattttgtagattttgtatttttatgtagtagaggatattatttagattgataatttggtttaattagttttacgattttatttaggaagaattcgtaagaatttatttcgatttcgtgatttaatttttatttcgattaattagtattttttatttttcgaatttatatttgttaaattatttttaaaaattttgattttagaatgtttagggagattgatttgagtgataatgaaattttggtttttcgtatagcgtttagcgtgaattattttttcgttattgtaattttcgtttttataaattagttttgtttaggtagcggataaggtgaatttattgggcggttatattttcgtttttaatatatttttgtttttattgttttattttttttttgttttgtgtatttcgtttagtttttagtttaagacgttaagaatttggatattttttacgggtaataggattataggtgttcgttattacgtttagttaattttttgtatttttagtagagatggggttttgttatgttgtttaggttggtttcgaattattgggtttaagtaatttgtcggttttggttttttaaagtgtcgggattaaaggcgtgagttatcgcgtttggtttattaaatttttttgtgtattagttattttatttgtttaatgaggataatagtagttattattgcgttttgtgagcgttggttaatatatgaaaaatgttacgtgtttgttattagtattaattatgttataattagaaaaattatattgtattttttattttaaaaaaggtgggggttagagtggatttgggttttttttaatttttgagaggtttttattattaagtaagttttaagaagtagaattttatgaagggagttaggaaattaggattttttaaaaggaggtggtatttgtattgattttggtagggtagtttcgaattttacggggttggggttgcgttttttttaaggtagttttgggtttgcgtagggacgcggttgttttgggcgtggtttcgggaaacgtagcggcgtcgattttgggtttcgtatattttttacgttcgttcgtagcgttattcggattttcgtcgttatttttgtgggtttttcggcgacgttttttgtttcgtttttaagtcgggaaggttttttgcggttcgcggcgtgtcggacgtgataaacggaagtcgtacgttttattagtattttcgtagacggatagcgttagggagtaatggtagcgcgtcgatcgcgatgggttgtggttaatagcggttgtttagtagggcgcgtcgagagtagcggtcgggaaggggcggtgcgggaggcggggtgtggggcggtagtgtgggttttgtttttgttcgcgcggtgtttcgtattttgtaagttttcggagcgtacgtcggtagtcggttttttcgttgatcgaattatcgatttttttttttagttgtatttttaaaatgtcgttttttaataagttgacgttggataagttggacgttaaagggaagcgggtcgttatgaggtaattttgtacgtttgttcgcgtgttttttgtgttttgtcgtaaatttttttggtcggagtcgatttgttttttcgtttgttttaagtttttttagtttttggttgggttttaggggttttaggtttggagggcgaggttgtttacgggtttggtggtttttagtcgtattttttttagtttagaaagtattcgaagttatttttcggggatggattttattgaggaagggttgagattgtcgttgggatttattttgtttttttttttattggtgaaatgtagtttcgttgtttttagtttttagtcggcgagatgggatttaatgtttattttgtaaatttttaggttttaaggaagggattttgaaaggttattttattttttttttttttacgtttttagatcgtcgtagttaaatgagaaacggtttatattttataggtttttgtataaaaggatatttttttaagaggatgttgatttaattttaggagtagattttttcgtttttcgttattaaagaattggggtgggagggtagggcggggcgaattggaggaggttttgtagagtttacgtaataggcgtttgttgttttgtagcgcggtatcgttggatttttgggtataggatttgtattaggattgtgatatattaggtaatggtagagtagggtgtggttgtttatatttgttggtttttaattttatttttacgtgtggttagaaaagtagaattttaaaattgggggaagttttttcgtgtattttgggttttttattttgcgtatgtggatttttagttatttgttaatacggttttttttttatttgttagaattgttggtagagtgggtagtttttatatttattttttttgttacgtgtgatatatttgtgtatattaggagtaaggtgtaggaggatgagtcggtatgtaattgatggatttgattgtttatatattttaataggatttaagagtggtgtttttgaggggttataaaggtttttgttgatagtattttgtaattttgatttttttgggaagtggttgattgatgggtaggtatttatttggttggtgtaatttagttttttttttaatttgggttggtttaaatgagggtttgtgttggatattaatagatacgtaagttagtaggagatttttttttattttaattttaaatatatgaggatacgtttgagttagggaattgtatgggtattttaaaaggatatgtagttttttttttttttttaattttattttggttaatatttttgtaggtaatcgttgttttgttgtggagatagaagaatttaataatttatgtttatgaaaaatatttggtttttatatttttttaaatgatataggtttttgtaatttggataaagtaggagttatagttatgttagtattagaggagtgttttttttggtttttatataattttaaaaaaaggggatagattttgtaaaaaataggataggtggatattggtatgtaattagtttttaggttttaattagttttttgtattttttttgtgttcgacgttgatttttttagatgtatggattaattaatagataaggagtgggatattatgttgataatttttttgtaattgtagttttgggttttattttttttttttttagggaaattggtttgaggaagttagttgggggcgggattggaggagttgtttaatttttttttttttggatttaataaagttttatttagtatacgttaatttaaagttttgaaatgattggttagttttgttttgttgatggaaaatgatttgtttagggttattgaattattaagttggtggtagagttaggagtagaatttaggtttttttggttattaattagattttttgaatattcgagataatgattaaggatacgttgaaatagaattttttttcgtaatttggatattttttatttatttaggttgaggataggaagttatatggttttttgattattaatgtattttttttgaatagagagttatattgtaggtttatttttttggaggtgtttaggtagttatgtggtgttagtttaatttttttttgttttaacgtggtggttgttggcggtgttttcggaatggggttttttgagtagtggttgttttatttgtcgtttttgttttgtagaagtgaattatggtatttgttgatttttttggtttattggtttggattgttaagggaaattgatttgttgaggtaatatgggatagttagaaatttttgatttgttaattattaggttttattttagttttttaggatttcgtagttgattttatagtttttttgaatatatttttgtttatttttgtggtaatttttttttttttttttataggttgttagttattttttgtttgtttgtaaagtattttttttttgtttgtttttgtttttttttttaaattttattggttttttttaatttgtaatttgtaaagaaattgttttgatgtagtgggaagagaaataggaaaaaattgagagtagagaaaaagttattaagatatttataatattttagttttttatttggggtagtgaagtattgatggatatggtttttttgagagtttttaatggaattggatttgggatttgagattttaggtgatagagatttgatatttttattttagttaaattagtatattttttaatgttttattttgaaataaagatttatgggaggttataaagttagagaggttttgtgtttaatttatttttttttaatggatgtattttatttaattatagaataatattaaaagtaggaaattgatattggtataaagtgtgtatggttttatgttattttattacgtgcgtagatttgtgtaatcgttattataattaagatatagaattattagattattattaagattttttttatgttatttttttataataataattatttttttttttgatttttggtaattattgatttgtttattgtttttaaaattttgttattttaaaaatattatatagattgaattatatggtatataattttttgggattaattttttttatttagtataatgtttttaaaatttatttatattgttatatgtattaaaagtttatatttgtgtattgttgagtagtattttatggtgtggttgtattatagtttgtttaattattattgaaggatattagggttgtttttgatttggggttattataaatatagttgttgtgaatatttgtatataagttttggtatggatatacgttgttattttttatgggtaaatatttaggagtggaattgttgggttacgtttttttgaggtatttttagattgttttttaaggtggttgtagtattttatatttttattagtagtatttgagtaattagtttttttgttttattattagttattttagttatttttcgttttgatggatatgtagtaataattgattttgtgtttgaagtaaagtttaggggtgttataaggaaacgaaaaaaaaaaaaaagaaaattgtgtatattttatgtaaaatggaataagtagaatttgtaggtaagagtagtttttgtgttggagttttttgaggagaagttaaaagtagagttgttgtgagtgtaggagataaggggaggtaatttagagggtattgaggagagagtattaattaagtttaatttattagtaagttgatattatggtagtttggatagatgagatagttttttaggtgtttttgtttaaagatatttttttttgtaagggttgggggtagagagtagtattgtaagaagtggtttgtgtttatttttttgttattagtttttttgagtataggttttttgggaggttgtatgggggaaaatgatttatggtaatgggatatttttttttttttggaatgtattttaaggttggtaggttttttgtttaggatatttaaagaagatagagaattaagtggtttgaaataaagtagagtgtattttttttattagaggtttattgtttttaattttgaagattttaaaatatgttttattatagaattatttttttttagtttatttttggaaaggttgttttttagtgaggtagattggagtttaggtttagtggatataggaaattggtggtttttttagtatgtttgtaggagtttgtaattgttttagttttagagaggaaggggtatttaaaaaggtagaggaaaaagatggaggtttataattaaggatagtagtagtttttttgattaggttatattttattgtagtttttttgtaagtgatgttagttgtttttagtagtggttgatttatttgttaaattatagaattatattttggagaaatatataataataatatttttatggtatttattgtgtgttaggtatatttttaagtattttataaattgttgatttattaatttttttagtaattacgaggtagatattgttatttcgatgagaaaaaaattatttaaaaataattatggtaggtataatttttaaattttaaaaatagttgttatatattattgtttttatttatattgaagtaggttgaggttttaaggagtttagaataattggtttttaagaatgataatatagtaatttgttgggtaagagatattgtagtatattatttttttgtgtcgttttgattattttttttttaatttgtttgtttgttaggtgggttggggtatatgttttattttttttttttaggttttttgaaagaggttgttttatgttgtgtgtattgtttgaaggatttttagttttaaggttttaggttttttttaaaaagaatgatttttttttagtgtgttttatttttattttaatttttttttcgagttatgttagttttacgaggatttagaaatagtattaagggaattaggattaagatgtattttttattattttttatttttttagttgttattcggatattattgtgttaggtttagatagatatttttttaggtggaattagttttagttttttagatttttagggttagtttttgtgatttaagttaggttttttttttaaaattttttttaaagtatgaatatatatttaaaagggtataaattataagtttaaagaattattataaaatgagtatatttgtatggttattgaggttaagagatagaatattattagaattttaaagtttttggtgtcgttattttagttattattttcgttattttttttatgattaattattattttgatttttaatgttattgattatttttaagatgagatttgaatttttgatttatttaattggtttattaaaaatgtattttttagtttttgatggaatagtaagttgattatggttttgtattttttttttttaga

SEQ ID NO: 1440 - DNA, 10606 bp, Artificial Sequence
  chemically treated genomic DNA (Homo sapiens)
tttaaaaaagaaagatgtaagattatgattaatttattgttttattaaagattaggagatgtatttttaatgaattagttaaataagttagaaatttaaattttattttaaaaataattagtggtattaaaagttaaaatagtggttagttatggggaggatggcgggagtggtgattgggataacgatattagaggttttggggttttggtaatgttttattttttaattttagtgattatataaatgtgtttattttgtggtaattttttgaatttgtgatttgtgtttttttaggtatgtatttatattttaaaaagaattttaaaaaaaaaatttaatttaaattataggaattagttttgaagatttgggaagttaaagttagttttatttaaaaagatatttgtttgggtttggtataatagtattcgggtagtagttagaggggtgaggaataataaggaatgtattttgattttaatttttttgatattatttttgggttttcgtgaaattaatatgattcgagaaaaaaattaaaataaaaataaaatatattaagagaaaattattttttttggagaaagtttggggttttaagattaggggttttttaagtaatatatataatataagatagttttttttaaaaagtttgagaagagagggtgggatatgtgttttagtttatttgataaataggtaaattagaagggaagtaattaagacgatataagaaaataatgtattgtagtattttttatttaatagattattatgttattatttttaagaattaattattttgaattttttggaattttagtttattttaatgtgaatgaaaataataatgtatggtagttatttttaaggtttaagagttgtgtttgttatgattatttttaagtgattttttttttatcgggatgatagtatttatttcgtagttattgagagaattagtaagttagtaatttgtaaagtgtttagaagtgtatttgatatatagtaaatgttataaaagtgttgttgttatatgtttttttaaaatgtaattttgtgatttgataagtaaattaattattattaaaaatagttaatattatttgtaaagggattatagtgaagtatgatttaattaagaagattgttgttatttttgattataagtttttattttttttttttgtttttttaaatatttttttttttttaaggttaaggtaattataaatttttatagatatattgagaagattattaattttttatatttattaggtttgaattttaatttattttattgaagaatagtttttttaaaggtaggttgaggaaaaataattttatagtaaaatatgttttaaagtttttaaaattaaaggtagtaagtttttgatgaaagaaatatattttattttgttttaggttatttgattttttgttttttttaaatattttgaataaggagtttgttagttttaaagtatattttaaagaagagagaatattttattattatgggttatttttttttatgtaattttttagaaggtttatgtttaaaaggattaatggtaaaaggatgggtataagttattttttgtagtgttattttttatttttaatttttatagggaggaatatttttggatagagatatttaagaaattgttttatttatttaagttgttatggtgttagtttattaatgaattagatttggttgatattttttttttaatgttttttggattatttttttttattttttatatttataatagttttgtttttagtttttttttagaggattttaatataggaattgtttttgtttatagattttatttgttttattttatataaaatatgtataatttttttttttttttttttcgtttttttataatatttttgagttttgttttaggtataaagttagttattattatatatttattagaacgaaaaataattaaaatagttggtaatgaagtagagaaattgattatttaaatattgttggtagaaatgtgaaatgttgtagttattttggaaaatagtttggggatattttaaaaggacgtggtttagtaattttatttttaggtgtttatttatgaaaaatgatagcgtatgtttatattaagatttgtatataaatgtttatagtagttgtatttgtaatagttttaaattagaaataattttaatattttttaatgatagttaaataaattataatataattatattatggaatattatttagtaatatataggtatgaatttttgatatatgtgataatgtggataaattttgaggatattatgttaagtgaaaaaagttaattttaaaaggttatatattatgtgatttaatttgtatagtatttttgaagtgataaaattttagaaatagtggatagattagtagttattaggagttaggaaggggggtggttattattataaagaggtagtatgaaggagattttggtggtgatttaatagttttgtattttgattgtggtggcggttatataaatttacgtacgtaataaaatggtatagaattatatatattttatattaatgttaattttttatttttgatattgttttataattaggtaagatgtatttattgggggaaaatgggttgaatataagatttttttaattttgtaattttttatgaatttttattttaaaataaaatattaaaaaatatattgatttagttggaataagaatattaagtttttattatttgaaattttaggttttaggtttagttttattaaaaatttttaaaggaattatgtttattaatgttttattgttttagatggaaaattgggatattgtgggtgttttagtgattttttttttgtttttaatttttttttgtttttttttttattatattaaagtagtttttttataagttataagttggagaaaattagtaaggtttaaaaaaaaaggtaggagtaagtaaaaaggaagtgttttataagtaggtaaaggatgattggtaatttatgagagaaagaaaggaaattattataaaaataagtagaagtgtatttaaagaggttgtaaagttaattgcggagttttaaaaaattaagatggaatttggtaattaataagttagaggtttttggttattttatgttattttaataaattaattttttttggtaatttaaattagtggattagaagagttagtaaatattatagtttatttttgtaggataaagacgataaatgaggtagttattatttaggaagttttatttcggaaatatcgttagtaattattacgttgaaataaaaaggaattgagttgatattatatggttgtttaagtatttttaaaaaagtaggtttataatgtgattttttgtttaaaagaaatatattaataattagggaattatgtaattttttgtttttagtttaaataagtagaaggtatttaggttacgggagaaagttttattttaacgtatttttggttattgtttcgaatatttagaggatttagttgatagttaaggagatttaaattttatttttagttttgttattaatttggtagtttagtaattttgaataggttattttttattagtaaaataggattagttaattattttaaggttttgggttagcgtgtgttaaatgaaattttattaggtttagagggagaaaagttaagtagtttttttaatttcgtttttagttagtttttttaagttagtttttttagagagagaggaaataaagtttaagattgtaattataggaaggttattagtataatgttttattttttgtttgttagttggtttatgtatttggaagaattagcgtcgaatataggggagatgtaaggaattaattaaaatttaaaagttagttgtatgttaatgtttatttgttttgttttttatagggtttattttttttttttaggattgtatgagggttagaaagggtatttttttagtattaatatggttgtgatttttattttgtttagattataaaggtttatgttatttggggaaatgtggaaattaggtattttttatggatataaattattgggtttttttatttttatagtagggtagcggttatttgtaaaaatattgattaaagtgaaattagagagaagaggagagttatatgtttttttagggtatttatatagttttttaatttaaacgtgtttttatatgtttaaagttagagtaaagggagattttttattgatttacgtgtttgttaatatttaatataagtttttatttgaattagtttaaattggaaaaggggttagattatattagttaaataaatatttatttattaattaattattttttaaaaaggttaaggttgtaaaatgttattaatagaaatttttatgattttttaaaaatattatttttggattttgttaaggtatatgaatagttaagtttattagttatatatcgatttatttttttgtattttgtttttggtatgtataaatatattatacgtgataaaaaggataaatgtaaaagttgtttattttattaataattttggtagataagagagaaatcgtgttggtaagtgattagagatttatatgcgtagagtaagagatttaaagtgtacgaggaaattttttttaattttaaaattttatttttttagttatacgtggggatgagattggaggttagtaagtatgagtagttatattttgttttattattatttagtatgttataattttgatgtaaattttgtgtttaagagtttaacgatatcgcgttgtagggtagtagacgtttgttacgtaagttttgtagggttttttttagttcgtttcgttttatttttttattttaattttttagtggcggggggcgggggggtttatttttgaagttaaattaatatttttttggaaaaatatttttttgtgtaggaatttgtgagatgtgggtcgttttttatttggttgcgacggtttaggagcgtgggggaagggaaagtaaaatgattttttaaggttttttttttgaagtttagagatttgtaggataagtattaagttttatttcgtcgattgggagttggaggtaacggaattgtattttattaataggaaaaaggataaaatgggttttagcggtaattttagtttttttttagtgggatttattttcgaagggtgatttcgggtgttttttgggttggggaaaatgcggttagaaattattaaattcgtgagtagtttcgttttttaagtttaggatttttggggtttagttaaaagttaaaagaatttagagtagacgagagaataagtcggtttcggttaaagaggtttgcgatagagtatagagagtacgcgggtaaacgtgtagaattattttataacgattcgtttttttttaacgtttagtttgtttagcgttagtttgttagaaagcgatattttggaaatatagttggggagagaggtcggtgattcggttaacgagggagtcgattgtcgacgtgcgtttcggaggtttgtagaatgcggaatatcgcgcgggtaggaatagggtttatattatcgttttatatttcgtttttcgtatcgttttttttcggtcgttgttttcggcgcgttttgttgagtagtcgttattggttatagtttatcgcggtcggcgcgttgttattgttttttggcgttgttcgtttgcgagggtattagtgagacgtgcggttttcgtttgttacgttcggtacgtcgcgaatcgtaaggaattttttcgatttaggggcggagtaggaagcgtcgtcggggggtttataagggtagcggcgaagattcgggtgacgttgcgaacggacgtgaagaatgtgcgagatttagggtcggcgtcgttgcgtttttcggaattacgtttagagtagtcgcgtttttgcgtaaatttagggttgttttggaaaaggcgtaattttaatttcgtggaattcgaggttgttttattaggattaatgtaaatgttatttttttttggaaaattttggttttttagttttttttatggaattttgttttttaaggtttatttagtaatagagattttttagaagttggaagaggtttaggtttattttggtttttattttttttaaaataaaaaatgtaatgtaatttttttggttatggtatgattgatgttaatggtaaatacgtggtattttttatatattaattaacgtttataaaacgtagtagtgattattgttatttttattaggtaaatgaaataattgatgtatagagaagtttagtgggttaggcgcggtggtttacgtttttaatttcggtattttgggaggttaaggtcggtagattgtttgagtttagtggttcgagattagtttgagtaatatagtaaaattttatttttattaaaaatataaaaaattagttagacgtggtggcgggtatttgtagttttgttattcgtggagggtgtttaagtttttagcgttttgaattaagaattggacgaaatgtataaagtaaagaaagaatgaagtaataaaagtagagatgtattgaaaacgaaagtgtaatcgtttaatgggtttattttgttcgttgtttagatagagttgatttatgaagacgggaattgtaatggcgaaagaataatttacgttgagcgttgtgcgggagattagagttttattattatttaaattagtttttttgagtattttggaattagagtttttaaggataatttggtaggtatgggttcggaaagtggggagtgttagttggtcgggatgaagattaaattacggggtcgaagtgagtttttgcgagttttttttgggtgggatcgtggagttagttgagttagattattagtttgggtggtgttttttgttgtatgagaatgtagggtttgtaaaatattttaagtattgattttaggatttgtaatggtgatgttatttttagaagtaatttggggaggtttagatttttgtagttagaggttgtatggtttttaaattgtaatttataattttgtagttaatttgttatatttataaagaaaggtagattggttttagtaagaaggggaaagggttgttattaattttgttttagagtttatattataaatttttttttaaggttagtttggtttatatttaggaatgaataaagatattttagaagttagaaggaagatagggtaggttaggtttgattttttttattgttataatttttttagttatgatttttgtaaaggcggttttaaaagtatattttataaggtgagagtaggtttgagtaagtagtttaagagtttggttatagaattttttggggtttaaatattcggtagaggttttttattagttatttggtgtatattttatgtaaatgaagtagtggtttatggttagtttgattggttgtagaaagtgattaattagaggttgaagtgaagttataaagttatatttttatataaatgaaaatttggtttgttattagtttgattggttgtaggaagggattaattagaggtatttttaattttttatttaattgatttttatttatagtgttgggaaaatatatatattgattgaggagatattttagttaattaagtgtgatgatgatatattatttagatttttttttttagaattgaggtatttattattagttgttgggagtattagttgttgatagtttatagttgagtttttttttagaaattgttttttgttgaaggaagttgttttgtttaaggttatatcgattttttaggggtatttattagtgattgtttaatgtcgttttaaaggtttggtttttttgttttattttaggacgtttttaaaggattagttttgttttagaattgtttgtggggttggttgaagtttttattgagattttttttttttttatttaaatttgatttttttatttttttataggatttgtttttagaagtaatttttagtgatttatttgtatataaattttaattttagagttattttttaattttaagatggtgtttatgatttttgttttttagtgtttatatttttttataattttttttttttgaatgtgagttggaattatgattggtttttaattaatagaatgtggtagaagtgatgagatataatttttatgattagattatgatgtatataggagattttatttttttagtttgttttagagagatatttttgttggttttttttttttttttttttttttgagacggagttttattttgttgtttaggttggagtgtagggatataatttcggtttattgtaattttcgtttttcgggtttaagtagtttttatgttttagatttttgagtagttgggattataggtgtatgttattacgtttagttaatttttgtatttttagtagagacgtagttttattttgttggttaggttggtttcgaatttttgattttaaatgattcgttcgattcggttttttaaattgttaggattataggtgtgagttattatatttagtttaatgttatttttttaaattaatgagaatttttgataaataattttgtaattatttttatttttgatttattttttttttttaaaaaatttgaatttttttattgttttttagagtattttttaaggtaatttggaagtgtgttttaggttgtagtttttaattatggtttaaatgatttttttatattttgtttatattttttttttttaggtcgatatgatttatggagaaaaattagttgaagatatttgtaatgttaaatttgttaattataaaatgtaattgggagatagattgtaggtaattttatgaaaaaatttaataagattatattgaaaaaaaatatattttttagaaaaatattagtaatatggtattagagatagatatagttaagaaattgattaaaatatgtgtatgttttaaaaaaatttgtttgtggttattttttttggagggagcggggagggttgtttgtttgtttgttttaaagataggatttcgttttgttttttaggttggagtgtagtttagtaattagtttattgtaattaggtttaatttttggggtttaagggatttttttgttttagttttttaagtagttaggattataggtatgagttattacgtttagtttttttaaattttttaaagtattttagtttaggtgataaattatatggtttttttaaggttataggatttttttttttgtggtttttttttattttttagtttagttatttattatttagatttttttttatatataagtgtagttttttgtaaatataaaagatttatttaaattgtttattttttattatatttaagggagatattaaaggaagggagataggaagtttagaggtataaacggggtcgggtttttgttttttgagaggtttttttttgttaattaatttattaataagttttaatagttgttttagaaatagattgatatttttagggatatgtgagtaaagtagtgagaaaagaaaaaaaaacgtatatatatagtaatatatatagaaaaagagaaagagtatgtaagagttttaaaaatagtaaatataattttaattaaagagaattttataaatatgaaggtaagaggtagagtttatatgaattttagatttttttgtattaattttttattgtgaatttttggaggaaagtttatgttattatttacgttataatgttttaatattttttatattggggtttttattattaggttattattgtaatagagattattttttttttttttattaatagaatttttaaattttaattaaatatatggttttttaataagagattatatttttttattttttttgtggtttggagtgattatgtgagtaagttttgggtaattgatataagttatttttatatagtgattttaaaaaggaaagtttatgttgtttttaggtttttttttgttttttgttgattgggagatggtagaagttggggtagttattttggttttagtgatggtagtgtttttttattagttttggattatttatttttatattgttaatatgatagagaaattaatttttattttgtttaaattatttgtgtataatttttgttatagtattagttttttttttaataaaattatggtgagttaattttgtaaaatgaaaaaagtatatattgagttattggaatatgagtagaaagattaatgggatagaatagaaagtttataaatagaattaaatgtatgtagaaaattagtatcgagttaaattagtggggtaataatggatttttattttaaattaatggttttgagataattgtatagttatatagaaaagataaagtttgattttttttttatatatatggtaggtaaattttgagtgatataaagatttaatagatttattttttgagttagtagttttatttttgtgaa

SEQ ID NO: 1441 - DNA, 5962 bp, Artificial Sequence
  chemically treated genomic DNA (Homo sapiens)
atgtattttaaagtttttttaatgttgttttaatttttaaaaatgtatgtattgttttaataatatatgtgatgtgttatattatagatggggttatagtggttataaagagttatattttgaagaatttgaaatagataggtaaggaaaataggtttattgaaagaaattaagatggtataaaatttgtattataaattgattttttaatttttacgaagaatatatttgttattaaaaatgtagttagagaaataataggtgatttagttaggaggtgatttttgtttttttattttttggttgatgtttggtatgtttgtaagtattttggtttttatatatagtattttatatagtaatttagtatggtagtttagaatttttatttttattttaaagatgaggaaataaaaatttaatgagaatattaaagtgttaaagtatatattaaagtgtttatttaaaatttagatgttaattttaattttttaatttagaatgtaaaatattaaaataatacgttttttttttatataaaagtttttattttttaattttttttattagtagtgattagtaagatattattaacgggaagaaaatatttttttaggtaaagttatttatttatgaatttcgtaaatataagaagttaaagaaattttataaaaaaaagtagaaaaaaaggttatataaaaaatagaagaaaagtaaaaaggaagttatagatataatagtagatttttcgagtgagtttttagaagaaattggggtttttggtataaggaaagggaaataattatataaacgtaagaaaaaatttaggaaaaagttttttaaaaaatttgttttatttttagaggtagaaagtaatattttatatttagatgatttagtatttagtagttttgaggaaagtgaggaaagagatattaagaaaattaaaaggaaaaagagagagaaaaaagtttatatttttgtagttaataatgaaatataggagaggataaataaacgtataaattggaaagtagttatagatgaaaggtttgttgagagtttagaggatgattaaatgggaaatatttttgttttttatatgattgtggatatttatagtttttattttttgtggttttgttagtgatttttgtttagtacggggtttgaggttagagttgttttgtgttatttgtatgttttgatagacgttttgttttttattttggcgttaagtttgattttttttttttgttaaaagggaatttggtattttgttatgaaggttttttgaagagatttttttttttgtaattaattacgtttagtgtagagtgtatatatagtaaattaaaggatttagaaagttggatttaatagtgatttgggtatattaatcggaatattgaatttggggaagttaagggttgggattaagaggtggattggaattaatgttatgtaggatggtatgataaggtaatattgtattgttttttgtttatatagtaggtgttataattaatttgtttttagttttggtgttttgatttttttatattttgattttataggtgtggttcggtttatttaattaggatatgggtttaagaataaattttttttttttatgataatatttatagataatttattagaagggattagagtttttgtaaatttttttgttggatggggtttatagttatatttagtatatgtttaaatatggtaattggatagtaaatggttttttagttttattgttgtatatttgtttaaatggatttgtgtttaaattatttttttaattgttatagataattttgtattaaatggggaagaattaggaaataattatgttgtttaatggtattttggatttagggtagtaattgttatttaaatgttgttttgtttatttttaaatttgtttatgaagtttaggttttttttgaaattaagttgaattatttttaaaatgaaataggttttttagggatatatttatttttttttagtttgtttttggattaaagtattaagtagagattatattaattttttttgttatattgtgatttttagtatgttaatttttaagaaattaatatattattgaaagaaggttggtagaacgtaagtgtatttttttattgtgggaagaaagattaagtgacgtattatttttttttggttgttatttaatgggttgagtaaaaagtttgaaaatttagattttcggttttggttttgttatttattggttatgaggaggtttagagtaggtaagtttatttttttggttttatttttttgatgtgtaatacggaattattttatagtagtatgatagtataagatattagtagtagatataattatgatgatattttatgagttggtatttttagttttaattgttaaatttgttttttttacgggatagatttttaataaagtgtttggttttaaaatatatggttggatagaggtgttttattttttaattatgagtaggtgttattttttgggatatttattttaaattttaatattttggtatttaattgttagtgttttatggtgtgtatttttatttttgggattagtgggggtttaaagggagaagaatagtttttaattattattttttaatttaaagtaattattttgtttttggagtaagttaaatttttgttggaaggagttttggttatatattttttagtatgtattgtttttgtgttttgaaagtatttgaaaggttttaagtatagatttaggaaaatgtgttagtagaataggttatttttaggaaattggttttatttgggttttgatttttttttttttttaaattagtaggtttgttttttcgtaaggaatatatattttgtttttttttttttttttttgttatgtttttttttttttggttatgtataagtaataaagttgttttttgttttttattttttttaattttaaatttttttttatgttttaggtttcgatggtttttttaatttttttaatatggtttagggtggttttttaaaatttataattttttatttgtattattggttatggaatatttatttttagtgtttttgttaattagagatttttatattaaattttaaaatgggattaaaagaagagttggagaatttatatttattgagtaattgatgttatataatttggaatttttgaattttaaataaataaattttattttttgaatattttattttttattttttagtattaatagatttgataatagtttgatgttgatttgataatgggttgatagtttttttttattgatttttaaatttgtttagtaataagttttttgtttttgttatttttttgggggatggtttattgtttttttttttgtataatttgggtaaatcgattggtgatggtaagagtggtgttaatgaagcggtttatatagttggagagataatttttagtgcgagagtttaggcgattttttggtttttttatatatttattttaatataattttatgaagtgatgtatttaaaaggaaagaaaaatagtaattattggggtttgtagataggtttaatttttgtttattaattttttattttttgatatttgataaaattattttttaaattaattacggagttattttgggtttttttttttttttattttttaattagttattaatattgatttagattttcgtttttatagattgtatatttttaggtaggattaataattttttatattttttaaagtagttagtattattgtgaattaattagggaattaattaatttttttaaattattgtatttattttattttaaatttattttttagataaggtaatttttttattaattttttgggggttatggatttattttttagaaaaatgtatatataggtatagaaattatgtgtattgttattagaatgtttagggtttaaagatttttagttagggtttttgttggttattcgagtatttttttttttttatttaaaaggaaaaaattattttattaagagtttattatttgtgaggttgggtattaagaaattagttttttttaaggtttttaaggatagttgttattattttttatttaagaggcgtgattatgtagtttaaggttatgtagttagtaagaagttaggtcgcgttagaattatgttcgaagggttttaaatttttgttttatatttatagtttatagcgattattttagagtttattttttttcgataatgttttagtcgtttttaaatatattgtcgtatatgatttttataatttagtgaggtagtggggtgacggcgaaattaaaatttatagtggatgagtattttttttacgggtacgtggtttgtaaggagtagagggaggatgagaatttagatttttcgaatgttagtttagttatgtcgtcggttaattagtttttcgtatttttgcgtcgtttaaattttttttgttttatatttttttttttttttacgttacgtttatatatttggtatttgagtattatcggttattagggataggagagttataattttgtttttcgtgaggggaatgggatgtagtcgggatcgagtattagtgagtcgttagtgtatagattttcgagcgtgtttaggattattaaggaaggtgaaattttttttttttttatttttttcgttttcgtatttgtgtagtaaattgcgttttttgttgttcggcggttattaggcgttgtaatttcgttttatcggtttcgtttagtttcgttattgttcgttttaggttcgttatttttcgatagttgtgtttgcgtatgcgcgacgggtgtgtatcgtttttcgattttcggtttatttagtatttttttttttttgttttttttcgtcgtcgtgggtgggaattgtcgtttaagtggtttcgggttggtggatgattttgagtttttaggaacgagatggcggttttttggaggttgagtgtcgtttgcggtgttttaggaggtcgaggtgaggggtttttttattttgaggtgtttagcgtagtttttagttagggaaggggatggaagtgaggatttatttgtcgggtgggagattttttgaggagaagaaaatatcgaaattatagtaatgattattgtagtttaggggtttagatgtttattcgaaggtatattttatttgttgtgagttgacgagttgagggaataattagaaagagagttttttttggaagtcgtagttttgatgaggttaatttatatagtagttttgtttttttttcgtttattgtttttagaatgttttttattcgtttttattttgagtcgggaaagagggttaggagtttgtttattttttttggagttggtgtgtttggatgtgggagtggaggggggattagttcgaaaattatttaatttgggtatttgtgttattttaggtattgtagtaatgttaggatataaatgtgaagaaaacgtagttttcgtttttaacgagtttttattttgatgaggaaaatattgttatagtagttcgggtaagatgaggttttgaattaggaaagtagtataaagaaaagaagattgttttaagaattgttaaagagatacgttaataggatttggcgattgaatttaggggaaaagttttttatgatttttagattattgagttaggttaaagaatgtttgaggtgttattaaataaagtagggaatatgtagatgttttttggttttaattttatagtaattttagtgaaatagatgttatttttattttataaataagatgttattttttatttattgttaagtagtttatttatggttatttagaaagtttgttagttttgttaaaggagaggtttttatgattattttaatgattttttttttagt

SEQ ID NO: 1442 - DNA, 5962 bp, Artificial Sequence
  chemically treated genomic DNA (Homo sapiens)
gttgaggaaagagttattaggatgattataagaattttttttttaataggattgataaattttttaaatgattataggtaagttatttaataataaataggggataatattttatttgtaaaatgaagatagtatttattttattggggttattgtgaagttaagattagggaatatttgtatgttttttattttatttaatgatattttaggtattttttaatttaatttagtaatttggaaattatgagagattttttttttaaatttaatcgttaaattttattggcgtatttttttaatagtttttgagataatttttttttttttgtgttatttttttagtttaggattttattttgttcggattattatgatagtgttttttttattagaatgaaagttcgttgagggcgggaattacgttttttttatatttgtattttagtattattatagtatttgaggtaatataaatgtttaggttaaatgattttcgaattgattttttttttatttttatatttaaatatattaattttagaagaaatgggtaagtttttaattttttttttcgatttagggtgggagcgagtggggagtattttagggatagtgaacggggagaaaatagaattgttatgtggattagttttattaggattgcgatttttagagggagttttttttttgattatttttttaattcgttagtttatagtaagtgaaatatattttcgggtaaatatttggatttttagattatagtggttattgttgtgatttcggtatttttttttttttaagagattttttattcggtagatgagtttttatttttatttttttttttggttggaggttacgttaagtattttagggtgggaagattttttatttcggttttttagggtatcgtaaacggtatttagtttttagagaatcgttatttcgtttttgagggtttaaggttatttattaattcggaattatttaggcgataatttttatttacgacgacgaaagaaaatagggaagaggaaatgttgggtgaatcggaagtcgagaggcggtgtatattcgtcgcgtatgcgtaaatatagttgtcggaaggtggcgagtttgaggcgaataatggcggagttgggcgaagtcgatgaagcggagttgtagcgtttggtggtcgtcgagtagtagaaggcgtagtttattgtataggtgcggggacggggagggtgaagggaaaggaagttttattttttttggtggttttgggtacgttcggaggtttgtatattggcggtttattggtgttcgatttcggttgtattttattttttttacgaaagataaagttatggtttttttgtttttggtgatcggtagtgtttaggtgttaggtatataagcgtagcgtggagaaaagaaaaggtgtaaagtagggaagatttgggcgacgtaagggtacgggagattagttagtcggcgatatgattgggttggtattcgaaagatttgggtttttattttttttttgttttttgtaggttacgtgttcgtagaaaagatatttatttattgtgggttttggtttcgtcgttattttattgttttattggattgtgaggattatatgcgataatgtatttgaaaacgattagaatattatcggaggaaggtggattttgaagtagtcgttgtagattatggatgtagaataagggtttggagtttttcggatatggttttaacgcggtttgattttttgttggttatatgattttggattatataattacgttttttaaatgggaggtgatgatagttatttttgaggattttagagagaattgattttttagtatttagttttataaatagtaagtttttggtaaaatggttttttttttttgggtgggaggaagagggtgttcggatgattagtaagaattttggttagaaatttttgggttttgaatattttaatgatagtgtatataatttttgtgtttgtatgtgtatttttttggggagtggatttataatttttaaaaggttaatggaagaattattttgtttaggggataggtttggaataaaatgagtgtaatagtttgggaaaattaattggttttttagttggtttataatggtgttagttattttggggaatataaaaggttattagttttatttgagaatgtataatttgtagggacgaggatttggattaatattggtgattaattaggaaatgaagaaagagaagagtttaaagtgatttcgtggttgatttaaagaatggttttgttaggtgttaaaaagtgagaagttaataaataagagttaggtttatttgtagattttaatggttattatttttttttttttttaggtgtattattttatggagttatgttgggataaatgtgtggagaagttagggaatcgtttagattttcgtattgaaaattgtttttttagttgtgtagatcgttttattgatattatttttgttattattagtcggtttgtttagattgtatagaaaggagggtagtaggttattttttaggagaatgatagaagtaaaggatttgttattaagtagatttaagggttagtgggggaaggttattaatttattgttagattagtattaggttgttattaagtttgttggtgttaaaaagtaaaagatgaaatgtttaaagagtgaaatttatttatttggaatttagaaattttaggttgtatgatattagttatttaataagtgtgaattttttaattttttttttaattttattttagaatttaatatagagatttttgattggtaggaatattagaaataaatgttttatggttagtagtgtaaatgggggattgtaggttttgaaaaattattttaagttatattaagggggttggaagaattatcgaagtttaaggtatagaagaaaatttggggttaagaaagatgaagaataaaaaatagttttattgtttatatatgattaagaaaaggaaaatatggtaaaaaaaaaaaaaaaaaggtaagatgtgtattttttgcgaaagaataagtttgttaatttgggaggaagggaaggttaggatttaaatagagttaattttttggagatggtttgttttattggtatatttttttgagtttgtgtttaaaattttttaggtatttttagggtatagaaataatgtatgttaaaaaatatatggttaaagttttttttaataaagatttaatttgttttaggaataaaataattgttttaggttaagaggtagtaattagagattatttttttttttttagatttttattaattttaaaaataaaaatatatattatggaatattgataattgagtattaaagtattaaaatttaaaataaatattttaaaaggtagtatttgtttatagttaagggatagggtatttttgtttaattatgtattttaagattaagtattttattagaaatttgtttcgtaaagagaataaatttagtagttagaattaaaaatattaatttatggaatgttattatagttgtatttattgttggtgttttatattgttatgttattgtgaagtaatttcgtattatatattaggaaagtaaggttaggaaggtgaatttatttgttttgggtttttttataattaatgagtggtagaattaagatcgaaagtttgagtttttaagttttttatttagtttattaagtgataattaggaaaaaataatacgttatttgatttttttttttatagtgaaaaaatgtatttgcgttttgttagtttttttttagtgatatgttggttttttaagaattaatatattaaggattatagtatagtaaagggaattaatgtggtttttgtttggtgttttaatttaaaggtagattgggaagaagtggatatgtttttgagaagtttgttttattttggaaataatttaatttagttttagggaaaatttaaattttatgaatagatttagaaatgaataagataatatttaaatggtagttgttgttttgaatttagagtattattagataatatgattattttttaatttttttttatttggtataggattatttatgataattgaagaaataatttgaatataagtttatttaggtaaatatatagtaatggaattagaaaattatttattatttaattattatgtttaggtatatattaagtatagttataggttttatttagtagggaaatttgtaaaaattttagttttttttaataagttgtttatggatgttattatgaagggaaaaggtttgtttttaggtttatgttttgattaagtaaatcggattatatttgtggggttaaaatatagaaggattaaagtattaaggttaaagataagttagttgtgatatttgttatataaatagagagtaatatagtgttgttttgttatattattttatatggtattagttttaatttattttttgattttagtttttgatttttttaaatttaatatttcgattggtgtatttaggttattattggatttagttttttgggttttttaatttgttgtatatgtattttatattaaacgtaattaattgtaaaaaaaaaaatttttttaagaaatttttataataaaatattagatttttttttaataagaaaaggggattaagtttaacgttaaaatagaagataagacgtttgttagaatatatagatggtataagatagttttgattttaggtttcgtgttgaataagagttattggtaaaattataaggagtaagaattgtaaatatttatagttatgtggaaaataaaagtgttttttatttagttattttttgagtttttagtagattttttatttgtagttattttttaatttgtgcgtttgtttgtttttttttgtattttattgttggttatagaggtatgggtttttttttttttttttttttttttggtttttttagtgtttttttttttattttttttagaattgttggatgttgaattatttgaatgtgaagtgttattttttgtttttaagaataaagtaggttttttgagagatttttttttggatttttttttgcgtttatgtggttgtttttttttttttgtattagaagttttagttttttttgagaatttattcgaggaatttgttgttatatttgtggttttttttttgttttttttttgttttttgtgtgatttttttttttgtttttttttgtgggatttttttgattttttgtgtttgcgggatttatgggtagatgattttatttggggagatgtttttttttcgttggtaatattttgttgattattattaataagaaaagttaaaaaatagaagtttttatgtaaaaaaaaagcgtattattttaatattttgtattttagattaaaaaattgaggttaatatttgaattttaaataagtattttaatgtatattttaatattttaatatttttattgagtttttgtttttttatttttaaaatgaaggtaaaaattttaagttgttatattgagttattgtatggaatattatatataaaaattaaaatgtttatagatatgttaaatattaattagagaatgggaaaatagggattattttttaattaaattatttattgtttttttagttatatttttgatggtaagtatatttttcgtaaaagttaagaaattaatttataatatagattttgtattattttagttttttttagtaagtttattttttttatttgtttgttttaaattttttagggtataattttttataattattgtgattttatttgtaatatgatatattatatgtattgttaaagtaatgtatatatttttggaaattaaagtaatattagaaagattttggagtatat

SEQ ID NO: 1443 - DNA, 6308 bp, Artificial Sequence
  chemically treated genomic DNA (Homo sapiens)
gttttagtttgcgaagatgaaaatgttttggagatggatggtataatggttgtataataatgtgaatgtatttagtgttattgaatgtatatttaaaaattattaaaatggtaaattttattacgtatgttttgttataatgaaaataaaatgtttttgtttgtttattgttgttatgataaagattttaatatttgatattttttataaggtttaatatgattagatttattattttatttcgaggtttttatattttagttatattaattgtttttttttaagttattgatgatattagatttttttttattttaaattttttttaacgttttttttggaatgaaatgttttttttttttttttatttggttaggtattattatttattgttttattttttagtttatatagtattttttttaggatattgtttatgattttttttaatgatagatttttttatttataatttaatagtatttatatttttttgttgtatttattataattatgatttattatttagtatttgttttttgtaatatattgtaagatttgtgagattagagattattttgttttttttttttttttgagacggagtttcgttttgttgtttaggttggagtgtagtggtgcgattttggtttattgtaagattcgtttttcgggtttacgttatttttttgttttagttttttgagtagttgggattataggtatttgttacgatatttggttaattttttgtatttttagtagagatgggtttttattttgttagttaggatgatttcgattttttgattttatgattcgtttattttggttttttaaagtgttaggattataggcgtgagttatcgcgttcggtcgagattattttgttttatttattaaatattttttaaagagttgttatttagtataagtttaaaatatatttatagagttaatgaattaatatacgaacgaatatatttaaatggtaaagaataatttattaatgaaataatgagggtcgggtgtggcggtttatgtttgtaattgtagtattttgggaggtcgaggaaggtagattatttgaggttaggagttttagattagtatggttaatatggcgaaacgttatttttattaaaaatataaaaattagttgggtatagtggtatgtgtttgtaattttaattatttgggaggttgagatacgagtattgtttgaattttagaggtggaggtggaagtgagttaagatcgtgttattgtattttagtttgggtgatggagtgagattgtttttaaaaaaaaaaaaaaaaaaaaaaaagtaaggattattatttaaaaggtattttaaagaaaaggaaaatatataatatgtatttattattttaaaaataatataaattttttatagaaaatttggaaaatttagataaaatataaagaaaataaatattgttttattttgtaatttagtggtaattattgttgtatattttggtatatttttaatggtttttttttcgattttagtgttatttataggggaataagatttttttttttgttttttataaatattataatttggaaatttttgtaagttaatttttgaacgtgggtagaatttgtgaatacgatgatatattatttttatgaatacgttataaagggagattatttaggtaggtttaatttaagaaatggggattttaattttataattgtaaggaaatagattttgttagtaatttgaatgcgttgtgttaaaattagattaaattttaaaaatttttaaaagtttagtatgtatataaagaatagtttataaattggaagatatttaattaaaagtggtaagaagtttagtttatagtagttatagtatagtttataaatattgaggaagaagtattttgattttcgttatattttttttaaggcgagtagagttgttaagttgatttgtttatagttgattggtttaattttattgatttatattgttaaggatattttgtgttttgtttatgtttagagtaagtgttttagggaaataaggatgatttaagttttggttatttggttatgggtggttggatttaaaatatttaaattggagtttttatttttatttatttttaatatttgaaagaaattttttttagagtttttagataagaagttagtttggtttttgattttaaattaaggtgttttttttagaggttttagataagaacgtattaagtttgggtgggtttttattttgaggttttgggaagaatttaatgaaattaaattaattggttatagataaattagtttaaataggtatgtttgttttaaaaagaatttaatgaaggttaaaatattttttttttgatgtttataagttgttatatattcgtgattattaggattgaatttggttaaattttttgatttatagaattgggattttttatttatagaattgtgatattataaatgggtgttgtttttagttgttgagtttgtggtaatttgttatatagtagtagaaaagtacgggttgagtattttaaatttaaaaattttaaatttaaaatgttttaaaatttaaaattttttgagtgttaatatgatatttaaaggaagtgtttattggaatattttgaatttgggatttttggatttgggatgtataattattgtaatgtaaatattttaaaattcggaataatttaaaatttgaaatatttttggtattaaatatttcggataagggatatttaatttgtaatataaggggattgtataaaggtatgattattaggaggtaaggaatatggggattatgttaggtttgtataaggggttatagtaattttgtttagaatagtagaattgttagttaatttatagaattatgaattataattatgaatgggggttgttttaagttatttagatttagattggtgtgttatgtagttaaagttaattgttataatttttggggtgagagaagtatagattaattttttttaaatgaaaagttttattatatttttaaagatattgaagaatatagaaagggtatgagatttgaatttgggttcgtgattttataagttattatttattgatgatttatttattagtattgtggtaggagttgtatattttttatttaaattatataattttaaggtaggtattttgaaggtttagtgaatttatgttatatttttattttgtggagttagataattttgattatatttattatttaatttttaattttttcgtttataaaatgggtttgattatattatttaatttataagattatattgttttgtaaatttttgtgtaaatattagaatttattattagtagtttagggtttcgtttttatataatatttgttatcgaaatttatttatagtgattatattaatatattgtatttatatagtatgtattatatgagtatgtatattaatatttggtttgtgagagtttgtatttttatgggtttgttcgtttttttgtttgattaagatatattaattaattattaaaagaatataatttataggtgaatgatatgttttggttttggaattggggaaggggagttaatatttttgaaggtttttatgttttaggtattaggttagatgatttatttttaatagttgattatgattgaatttgtttggattgggttatttagaaattattttaagtaattttattgtgagtatgggttatagtaggattttattgtgtatttatgattgagaatttttgatatataaaattttattaaattttgtaaaaatattttaaagtaggtgatatgtttattttatagtaaggaaattgatgtttacggatattaattaatttttttaagagtatatattttgtaaagttaagttttttgttattttattaaaatgataggttttttgaatagaggagataattatttttattaaattaagggagatattaaatcgaaaagtaagaaagattgaagatttttatttaataattaaatttttttggttgattttgttatttttcgtgaaatttttttagttatgttagtttttgtttgttgatttttttattttatttttattatatgagtaattggttaattttgatggtgtttatatttatttttattatatatttgtttttatatttgttaagttttgtttgtatattttttagttgttaatttggtgttatagcgggtaaattatgggaagagttttggttttggagttagattatttgaattggtttttcgtatggatttagttgtgtggtaatgagataaggtattttattttttgaattttagttttgtaagtataaaaaggggaaaaataaaatttagagtttagtaaggtttagaaacgttatatttagtaagttatagttaagttatcgttattaatggtagttaagtgtgtggtgtagtaggaaatatttggagtcgatttttttacggaatttaaatgtttttatatttagggagaaatagaaagaattacgatttatgaaatcgagttggggttggtatttttgatttttttaataggtttttagaaagttatttatatacgatgtattcgttaaattattggaaattattttattttgtatttttttttattttgttttacgtttttgttttatgatcgggtttttattttaatttttgttttaatatttagaggaggagttgcgggtttttttttatagtggataggatttcgaaggggagagtaaattagtaaggttttatttattttataggaggtttagagatcggcgttttttttttttttttcgtcggatttgttaggaggtgggttggcgcggagggagggttttgttttttgtttttttaaggaggagggttaaacgtcggtttagagtgcggcgtagtttttattcgtcgtgtttttattttagagtagttgtagttttagtcggtcgttttttcgttagttaagttcgtcgttttgattttcggtagtaagtcgttattatggtgaagatcgtgatagttaagatttaggcgtattaggattagaagtcgggtacgagcgggttgcggaagcgggtgaaggtgttttagagtagcgttaattacgcggagaattttatttagagtattatttttatcgtggagtcggcgtagcggtaggaggttacgttggtggtgggcggggacggtcggttttatatgaaggaggttatttagtttatcgttcgtatcgttgtcgttaacggggtaagggatgcgcggtttcgcgtcgttgtgtattttggcgcgtgtgcgacgtgcggttcgcggcgttttttttcgttcggggtcggtcgttttcgcgcgttgtcgtttcggtttttatttttcgtttttttttttttttcgcgttcgtttttttggtttggaggttcgacggaggtcgtcgggttggggaaagtggttacgggattcggtagatttgttcgtttgattttcggggcgtcgggaggtgcgggcgcggagttttttaaggttacgttcgatttttcgtttttagtcgttgtttttttttttttcgtttttcgtttttttcgaggcgtttgatatttgttttaattttgtagttttggaagatacgattacggcgtagagtgttgtcgttttaagtaggaaaggttagattgtcgtcgtttcgtttagagttttttcgtatttcgttcgtttttttgttattttcggttaggattggcgtttttcgttggttcggagttcgatattgtggggtaagggtggcgagagtatttatttttttggggcgttaggttggtagattttagtaggcgggtgttaatttttttttttcgttttttagtttgttttggtttcgaatttttgttttttgcgcggtttgtttgttggggggtaggcgtttgaaatatttagtttttgtttagtggtgttcgggatttgttttatcgacggggttggagttgaatttttattagaatggtaatatatttaaagacgtttttacgtaagtaagtagtcgtggtaggttaggaaattatcgtaatattttggtttcgttttcggttaaggaaagttaattgatttgattgggcgggtttattcggataggggaaattaaaaaaaaaaagttttttagtaaatttgatatatggaaatgtggggtcgggtatggtggtttacgtttgtaattttagtattttgggaggttgagggtggtggattatttgaggttagg

SEQ ID NO: 1444 - DNA, 6308 bp, Artificial Sequence
  chemically treated genomic DNA (Homo sapiens)
tttgattttaggtgatttattatttttagttttttaaagtgttgggattataggcgtgagttattatgttcggttttatatttttatatattagatttattgaaaaattttttttttttaattttttttattcgagtggattcgtttaattaagttagttaattttttttggtcgggggcggaattaaggtgttgcggtaattttttggtttgttacgattgtttgtttgcgtaagggcgtttttgggtatgttgttattttaatgaaaatttagttttagtttcgtcggtggaatagatttcgggtattattgggtagagattagatgttttaaacgtttgttttttagtaagtaggtcgcgtaaagggtaggagttcggaattaaggtaaattagggggcggggagaaaagattggtattcgtttgttgagatttgttaatttgacgttttagggggatgggtgttttcgttatttttgttttatagtgtcgggtttcgagttagcgggaagcgttagttttagtcgagaatagtagaggagcgggcgggatgcgagggggttttgggcgaggcggcggtagtttaattttttttgtttaaggcgatagtattttgcgtcgtaatcgtattttttaaggttgtaaggttagggtaaatgttagacgtttcgggaggggcgggggacggggagagggaaggtagcggttagagacggagagtcgggcgtgattttgggaggtttcgcgttcgtatttttcggcgtttcgggagttaggcgagtaggtttgtcgggtttcgtggttattttttttagttcggcgattttcgtcgggtttttaggttagaagagcgagcgcgaaggagagggaggagcgggaggtggaaatcgaggcggtagcgcgcggaagcggtcggtttcgagcgagggagggcgtcgcgggtcgtacgtcgtatacgcgttagggtgtatagcggcgcggggtcgcgtattttttatttcgttggcggtagcgatgcgagcgatgagttggatggttttttttatgtagaatcggtcgttttcgtttattattagcgtggttttttgtcgttgcgtcggttttacggtggagatgatattttggatgaagtttttcgcgtagttggcgttgttttggaatatttttattcgttttcgtagttcgttcgtgttcggtttttggttttggtacgtttgggttttaattgttacgatttttattatggtggcgatttgttgtcgggggttagagcggcggatttggttggcggaggggcggtcggttgaggttgtagttgttttggggtgagggtacggcgggtgggggttacgtcgtattttaggtcggcgtttggtttttttttttaaagggataggggatagggtttttttttcgcgttagtttattttttggtaggttcggcgggaggggaaaggggagcgtcggtttttaggttttttgtgaaatgggtggagttttattgatttattttttttttcggaattttatttattgtaaaaagaggttcgtaattttttttttaagtgttggggtagaggttggggtaggaattcggttatagggtaaggacgtgaggtagggtggaaaaaagtatagggtagaatgatttttagtggtttggcgaatgtatcgtgtgtaaatagttttttggaaatttgttgggagggttagaagtgttagttttagttcgattttatgagtcgtaattttttttatttttttttaaatgtgagggtatttgagtttcgtaaaggagtcgattttaaatgttttttgttgtattatatatttgattattattggtgacggtgatttagttatgatttgttgagtgtagcgtttttaaattttattaaattttgggttttattttttttttttttatgtttataaaattgaaatttaaagaataaaatgttttgttttattgttatatagttaagtttatgcgggaggttaatttaggtggtttggttttaaaattagggttttttttatgatttgttcgttgtgatattaggttggtaattaggaaatgtataagtaggatttgataaatgtaggagtaaatatatggtaaggataagtatgaatattattaaaattagttagttatttatgtaatagaaataaagtgaggagattaataaataaggattgatatggttggaaaagttttacgggggatagtaaggttaattaaggggatttgattattaagtaggaatttttagttttttttgtttttcggtttagtattttttttaatttgatgagagtgattgttttttttgtttaagaaatttgttattttggtaaagtggtaaaaaatttggttttataaggtgtgtgtttttgggaaagttagttaatgttcgtgggtattaatttttttattgtaaaataaatatattatttattttggaatatttttgtaagatttaatggggttttgtatgttagaaatttttagttatggatatatagtagaattttattgtgatttatgtttatagtagaattatttgaggtggtttttaaatgatttagtttaaataaatttaattataattagttgttagaagtaaattatttagtttggtgtttgaaatatagaggtttttaaaaatattagttttttttttttaattttaaaattagagtatattatttatttgtgaattatatttttttggtagttaattggtatgttttgattaagtagggaggcgaatagatttataagagtgtagatttttataaattaagtgttgatatatatgtttatatagtatatgttatgtagatatagtgtgttgatgtagttattatagatgagtttcggtggtaaatattatgtgaaaacggaattttggattgttagtaatgagttttaatatttgtataggagtttatagagtagtgtaattttgtgaattaaataatataattaagtttattttatagacgagagaattgaggattggatggtgaatgtaattaaggttatttaattttataaaatgaaaatatagtatagatttattgagtttttaaaatatttattttagagttgtatggtttagatagagaatatatagtttttattatagtgttaataagtaagttattaataaatgataatttgtaaagttacgggtttaaatttagattttatgttttttttatattttttagtatttttggaaatatgatggagttttttatttaagaggaattgatttatattttttttattttagaagttgtaataattagttttaattgtataatatattagtttaaatttgagtggtttaagataatttttatttatgattatagtttatgattttatgagttaattggtagttttgttgttttggatagggttattgtggttttttatatagatttaatatgatttttatgttttttgttttttgataattatgtttttatgtaatttttttgtattatagattgagtattttttattcgaaatgtttggtattagaaatgttttagattttagattgtttcggattttggaatgtttgtattataatggttgtgtattttaaatttaaaaattttaaatttagaatgttttaatgagtattttttttgagtgttatgttggtatttaaaaagttttggattttggagtattttgggtttgggatttttggatttgggatatttaattcgtatttttttattgttgtatgataaattattataaatttaatagttgaaaataatatttatttatgatgttataattttatagataagaagttttaattttatagattaaaaggtttggttaggtttaattttggtaattacggatatataatagtttataaatattaaggagaaagtattttgatttttattaaattttttttaaggtaagtatatttgtttaaattgatttgtttatagttagttggtttaattttattgaattttttttagagttttaagataagaatttatttaagtttggtgcgtttttatttggagtttttgggaagaatattttgatttgaagttaagagttaagttggttttttatttggaggttttgggaagaattttttttaagtgttaaagataaataaaaatagaggttttagtttagatattttaagtttaattatttatagttaggtagttaaaatttaagttatttttatttttttgaaatatttgttttagatataaataaaatataaaatgtttttgatagtgtgagttaatgaaattaaattaattagttatagataaattagtttaatagttttattcgttttaaaaagaatgtaacgaaggttaaaatattttttttttaatgtttataagttgtattgtaattgttgtgagttgggttttttgttatttttggttagatgttttttagtttgtaaattgttttttgtatgtatgttaaatttttaaaaatttttaaagtttgatttgattttaatatagcgtatttagattgttggtaggatttatttttttgtagttgtaggattgaggtttttattttttagattagatttatttggataatttttttttgtaacgtgtttataggagtaatgtattatcgtatttataggttttatttacgtttaaaaattgatttgtagagatttttaagttgtagtatttatgaaaagtaagagaaggagttttatttttttgtgggtagtattgaaatcgggaaagaagttattggaaatatattaagatatgtaataatgattattattgagttgtaagatagggtaatgtttattttttttatattttatttggattttttaggttttttatagggaatttgtattatttttaaaatgataagtatatattatgtattttttttttttttgaaatattttttaagtggtaatttttatttttttttttttttttttttttttggagatagttttattttattatttaggttggagtgtagtggtacgattttggtttatttttatttttatttttggggtttaagtaatgttcgtgttttagttttttaagtagttggaattataggtatatgttattatgtttagttaatttttgtatttttagtagagatggcgtttcgttatgttggttatgttggtttggaatttttgattttaagtgatttgtttttttcggttttttaaagtgttgtaattatagatatgagtcgttatattcggtttttattattttattaatgaattattttttattatttagatgtattcgttcgtgtattgatttattaattttataaatatgttttgaatttgtattaaatgatagttttttgaaaggtgtttgatgaataagataaaatagtttcggtcgggcgcggtggtttacgtttataattttagtattttgggaggttaaggtgggcggattatgaggttaggagatcgagattattttggttaatagggtaaaaatttatttttattaaaaatataaaaaattagttaggtgtcgtggtaggtgtttgtagttttagttatttaggaggttgaggtaggaggatggcgtgaattcgggaggcggattttgtagtgagttaggatcgtattattgtattttagtttgggtaatagagcgagatttcgttttaaaaaaaaaaaaaaagtaaaatagtttttggttttatagattttgtaatatgttgtaggagatagatattgaataataaattataattgtgataagtgtaataaagaagtataggtgttgttagattgtaaatagaaggatttattattggagagagttatggataatattttggagaaagtgttatgtaagttgagggataaaataatgagtaatagtatttggttaggtgaaaagagaggaggagtattttattttagaaagaacgttaagggaagtttaaagtaagaaggaatttagtgttattaataatttgaaaaaagatagttagtgtaattggagtataaaaatttcggggtggaatggtaggtttgattatattgggttttgtaggggatgttaggtgttgagatttttattataatagtagtgaataaataaaagtattttgtttttattgtggtaagatatacgtaatgaaatttattattttaatgatttttaagtgtatatttagtggtattaagtatatttatattgttgtgtaattattgtattatttatttttagaatatttttattttcgtaaattgaaat

SEQ ID NO: 1445 - DNA, 6106 bp, Artificial Sequence
  chemically treated genomic DNA (Homo sapiens)
gttgttgagggaattaagtatagtttatatgattttatagggaaaggatttttagaaatttttatatttgttttttattggatattgtcgtatatgttttttttttttatttatatgttttgtatttttttattgtaatatatgatagttatgaataagattatgagtttttttagtaaattattaaattagaagatttatatggtttttatattaatgaattttttaatattgtattaatattatatttttagaataaattatatttgattaaaatgtattagttttttaatgatgtgttatattgttattaatatttttatattttaattaatattaataattgatatttgtttataatttttttttttaattgtattaggtttaggtataaatgttatatttattttataaaaagtattagattttttttaattttttgaaatttttttttttataaggtgtaaaaatttttaaaattattgggattatttaggttttgaaattttgatataagttttttttgaaattatttgggtttaatgattgattttgaggaagtgttttgataaatttttttttttttgatagagaaattagtttatttaaattttttatatatagtagggtttatttgggtaaattatatttttgtaggaaattattattatattttttaaatatataatagagagattgtaggattttttaaatgtattatatgttatgttaatggttattttttttttgtttttttattatatatatattttagttaaggtagttagtaattggttttttttgaaaattttttattaaaaaatattatttttatttagtaattatgtgttttttaatttagataaattgataaagtaaatattgtttattttttgttttattgtttttttattttttttgtttgttttttttattttgtttaatatgaaaattttatttatttataatttgtatttttattaataaaagggtttagggttataaaattttttttggttatatttttgaatgtattataggtgttttgatatagaatatttttattatttatgatttttattaaaaaatatttttggattgtattttatttttaatttaagagtttaatttaaaaagggaaagaaaaatgatagaagtaggttaggtatagtggtttatatttggaattttagtattttggaagttgaggtaagaggatatttgagtataggagttataaattgttttgggtaatatagtgagattttgtttttataaattagttttaaaagttagttaattaatttggaaagatggtttgagtttgagaggttaaggttatagtgagttatgattgtgttattgtattgtagtttagaagatagagtgagattttattttaaaaaattatagaagtaataatattataattatatataattaaattatattgtaaatattaaaaattttatttgttttaaatttttatattaattatgtatagttgtaatagttgtatagtaaatagttgtatatagtttttattttttattagatattttattaaaaaagaatttaaaatttatgggaaaattttgtattttgtgttagaaatttagttttttggtttttttatttttatttgatggagggtaaagaattttattagtttgtaggttacgtagagataaattagaaaagaaatataaaatagaaatattttgtgtatagtatattgtttaaagatgagataaattggtttaaaaatgatatggtgtaatggagatatttaagagtttgttagtaatttttataggttttaagaggtttaaatagtttagaaatagaatagaatatgatttagtatatttttagagaatttaaaagtttttgtaaagtttatttaggaaatttttagggaaaaataaattttgtttttttttttatttggtaattttttatatttttagaataagtttgaaaattattttacgttggttttaatattttataaatttggtaatagtgataggagttatgttattttgatagttggatttgattaaattaagttagtggttattagtgtttgttaattttaatgatggtaggtagattttttaaagtggtaattattttgaacgtggtttattttttatttttttaaaaattaattaattaattaattaatttttgtttgtttttggtatttttagtaagtatttttttagtattttttgtatttttattttttttttttgtaaattgtttatatgtaattattaagtattttaatgataatttttgtttttattttcgttattttattttttttttgttagtgattttttttttaatattacgtatttattttatatagatcgttttaaaatttttttattttttattttttttagtttttttttagtaattggttagttaataagtttttttgattaagttattattttttattggaattgttgtaatagttttttgattggtttttttgatttttgtttttgttttttatagtttatttttaataagataattagtgtgataaagtaattaattaattagttaatattgttttttttatgatgaaatgtttttattttaatggtttttgttgtttttaagagttaaagagaaattattaaaatagttattaatgtttatattttagttttttaatatattatattaatatattatatattaaatgttatatatataattaattatatataatataattatatgtattatttatatattaatataaattaatataatataattatatattatattaatataattatatattaaatatattatattaaatattaaatatattatattatattgattatataattattataaattaattatatataattattataaattaattatatataattattataaattaattatatataattattataaattaattatatataattattataaattaattatatataatataattatatatataaagtttttatatattaaatattatatatttataatattatatatataatatttatattttttttattttttatagtattttatattatttgtggttttattggagttattgtattgaatttgttgttttttatttaagttaaattttttgtttatagtgaaaggaatagagaaagatgtagggagattttttgaaattattgttatagaataaaagatgaaatgtttttaattattgtaaatataaaattgtatgtagtattgtgtaaagataatgttaggttggattgttagaatgagttaatagcgcgtgacgtgtttttttttgtagagagtttatgaatggacgtgcggttagggaggttttatattattaagatttttattttagaaaagtagatgtttatagttttaggaatggaatgcgatttttgtggagagtttataaacggatgtatggggcgggggggtgtttgtttatatggataagatagggttataaacgtttttattttgttatggtttttttatatttttttagggttaaggtatatttttttttgagaatttttcgtttaattagttgtttatttttacgttttatttttatggattgtttgtaattagtttttgttgtaattgttattgttgattaatattttgttaattataggttatggaaagattgtgtttttgttttaaggttttgttagaaattattaatatatatattatattgtaaatttttatttttgtatattgtatttttttatataaatgtattgtatttttatatataaatgttatgttaaagaattattttatttttatgtgattattttattttataattaaatgattttaaattttttattaatttatttttgtttttattaaatttaataataaatgttggtatatttagtgtattgttggtatcgtgggattagaaggtagtgatttttttggatttagtttttattattttgtgtgtgtttattattttttaatttgtcgattcgtttaagaataaagagagagtttcgttgtattgtaggttgttggttagattttataatatatatatagattttaaaatgtatttttaatttttaaaagattttggttatttattattattttgtttatttttttgtaattgagaaaagtatttgttaatttattttttttttttgtgatagtttagttatttataaagttttattttatattttatttttttttttaatttgtgttaaaatattgtgaaaattaatatttttttggaatataatttttttattataaattaaatattgatataattgtaaagtaaataaatgaatttttataaagttaatttatttttatattttttatatttattattttaaatttttgttatatttttaattttgtttgaaatattatatggtattttaaattgaaatttattaattattttttagttagtggataaagagaaattaaaaatttgaataaattaatttaatttttattttattttttatttgaaggtttttttagtaatttattaaaagaagttttttttttttttttttttttttttagtttagattttaatttttattttgtttattttggttaaattttttaattttggttattttttaattatattttaatttttaagttatgtaatttttcgaggtttttgtttgtttttttaattgtttattaagacgttttatattttagtaaaaagattatatatatttttttaatgttttggagttatagttatgtatttaaaatttattttatttttatttttattttttttttatttaaatttatttttgggtttttattgattagtgtttttaagtttgtttgttttagtttatgtagttttttttttggtattgggataaatatttgtattattattttaaaggttattattattttttatttgtgaagagtagaatatgaagaaatttattttatttagatattttttagatttttaaagattagagattattttttatttttttaggagtatttattttaggaagtaattagataaaaggtaaggtataaatattttttttaattgtttgtattttataaatttaattttatgaatatatttgttttgattagaagtttgtaattaaatttaattagaattaagaatttttttggttttattttagtaaaaaaaattagtgtaaatagggggagaaaaataagatttttttgtcgtattttttagttaatttttaagataaaaattttgaaataattttttatttatttttttttttaagagttttaaagttattatatttatatttaaattttattattcgataaatgtgtatgtgtaaatattatatgtatgtgtgtatatatttatgtattagatatatatatatgatattgtacgttaagttatgtttttgtttgaagattgtatgtttatgtatggttataggaatatttttattttatgtatttttttagagttgaattattttttttttatgaaaaagtatggttaatatttaagaataaggtagaaagtattttttttaaatatttaaattatttgttttaaaaataatttattgaagaattatttttattttatttaattatttaaattaagaaataagattaataatttagagagattattaattatttaatttttatttggaaaagattattataattttgatttaatattttatttgtataggaaatgattattatgtaaatttgattttgatttaattaatgtaggatttttagatttgagttattcgattttgatacgattttttgtttttatttttaaagttttagtatttttaatgtttattaagttttataatgaaatttagtaatgataaatgttttattttataaagtttattttaaatgtttaaggttttattattattttattgtttatttttagaaatatttcgagtgttatgttgtttgaaaagaagttaaataagtatatattagatttattttatgtaaatattttttttagttaaaagtttttttattttggttaaatttataa

SEQ ID NO: 1446 - DNA, 6106 bp, Artificial Sequence
  chemically treated genomic DNA (Homo sapiens)
ttgtaagtttgattaggatagaaagatttttggttgaaagaaatatttgtataaagtaaatttgatatatatttatttaatttttttttaagtaatatgatattcgagatatttttaaagataaatagtgagatgatgataaaattttagatatttgaaatgaattttataaaatgaaatatttattattattaagttttattatgaaatttgataagtattgaggatattaaggttttgaaaatgaaaataaagaatcgtattagaatcgagtagtttaaatttaaaaattttatattaattaaattaaaattaagtttgtatagtaattattttttatgtaagtagaatattgaattaaagttatgatagttttttttaaatagaaattaaataattaataatttttttaaattgttagttttgttttttagtttaaatgattgggtggggtagaaataattttttaatagattatttttagaataagtagtttaaatatttaaaggaaatgttttttgttttgtttttaagtgttaattatgtttttttatagaaaggaaatgatttagttttaaaaaagtatatgaagtaaaaatatttttgtaattatatataaatatatagtttttaaatagaaatatggtttggcgtataatgttatatatatgtatttgatatatagatatatgtatatatatatataatatttatatatatatatttatcgaataataggatttaaatgtgaatataatggttttggaatttttaagaaaggaagtaagtagggagttattttaaagtttttattttagaagttaattaaaaaatgcggtaaaaaaattttatttttttttttttatttatattaattttttttattgagatgaaattaaagaaatttttaattttaattaaatttgattgtaaatttttagttaagataaatatatttataagattagatttgtaaaatataaataattagaaagagtatttgtattttattttttatttggttgttttttgaagtgagtatttttaggagaatgagaaatgatttttaatttttaggaatttggagaatatttgaataaagtagatttttttatgttttattttttataggtaaagagtaatgatagtttttaaaatggtaatataagtgtttattttagtattagaggaggagttatatgaattaaggtaggtaggtttgaaagtattaattagtgaaaatttaaggataagtttgggtggaggaagggtgggagtagagataaaataaattttgagtatatgattatggttttaaagtattgaagaaatatgtgtgatttttttgttaaggtgtaggacgttttaatgagtagttgaaaaaataaataaaaatttcgaagagttatatggtttagggattggggtataattgaaaaatagttagagttgagaagtttagttagaataggtagaatgaagattagaatttaagttaaaaaaaaaaaaaaaaaagagagagattttttttggtaggttattgggaagatttttaaatgagaagtgaagtaaaaattgaattaatttgtttaaatttttaatttttttttatttattggttaaaaaataattagtaaattttaatttaaaatattatatgatattttaaataaaattgaaaatgtaataagaatttgaagtaataagtatggaaaatataaagataaattagttttatggaaatttatttgtttattttgtaattatattagtatttaatttataatgaaaaagttgtgttttaaagaaatgttaatttttataatgttttagtataaattgaaggaaggagtaaagtataaaataaaattttgtaaatgattgagttgttatagagagaaaaaatgagttgataaatattttttttaattatagaaaagtagatagaatagtgataagtaattaaaattttttaagagttaagaatgtattttggaatttgtgtatgtattgtgggatttggttagtagtttgtaatgtaacggggttttttttttgtttttaggcggatcggtaggttgagaaataatagatatatataagatagtgaaagttgggtttaggggggttattattttttggttttacggtgttaataatgtattggatatattagtatttattattaagtttagtgagggtaggggtaggttagtgagggatttagggttatttgattatgaggtgagatggttatatggggatgaagtaattttttaatataatatttgtatatagaagtatagtatatttgtatggagaagtatagtatatagagataagaatttataatatagtgtgtgtgttagtaatttttaatagagttttaaaatagaaatataatttttttataatttatgattagtaagatattaattagtagtaatagttgtaataaaagttggttataaataatttatggaaataggacgtgaagatagataattggttagacgagaaatttttagaaaggagtatgttttaattttaaagaggtgtagaagagttatggtaagatgaggacgtttatagttttattttatttatatggataggtattttttcgttttatgtattcgtttataggttttttataagggtcgtattttatttttagagttatgaatatttgtttttttgggataggaattttggtgatgtgaaatttttttgatcgtacgtttatttataggttttttgtagggggaagtacgttacgcgttgttggtttattttggtagtttaatttggtattgtttttatataatattgtatgtaattttgtatttataataattaggagtattttattttttattttgtagtaatagttttagggggtttttttatatttttttttattttttttattgtgagtaaaaagtttgatttaagtaaaaggtagtaaatttaatgtaataattttagtgaagttataggtagtgtgaaatgttataaaggatgagggaaatataaatattatatatataatattataaatatataatatttaatatataaggattttatatatataattatattatatataattaatttataataattatatataattaatttataataattatatataattaatttataataattatatataattaatttataataattatatataattaatttataataattatataattaatataatataatatatttaatatttaatataatatatttaatatataattatattaatataatatataattatattatattaatttatattaatatataaataatatatataattatattatatataattaattatatatataatatttaatatataatatattaatataatatattaaaggattagaatgtgggtattaatagttattttaataatttttttttaatttttagagataatagaagttattggaatagaagtattttattataggaaggataatattgattgattgattgattgttttgttatattagttgttttgttaggaataaattgtagagggtaagggtaaaaattagaaaggttagttaagagattattgtaataattttagtgagagatggtgatttgattagaaaggtttattaattgattaattattgaagggaagttggagggaatggagaatggaaaagttttgaaacggtttgtatggagtaagtgcgtgatattggaaggaaagttattgataaggagagaatagagtaacggaaataaagataggaattattattaaaatatttgatgattgtatataggtaatttgtaaagaggaagagtaggaatataaagaatattaagagaatatttgttagaagtgttaaaaataggtaaaaattaattgattaattaattaatttttaaaaaaataaaaaataaattacgtttagagtgattattattttgggaaatttgtttattattattaaaattgatagatattggtggttattaatttagtttagttaggtttaattgttagaatgatatgatttttgttattgttgttagatttgtgggatattggagttaacgtaaaatggtttttaagtttattttgagaatatagaaagttattaaataaaaagaggagtaaagtttgtttttttttgaagattttttgagtgagttttataaaaatttttgaattttttgaaaatatattgaattatgttttgttttgtttttgaattgtttgaattttttgggatttgtaggaattgttaataagtttttaaatgtttttattgtattatattatttttagattaatttattttatttttgggtaatgtgttatatataaaatatttttgttttatgttttttttttaatttgtttttgcgtagtttgtaaattagtgaagttttttgttttttattagataggaataagaaagttaagaaattaagtttttaatataaagtgtaaggtttttttataaattttaagtttttttttgataagatgtttagtgagaagtgaaggttatatatagttgtttattgtataattgttatagttgtatatgattagtgtagaaatttaaaataagtaaaatttttggtatttgtaatgtagtttaattgtgtataattatgatattattatttttatgattttttaagatagggttttattttgttttttaggttgtagtgtagtggtatagttatggtttattatagttttgattttttaggtttaagttatttttttaaattagttggttaatttttaaaattggtttgtggaaatagagttttattatgttgtttagggtagtttgtaatttttgtgtttaagtatttttttgttttagtttttaaagtgttggaattttaggtgtgagttattgtgtttggtttatttttattatttttttttttttttttaaattaaatttttgggttaaaggtaaaatataatttaaaagtgttttttaataaaaattatggataatggaggtattttatattaggatatttgtaatatatttaagaatgtagttagaaaaagttttatagttttaaatttttttattaataaaaatataaattataaatgaatgaaatttttatgttaaataagataagaaaaataaatagaaaaaataaaggaataataaagtaaaaaataaataatatttgttttattaatttatttaaattgagaaatatataattattaaataaaaataatattttttggtaaaaaatttttaagagagattaattattagttattttaattgaggtatatgtataataaaaggataaggaggaagtaattattgatatgatatatgatgtatttaaaaaattttataatttttttgttatatatttgaaagatataatgataattttttatagaaatataatttgtttaaataggttttattatatgtaaaaaatttaaataagttaatttttttattaggaaaagaaaaatttattaagatatttttttaaaattaattattaagtttagatgattttaaggaagatttgtattaaaattttaaagtttggatagttttaatgattttgaaaatttttgtattttataaaaaagaaaattttaaaaaattaaggaaaatttaatattttttgtaaagtaagtatgatatttatatttaaatttaatatagttagaaaagaaaattatagataaatattagttattaatattgattgaaatgtaaaaatattagtaataatataatatattattaagaaattgatatattttgattaagtgtgatttattttgggaatatgatattgatataatattaggaaatttattgatataaaaattatatgaattttttggtttgatgatttgttaggaggatttatagttttatttatggttattatatattatagtaaaaggatgtaaagtatataagtaaagggaaaaggtatatgcggtaatgtttagtgaaaaataagtatgaaagtttttaggagttttttttttgtggaattatatgggttgtgtttaatttttttagtaat

SEQ ID NO: 1447 - DNA, 6101 bp, Artificial Sequence
  chemically treated genomic DNA (Homo sapiens)
agattattatttagaggtataaataataattgttattataaagtagagaatttaagaggatttaattattgtatatataattttattatgtatacgaaagttataaatgttatttgtaaatggtaaaaatattaaaagtttttaaaaagtttgatttttattttatattttaatagattttagtatttttttttttatagaggtaaattttaattttagatggattaaaataaattagtggaatttaaattaattgtatttttattttttaattaaaattgttttatgttattttgttttatagttttttattttattatttgtttttaaggtatttattttttttttttatagttatattttaatattaaaagtaagagtttatagttttggttttttttttgatgaatggtaaataaattttttttattgttattttaaaattgtttttaataaatatatttaagaaatcgatttataaaatttttagagatttttaaataagtgtgtaagtgatttttttttttttttttttgagatggagttttatttttgttgtttaggttggagtgtaatggtgcgattttggtatatggtaatttttgtttttcgggtttaagtaagtttttcgtttttgtttttcgagtagttgggattataggtacgtgttacgaagttcggttttttttttttttttttttttttgtatttttagtagagatggtattttattatgttggttaggttggtttcgaatttttgattttaggtgatttattcgttttggttttttaaagtgttgggattataggcgtgtagttatatttggtttttttttttttttttttttgagacggagtttcgtttttgtcgtttaggttggagtgtaatggagtgatttttgtttattgtaagtttcgtttttcgggtttacgttatttttttgttttagtttttcgagtagttgggattataggcgtgcgttattttattcggttaattttttgtatttttaatagagacggggttttatcgtgttagttaggatggtttttattttttgattacgtgattcgtttatttcggttttttaaagtgttgggattataggtatgagttatcgcgttcggtttttttttttttttttttaatgagatagtatttggttatgttgtttaggttggagtgtcgaggcgtgatttttatttattgtaatttttatttttcgggtttaagggatttttttattttagtttttattgtagttgggattataggtgtacgttattatgttaggttaattttttttttttttttttatttttggtaaagatggggttttattatgttgtttaggttggtttcgaatttttgagtttaagttatttgtttgtagttttttaaagtgttgggattataggcgtgagttattgtatttgagttttttttttttttttaaaagaaattaattatttttaagcggtttttaagatttttattgttttttgtttttagagaaataggttttgttatgttgttcgagttgtttttgaatttttgggtttaagtgatttttttattttagttttttaagtagttgggtttataggggaatattattatgtttggtttattaattttattttaaaagttatatatatgatagtttttatttaatagggttttttttttttgattaatttattaataaggtaattatttaattattaaaaaaaaattttttttttaaattatttaatattttattaagtaaaataaaataatatttaattttttagattttaggttttaatattatttgttatttaatgaaaataaataaaatgtagtggtttttatatttgttattatagattttaaaataataatttatatttttaaaaattatttatatatataaataaaaaagaatataattaagttggagtttttttatgttattgtttttggggtttaagtagtagaattatgatgtaggtaagagagtattacggtcgattgttagtgatgtgatttaagtttaagaataaaaagttgagttgtgggtatattagtttgatttataaaaaggatgttaattaaagggtttttatttttagagattaaataagggtaaatgtgttattggtgtaaaagtaattgtggttttgttttttttaaaaaaaatggtaattatttttgtattaatttaataaaatggtaatagtaacgatatggttatttgtaaaatagtatttttttatatattttaaaagagtttaaggatatttattgtttatgtttttgagaataaaataggttgtttatttatttggaatggtttttgatggaggatattttggaaggcgggaagattttttttttttgggttatttatttttttagggggttaaattttgaattgtattttatttattttttttagtgtgatttaaatttagttttagaggttagagattttatattttttaaatataatttttgttgtagaattatttagtagataggaatttttatttgtttttaatttcgttttaaaatttagttaagattttttgatatgggatttttttttatattttttgaaatgtagtgttatttagaatatttatttattattataatatataataaaatgtaatttaaaaaataattttgtaaaataagatatttgtaagagtagtggttttttttatatttggttatgttgtgtggggtaaatatagtttagttttggttttattatattttttttttaataataaaaaagtaaaattatatgaaaatttttttatatatagatttatttgtaaaagtaaaagaaaatttattttaagtgtgtaaggaaagcggaaattatttaattggttatatatatatttttggatattttaatttttgtaacgattgatatttagtgaagtttttttttaattttttaatattaatataaaagttattaaaatgtataaatgtaagatgtttttaaaaataattgttatatttaacgttttgatttagtaattaggttatgattttttcgattttaatttgtttttgtattttttttttaatgggggagggggtgggtttttaagttttttttttgagtttttgtataataaagtgagttatttgtttttatttagtaaagttggatggggtatatttttgtatttgattggttggtttttaagggattatttttttggaaagatattgttttatattgtattgttagtagcgtggttttaattgtggttaaatttttaaattgaaaatgaatatttattattaaagagaatataaattttaggatttttatgttatatagattatatatattatattgatttgttttgataagagttttgtttgaatataattttaaatattatatttagaaataataattgttttaatggtataaataggaaatttggggttttttatgtattataaagaagttaataaaatttagaataaattttaattatataaataggttttaataagattaataaaatttgaggatgataggtaagttaataagttaaataaattatattatttatatttagataaaataaaataatgatttttaatttttatggtgtattttttatttaattagagtaaatattagattttaaattttatttattattttatttgaaagaatttattgagtaaaatttttagttgtagggttttatatttgtaatttattaggttgtaatattaaagttattatagttttttttttagtgtaagtattttgtatgtgttttatttatattgttattttttattttttttttaatttcgtatgtttaagaatgaaattggattgttattatgtaatagtattttaattttgtaatatatatattggtttattttttttttgaatttttgtttttgaaaaataaatatatgtatttagaaaaattattttgaggcgtgtggggaagagtgtagatatgtagaaataaatattaaaatatagtcgtgtggaaaggtaaggatgtatttgttttcgttgataataattttcgtggtttattaatagttataggtagttaatttagtgtcgtaagtcggtaatttagtgggtatcggggttttaaggttttttaaaatttaatgtgatttaaaaatatttaaggtaattacgtcgaaaaattaggagaaagggttttagttagagtttttttggtaatttaaatcgaatcgaatgatttaggtggacgattagaataaatcgtgcgtcgtttttttttattaggtttataaagtttagaaattatgtttggtttagaaaattaggagttatgagtattttttttttttattttttaatattttatatatttagtaacggtttttaatttatggtttttatttatttattgtttaaataagattttgggtgttttttggtgattattttttttaagttgatttaatatgatagtaaagtgaaaagttttttcgtgggaagggtcgcgatcgcgcggtaagttatttaaaagtggaagtattttgtttttattgatttatgtatacgagggtggcgatggtggcggtttgatagggacgaggtcggaggggaaggggcgcgcggtgttgggtagtcgcggtgggggattttttagagtgtcgcgttttttagtcgtttcgaaatttaaaggggttcgttttcggtattattattaaatggtcgagtttttttggtcgttgcgtagttcgtttattggttttttttttttttcgtcgttattgttattggttgttgttcggagattttcggcggcgattggttcgggcgttgcgttcgtttatggggtcgtagatttcgtttttacggcgattaggtttagttgtgcgtcgcgggtgttgggggttcgagaatcgagcggtatggttgtagtttttaaagttttaaaacgcgcggtcgtgggttcggggtttattgattgaatttcgtcggcgcgggagtttttgtagagagagagcgcgagagatggagatgggtagacggatttatttagagttgcggaataggacgttttttgatgtgagtatttgttaaaaatatttttgtcggtttatttttttattttgtgtgtgtgtgtgtgtgtgcgcgttggggggaggtattttttttgggggggggcgttcgggaggtgcgggtttgggggtcggattgtaagcgaattggtaaggttggggggttgtaatgttattcgagtatgtttcggttgtcgtcgtcgttgtttttggtgtgtgattatttgtgcgtgtgttttcgcgtgtgcgagtgtgggtgcgagagtgtgcgtgcgagtgtgtatttatcgggggtcggcgggttacgcgtttgggtcggagagaatgaggcgaaattattttcggagatcgttgttttcgtgatttcgtttggggggaagattaacgagggaggaggaggagaggggttgttttttggatttaataataaaaaaagggggttttatattttataaatgtattttttttttcgtttttttttcgcgttttttttttttttttttttcgttcgttcgttcgtatatataataagtttggggtttcgcgagttcggtttagtttttgataaatgtgggtcgaggttttcggggagagcgcgtggggagggggttgtagcggagttgggaatggttggagtttaaagtgcgtttttatttttttgtagtgatgaggcgagagacgggggagttatatttgtaattttgtagtgttcgtgaacgcgttttttttttttttttttttttttttttgttttttttttttttttttttttttttttttattttttttattttattttcgggttagatgttgatgttttttttttttttttcgaagggaggataaattagaaggagggggagggattttcgaacgtgttaaggtatagataattttcgcgtttttttgtttttagcgatcgttggtgtaagttgtttaaaggttacgtttcggtgttttttcgttttagtttttttcggtttttttaagatgttagtttttgggtt

SEQ ID NO: 1448 - DNA, 6101 bp, Artificial Sequence
  chemically treated genomic DNA (Homo sapiens)
ggtttaaaggttggtattttggggaagtcggaaggagttggggcgagggggtatcgggacgtagtttttgggtaatttgtattagcgatcgttggaggtagggagacgcggggattatttgtgttttagtacgttcgaaaatttttttttttttttttaatttatttttttttcggaaggaaaggaagaaatattagtatttggttcgaaggtggggtggaaagagtgagggagaaagaggaggagaggaagggaggtagagaaagggagggagggagagaaagggcgcgtttacgaatattataaagttataaatatggttttttcgtttttcgttttattattgtaaagaaatgaagacgtattttaaattttagttatttttaatttcgttgtagttttttttttacgcgtttttttcgggggtttcggtttatatttattagaaattaaatcggattcgcgaagttttaaatttattgtgtgtgcgagcgagcgagcgagagaaagggaggggggaggcgcgggaggggggcggaaggggggatatatttataaaatgtaaaattttttttttttgttgttaaatttaggaggtagttttttttttttttttttttcgttaattttttttttagacggagttacgggagtagcgattttcgagggtgatttcgttttatttttttcgatttaaacgcgtggttcgtcggttttcgatgggtgtatattcgtacgtatattttcgtatttatattcgtatacgcgggagtatacgtataggtagttatatattaagggtagcggcggcggtagtcggaatatgttcggatggtattgtaattttttagttttgttaattcgtttgtagttcgatttttaaattcgtatttttcgggcgtttttttttaaaaaaagtgtttttttttagcgcgtatatatatatatatatataaagtaggagaatggatcgatagagatatttttggtaaatgtttatattagagggcgttttgtttcgtagttttaaatgaattcgtttgtttatttttatttttcgcgttttttttttgtagaggttttcgcgtcggcggaatttaattaataaatttcgaatttacggtcgcgcgttttaggattttgaaggttataattatgtcgttcggttttcgagtttttagtattcgcggcgtataattaagtttgatcgtcgtggaggcgggatttgcggttttatggacgagcgtagcgttcgagttaatcgtcgtcgagggttttcgggtaatagttaatggtagtggcggcgggggggggaagggattaatgggcgggttgcgtagcggttagggaggttcggttatttggtagtggtgtcggagacggatttttttagatttcggggcggttgaggagcgcggtattttagaggattttttatcgcggttgtttagtatcgcgcgttttttttttttcggtttcgtttttgttaggtcgttattatcgttattttcgtatatataagttagtaaaagtaagatgtttttatttttggatgatttatcgcgcggtcgcgattttttttacgaagaggttttttattttgttgttatattaggttagtttggaagaagtgattattaagagatatttaagattttgtttaggtaataaatgaatgaagattatggattaagaatcgttgttagatatgtagaatattaaaaggtggaaaaggaaggtgtttataatttttggttttttggattaaatataatttttgggttttatagatttagtgaaagagaacggcgtacggtttattttaatcgtttatttgagttattcggttcggtttgggttgttaaggaggttttaattggagtttttttttttggtttttcggcgtggttgttttgggtatttttgaattatattaagttttaagagattttaaagtttcgatgtttattgggttatcgatttacggtattaagttggttgtttgtggttgttaataaattacggggattgttgttaacgaggatagatatatttttatttttttatacgattgtattttagtgtttgtttttatatgtttgtatttttttttatacgttttaaggtagtttttttggatatatatgtttattttttaggaataggagtttaaaggagagataagttagtatgtatgttgtaaagttaaaatattgttgtataatagtaatttagttttatttttagatatacgaagttgaggaggaaataaaaagtgataatgtaaataaaatatatatagaatgtttatattggggaagaagttgtagtaattttaatattgtaatttgatggattgtaagtgtaaagttttgtaattaaggattttatttagtaaatttttttagataaaatgataaatggaatttgaagtttgatgtttattttgattaggtgggaaatgtattataaaagttagaagttattgttttattttatttgggtataaatagtataatttatttaatttgttgatttgtttgttatttttagattttgttaattttattgaagtttatttgtatagttggaatttattttaagttttattggtttttttgtaatatatgaggaattttaaattttttatttatgttattgagatagttgttatttttggatatggtgtttaggattgtatttaaatagaatttttattaaaataggttaatatggtgtgtatgatttgtgtaatataggagttttgaagtttgtgttttttttgatggtaaatgtttatttttaatttaaaagtttaattatagttaagattacgttgttagtaatgtaatatgagatagtgtttttttagaggagtaattttttaaaaattaattaattaaatgtagagatatgttttatttagttttgttaaatagaagtaaatagtttattttattgtataaagatttaagaggaagatttagaagtttatttttttttttattaaagagaaagtatagaaataaattagaatcgaaaaaattatggtttgattattaaattaaaacgttaaatgtgatagttgtttttagaagtattttatatttatatattttgatgatttttgtattaatgttagaaaattgaaagaaggttttattggatgttagtcgttatagaaattgaaatatttaaaagtatatgtataattaattgagtaattttcgttttttttatatatttgaaataaatttttttttgtttttataaatagatttatatgtaagaaaatttttatatgattttgtttttttattattaaaaaaggaatatagtaaagttaaagttgagttgtatttgttttatataatatgattaaatataaaaaaaattattgtttttataaatattttattttataaagttgttttttaaattatattttattgtatattataatagtaaataagtgttttaagtggtattgtattttagaaaatatagaaagaaattttatattaaggaattttggttgaattttgaaacggagttgggaataggtaagagtttttatttattgagtaattttataataggaattgtgtttgaaagatgtagagtttttaatttttgaaattaggtttgagttatattgagaagaataaatgagatataatttaaagtttaattttttagagagatagatggtttaggaaggaaagattttttcgttttttagaatattttttattaagaattattttaaataaatgagtagtttattttgtttttaaagatatgaataatgagtgtttttaggtttttttgaaatgtgtaggagagtattgttttataaataattatatcgttattattgttattttattaggttggtgtaaaagtaattattattttttttaaaaaaggtaaaattataattatttttgtattaatagtatatttgtttttgtttggtttttaaagatggagattttttggttagtattttttttatgagttaagttaatatatttatagtttaattttttgtttttgagtttgaattatattattggtaatcggtcgtagtatttttttatttatattatggttttgttgtttggattttaaagataatgatatggaaaaattttagtttaattatgtttttttttgtttgtatatgtaaatagtttttaggaatgtagattattattttgaaatttgtggtaataaatgtgaaaattattatattttatttatttttattgaatagtaaataatgttgaagtttgggatttaaaaagttaaatattattttattttgtttaataaagtattggataatttagaaaaagaatttttttttaatgattggatagttattttattaatggattggttagggagaaaaagttttgttggatgaaaattgttatatatgtgatttttaaagtgaaattaataagttaggtatggtgatgtttttttgtaggtttagttatttgggaggttgaagtgaaaggattatttgagtttaagagtttaagaatagttcggataatatagtaagatttgtttttttaaaaataaaaaatagtaaaaattttaaaaatcgtttaaagatggttggttttttttaaaaaggaaaaaaaggtttaggtgtagtggtttacgtttgtaattttaatattttgggaagttgtaggtagatagtttgagtttaggagttcgagattagtttgggtaatatggtgaaattttatttttattaaaaatgaaaaaaaaaaaaaaaaattagtttggtatggtggcgtgtatttgtggttttagttataatagaggttgaggtgggaggattttttgagttcgggaggtggagattgtagtgagtagagattacgtttcggtattttagtttgggtaatatagttagatattgttttattaaaaaaaaaaaaaaaaaggtcgggcgcggtggtttatgtttgtaattttagtattttgggaggtcgaggtgggcggattacgtggttaggagatggagattattttggttaatacggtgaaatttcgtttttattaaaaatataaaaaattagtcgggtgaggtggcgtacgtttgtagttttagttattcgggaggttgaggtaggagaatggcgtgaattcggaaggcggagtttgtagtgagtagagattattttattgtattttagtttgggcgataagaacgagatttcgttttaaaaaaaaaaaaaaaaaaaagttaggtatggttgtacgtttgtaattttagtattttgggaggttaaggcgggtggattatttgaagttaggagttcgagattagtttggttaatatggtgaaatgttatttttattaaaaatataaaaaaaaaaaaaaaaaaaaaaagtcgggtttcgtggtacgtgtttataattttagttattcgggaggtagaggcgggagatttatttgaattcgggaggtagaggttgttatgtgttaaaatcgtattattgtattttagtttgggtaataagagtgaaattttattttaaaaaaaaaaaaaaaaaaattatttgtatatttgtttggaagtttttagaaattttgtgaatcggttttttaaatatatttattaaagatagttttgaagtagtaatgagggaagtttgtttattatttattaggaagaaaattagagttgtaagtttttatttttagtattaaaatatggttgtgaaggaaaaaaataaatgttttaaagataaataatggaatgaggagttatagaataaagtgatataaggtaattttggttgaaaaatagaaatgtaattaatttagattttattaatttgttttaatttatttagagttgaggtttatttttatgaagaaaagaatattaaaatttattaagatatgaggtagagattagattttttaagaatttttaatgtttttattatttgtaaatggtatttataattttcgtatatatagtaaaattatgtatataataattaaatttttttagattttttgttttgtaatggtaattattatttgtatttttaagtaatgattt

SEQ ID NO: 1449 - DNA, 6590 bp, Artificial Sequence
  chemically treated genomic DNA (Homo sapiens)
gaagtgaggagagtttttgttcggtcgttttatttgggatgtgaggagcgtttttgttcggtcgttattttatttgggaagtggggagcgtttttgttcggtcgtttcgtttgggatgtgaggagtgtttttgttcggtcgtaattttatttgggaagtggggagcgtttttgtttagtcgttttatttgggaggtgaggagcgtttttgttcggtcgttttatttgggatgtgaggagcgtttttgttcggttattatttttatttgggaagtggggagcgtttttgtttggttattttatttgggatgtgaggagtatttttgttcggttatttttcgtttgggaagtgaggagcgtttttgttcggttattttatttgggaagtgaggagcgtttttgttcggtcgttttatttgggaaatgaggagcgtttttgttcggttgttttgtttgggaagtgagaagcgtttttgtttggtcgttgtgtaattttttaagtgtgaagtgatagtttttttgtaggtgtatttaatagtttcgaatagatagcgattatcgagaacgggttatgatgacgatggtagttttgttaaaaagaaaagggggaaatgtggggaaaagaaagagagataagattgttattgtgtttgtgtagaaagaagtagatatagattttattttgttttgtattaagaaaaatttttttgttttgggatgttgttaatttataattttatttttaatttcgtgttttttgaaatatgtgttgtgttaatttagggttaaatggattaagggtagtgtaagatgtgttttgttaaatagatgtttgaaggtagtatgttcgttaagagttattattattgtttaattttaagtatttagggatataaatattgcggaaggtcggaaggttacggggatttttgtttaggaaaattagagatttttgtttacgtgtttatttgttgattttttttttattattattttatgattttattatattttttttttcgagaaatatttaagaatgattaataaatattaaaaaaaaaaaaaaaaaaaaaaaaaaaaagaaagaaaagaattattattgggtaaaatattaaaaaaaaaatttattgaaataaatgaaaatggaaatataggtcgggtgttgtggtttatgtttgtaattttagtattttgggaggttgaagtgggcggattatttgagattgggagtttgagattagtttgattaatatggaggaattttgtttttattaaaaatataaaattagttaggtatggtggtgtatgtttgtaattatagttatttaggaggttgaggtaggagaatggtttgaattcgggaggcggaggttgcggtgagttaagattacgttattgtatttaagtttgggtagtaagagtaaaattttattttaaaaaaaaaaagaaaaaagaaaagaaaagaaaatggaaatataatatattaaaatatataggatataatagaagtagtgttaagatagatattgatagtaataagtatttatattaaaaaattagaaagtttttaaataaataatttaataatgtttcgtaaggaattagaaaagtaagaataaattaaatttaaaattaggagaaggaaaagaataataacgattatagtatagtaaaataaaatagagagtgaaaaaaatttaattaatgaaattagatattgtttgttttaatggataaataaaattaataaattgttagttagatttaataagaagaaaagagaggagatttaaataaataaaattagaaataaaaaatgagatattataattgtttttagagatatataataatttattagagattattatgaataattatatatgaaaaaattggaaaatttagagaaaatggataattggatatatataatttataaatattgaattaggaagaaatagaaaatttgaaaagatttatgacgagtgatgaaattgaattagtgataaaaagttttttaaaatagaaaagtttaggaatagatggttttattgttaaattttattaaatttataaagaagaaataatattaatttttttaaattattttaaaaaaattgaagaggaagaaattttttttaatttattttataaggttagaattattttgatattaaaattagataaaaatataataaaaaaagaaaatagtaggttaatatttttgatgaatatcgatgtaaaaatttttaattaaatattagtaaataaaatttaatagtatattaaaaggataatatattatgattaagtgggatttattttagaaatgtaaagacggtttaatatatataaattaataatcgcggatatattatattagtagaatgaaggataaaaattatatgattattttaatagatgtagaaaaagtatttgataaaattaaatatttttcgtgataaatatttttaataaattaggtatagaagaaatatattttaatataataaattttataaatgataaatttatagttattattatattgaatgggggaatagaggaatgttttttttttaagaattagaagaaggtaaagatgtttatttttattatttatttatttatttatttatttatttgagatggagttgtgtttttgttgtttaggttggggtgtaatggcgtgatttcggtttacggtaatttttgtttttcggatttaagtattttttttattttagtttttcgagtagatgggattataggtatgcgttattatgttcggttaattttttttgtatttttagtagaaacggggtttttttatgttggttaggttggttttgaattttcgattttaggagattcgtttattttggttttaaagtgttgggattataggcgtgagttatcgcgttcggtttatttttattatttttaatttatatagtattgaagttttagttagagtaattaggtaagagaaagaaataaaaggtatttaaattggaaaaaaggaagttaggttagtgcgaatgtagtgagttattttaattttatagtaagttatagattgaattttttgttttattttttttttattttttattattgtatttgagtagttttaaaaaaaaaaaaaattaaattgttttttttgaagatgatatgatatttagtatatagaaaaatttaaagattttattaaaaattttttataattgatatatttagtaaagttgtaggataaaaaattattatataaaaattagtatttttgtatattaataaggaattagttgaaagagaaattaagaaagtaattttattatttaggaaaaaatttaattaaggaggaaaaagatttttataataaaaattataaaatattgatgaaagaaattgaagaggatataaataaatggaaagatatttcgtgtttatggattggtggattggaagaattaatattgttaaaaatgattatattttttttttttttttttttttttttgagataaggtttcgttttgttatttaggttgtagtgtagtggtatagttatagtttattgtaattttgattttttaggtttaagtaatttttttattttggttttcgaataggtggaattataggtatatgttattatatttaggtattttttatttttatttttgtagagatagggttttaatttgttgtttaggttagttttaaatttttaggttaaagtaattttttgtttttggtttttcgaagtgttgggattataggcgtgattattacgtttagtttttacgtttttatttttatgtgggggttaaaagagttgattttatagaggtaaaaattagaatgagagttgagcgcggtggtttatgtttgtaatttttattattttgggaggtcgaggcgggtggattatttaggtcgggagttcgagattagtttgattaatatggagaaatttcgtttttataaaaataaaaaattagtcgggtgtggtggtgtatgtttgtaattttagttattttgggagggtgaggtaggagaatcgtttgaattcgggaggcggaggttgcggtgagtcgagatcgcgttattgtattttagtttgggtaataaaagcgaaattttattttaaaaataaataataaaataaaataaaaataagaaaataaatatatacgtatacggaggtggggcggcggagtggcggtagggaggaggaggggagaggtaagaaataaatgataaaataaatgaagtaaattgttaataataggtgaatttgagttaaagtttaacgtgcgtttttttgttttatttttgtaatttttttaaataaaacgtttttttaaaattatgtttaggggatttggattttaagtcgagtttttttttttattcggtgtatgattttgaatgaatttttttttttcggttggttttagttttttagtatagatggttttttttgggtttggtaattaacgttttataattttgaggacgtttgtagatagggttttggaaggaagacggtttttcgttttttttaaagggttttagtttgtcggtgattttattacgattttttttagagttttatttgttttttttattagttatgaatttgtttttattaatttttgttattagttggacgtttattttttttttttcggagttttaaggttttttttgcggtagttttagtttttgtataggataggtacgtgtatttagttttagaaaattatagtttttaaaaggttttgcggtaatattttcgcgttgattattaaagagaaaacgttttttttcgcgggttcgtcgttgtatagttttttgggagttgtagtttatttgttaagagtcgtagaattagggtgaggttttaagttattttttttagaatttatagcgtttttttatattaataggaagcgtggattttggaaagcgggcggggtagaggagtttatgcgtagtatgtgtggttggggaatttatgtggaggttagagtggaagtaggtgagaatggagggggcggtaaaggttcgtttttgggtatttttgtagtttttttttgttttatgatgtgtattttgggcgaggagagtgcgtgcgtgagttcgatttgtgagggaggggagaaggggttgagttcgggacgagttaggggttgtttagagtaagggaggtgtttatggaggtagggtgaggaataatttagaagttattataaatgtaaagggtcgggtgttttagttttagagaaggaagatttaaatgtattggacgagattagggtagttttaggagttgaggtttgggaagtagggagggaggatttgagattggagcgggtaacgacggtggggcggagcgttagaaagttatatgttggcgtgatttttagttaggttaattgtgtttatgtttatttcgttttagttttatttttttagttattttagagtttattgtttttgtgtagttagttagagttttttttttaaatgggttttttagttattttggttttaggatgttatttagtttttgtttttataagaagtatgtcgtttttaatatacgatgttgataagtagtatggtgaggaggtaagttgtgtttgttagtattagatttttgggttttaattttggttttattatttaataattgtaatttcggttttttatgtaatttttttgtgtgtttttgttttttttgtagtaatatgttttatagggtaattgtgagaagtaaataaattgtttttattaggttatttgatataagtgttagttgttacggttattttttttgttggtattaatatgtagtatattttttaagttattttttttaaattataattgtattaatttaattttatagtttttttttgggggtttatttgtttaggaaatgagagggtggtttagtgtggtgttaagttttttgtggattttaagtttatgtattgtttttattattgaattaagtgttttagatattttattttaaatggttgagaaaaaaagagaaattagttaggtatgatggtttatgtttgtaattttaatatttgggaggtcgaggtagggggattatttgagtttaggagtttgagattatttggggtaacgtagtaagattttatttttgtaaaaaatgaataaaattagtcgggtatggtggtatatttttgtggttttagttatttgggaggttgaggtgagaagatcgtttgagtttgggaggtcgaggttttagtgagttgagattgtattattgtattttagtttgggtgatagagtaagattttgtttttaaaaaaaaaaaaaggaaagaaaagaaattgaaaaaaaaaaaaagtagaagaattgatagtatattttttaagttataaagtattatttattaggtattttttaatggatgatttagtatttttaggaatggggaaataaatagttaggttgaaaagtgattgttgtgtgttagagagggttttttttgaggatttggtattaagtttgattgtattttgtttttatttttttagg

SEQ ID NO: 1450 - DNA, 6590 bp, Artificial Sequence
  chemically treated genomic DNA (Homo sapiens)
tttaaggggataaaaataaaatataattaaatttgatgttaaatttttagagaaggttttttttgatatataatagttattttttaatttggttatttatttttttatttttgaaagtgttaaattatttattgaaggatatttaataaataatgttttatagtttggaaagtgtattattaatttttttgtttttttttttttttagtttttttttttttttttttttttttttggagatagggttttgttttgttatttaggttggagtgtagtggtgtaattttagtttattgaagtttcgattttttaggtttaagcgatttttttattttaattttttaagtagttgggattatagaagtgtgttattatgttcggttaattttgtttattttttgtagagatggggttttgttacgttgttttaggtggttttaaatttttgggtttaagtgatttttttgtttcggttttttaagtgttgggattataggtatgagttattatgtttggttgattttttttttttttttaattatttaaagtaaggtgtttgggatatttggtttaataatgaaaataatgtatgggtttgaaatttatagagaatttagtattatattaaattatttttttattttttggataagtaggtttttaaaaagaggttgtgaggttagattggtgtaattatggtttgaaaaaaataatttaaaaaatgtgttatatgttgatgttaataaaaaaagtaatcgtaatagttaatatttatattaggtagtttaataaaagtaatttatttattttttataattattttatgaagtatattattatagaggaaatagaggtatatagagaggttatatgagaagtcgagattgtagttattaagtggtagaattagaattagaatttagaggtttaatgttagtagatatagtttatttttttattatattgtttgttaatatcgtgtattaagaacgatatgttttttatggaagtaggagttggatgatattttggggttaagataattgaagaatttatttgggagaaaggttttaattagttgtatagggatagtgagttttggaataattgggagggtggggttgaggcggggtgggtataagtatagttgatttaattagaaattacgttagtatgtaattttttaacgtttcgttttatcgtcgttgttcgttttagttttaaattttttttttttattttttagattttaatttttgagattattttgatttcgtttagtgtatttaaattttttttttttgaggttgggatattcggttttttatatttgtaatagtttttggattattttttattttgtttttatggatattttttttattttgagtaatttttggttcgtttcgggtttagttttttttttttttttttataagtcggatttacgtacgtatttttttcgtttaaagtgtatattatggagtagaggaggattgtagagatgtttagaaacgagtttttgtcgttttttttatttttatttgtttttattttgatttttatatgaattttttaattatatatattgcgtatgagtttttttgtttcgttcgttttttaagatttacgttttttattggtgtggaagagcgttgtgagttttgggaagggtggtttagaattttattttggttttgcggtttttagtagatgaattataatttttaaaaggttatgtagcggcgggttcgcggagaaaagcgttttttttttggtgattaacgcgaggatgttgtcgtaaagttttttgggggttgtagttttttggggttaaatgtacgtgtttattttgtatagaggttaagattgtcgtaaggagagttttagggtttcgggaaagaggaggtgggcgtttagttggtggtaaaaattagtaggggtaagtttatggttgatgaagaggataggtggaattttggaggaagtcgtggtgaaattatcggtaggttgagattttttgggggaaacgaagggtcgttttttttttaaagttttgtttgtaaacgtttttagagttgtgagacgttgattattagatttagagagaattatttgtgttgaaaaattgagattaatcgagaggaaggaatttatttagggttatgtatcgagtgagaaaaggggttcggtttggaatttaggttttttagatatgattttagagaaacgttttatttggaaaagttgtaagaatagggtaaaagaacgtacgttaaattttggtttagatttatttattgttaataatttgttttatttgttttattatttgttttttattttttttttttttttttttgtcgttatttcgtcgttttattttcgtgtgcgtgtgtgtttatttttttgtttttgttttgttttgttgtttgtttttgagatggagtttcgtttttgttgtttaggttggagtgtagtggcgcgatttcggtttatcgtaattttcgtttttcgggtttaagcgatttttttgttttatttttttagaatagttgagattataggtatgtattattatattcggttaattttttatttttgtagagacggggtttttttatgttggttaggttggtttcgaattttcgatttaggtgatttattcgtttcggttttttaaagtggtggggattataggtatgagttatcgcgtttagtttttattttagtttttatttttataagattaatttttttagtttttatataggaataagaacgtgagggttgggcgtggtggttacgtttgtaattttagtatttcgggaggttaaggatagaggattgttttagtttaggagtttgagattagtttgggtaataaattgaaattttgtttttataaaaataaaaataaaaagtatttggatgtggtggtatgtatttgtagttttatttattcgggagttaaggtgggaggattgtttgagtttgggaggttaaggttgtagtgagttgtgattgtgttattgtattgtagtttgggtgatagagcgagattttgttttaaaaaaaaaaaaaaaaaaaaaaaaagtatggttatttttaataatattaatttttttaatttattaatttatgaatacgagatgtttttttatttgtttgtgttttttttagttttttttattagtgttttgtagtttttattgtagaggttttttttttttttgattaaatttttttttaggtagtagggttgtttttttgattttttttttagttaattttttattggtgtatagaaatgttagtttttgtataatgattttttattttgtaattttattgaatgtattagttataagagatttttggtgaaatttttagatttttttatatattaggtattatgttatttttaaagggggtaatttgattttttttttttttaagattatttaagtgtagtagtgagaagtggggaaagagtagaataaggagtttaatttgtaatttattgtgagattgagataatttattatattcgtattggtttgatttttttttttttaatttggatgttttttattttttttttttgtttggttgttttggttaagattttagtattatgtggattaagagtgatgaaagtgggtcgggcgcggtggtttacgtttgtaattttagtattttgaggttaaggtgggcggattttttgaggtcgggagtttaagattagtttgattaatatggagaaatttcgtttttattaaaagtataaaaaaaattagtcgggtatggtggcgtatgtttgtaattttatttattcgggaggttgagataggagaaatgtttgaattcgagaggtagaagttatcgtgagtcgagattacgttattgtattttagtttgggtaataagagtataattttattttaaataaataaataaataaataaataagtaatgaaagtgggtatttttgtttttttttagtttttagaagaaaggtatttttttatttttttatttaatatgatgatagttgtgggtttgttatttatggagtttattatgttgagatatgttttttttatgtttaatttgttgagaatatttattacgaaggatgtttaattttattaagtgttttttttgtatttattgagatgattatatggtttttgttttttattttgttgatgtgatgtattcgcggttattgatttatgtatgttgaatcgtttttgtatttttggaataaattttatttgattatggtgtattatttttttgatgtgttgttggattttgtttattagtatttagttgaggatttttgtatcgatgtttattaaggatattggtttgttgttttttttttttgttgtgtttttgtttgattttggtgttagggtaattttggttttatagaatgagttaggaagaatttttttttttttagtttttttggaatagtttgagaaaattggtattattttttttttataagtttggtagaatttagtagtgaagttatttgtttttgggtttttttgttttgggagattttttattattaatttaattttattattcgttatgggtttttttaagttttttgtttttttttggtttaatatttgtaggttgtatgtgtttagttatttattttttttaggttttttaatttttttatgtgtagttgtttataatagtttttgatgaattattgtatgtttttggaaatagttgtaatgttttattttttatttttgattttatttatttgggtttttttttttttttttttgttgagtttaattagtagtttattgattttgtttatttattgaaataaataatgtttaattttattgattaaattttttttattttttgttttgttttgttatgttgtaatcgttattattttttttttttttttaattttgggtttggtttgtttttgtttttttagttttttgcggagtattgttaggttgtttatttgaaaattttttagttttttgatgtaggtgtttattgttattaatgtttgttttagtattgtttttgttgtattttatatattttggtatgttgtgtttttatttttttttttttttttttttttttttttttttgagatggagttttgtttttgttgtttaggtttgagtataatggcgtgattttggtttatcgtaattttcgtttttcgggtttaagttatttttttgttttagttttttgagtagttgtgattataggtatgtattattatgtttggttaattttgtatttttagtagagatagggtttttttatgttggttaggttggttttaaatttttagttttaggtgattcgtttattttagttttttaaagtattgagattataggtatgagttatagtattcggtttgtgtttttatttttatttgttttaataaattttttttttgatgttttatttaataatgatttttttttttttttttttttttttttttttttttttttttagtatttattgattatttttgggtgtttttcggagagggggatgtggtggggttataggataatagtggagagaaggttagtagataaatacgtgaataaaggtttttggtttttttaggtagaagttttcgtggtttttcggtttttcgtagtgtttgtgtttttgggtatttgagattaggtagtggtgatgatttttaacgagtatgttgtttttaagtatttgtttaataaagtatattttgtattgtttttaatttatttaattttgagttgatatagtatatgttttagagagtacggggttgggggtaaggttatagattaatagtattttaaggtagaagaattttttttagtatagaataaaatggagtttatgtttatttttttttatatagatatagtaataattttattttttttttttttttttatattttttttttttttttttgataaaattgttatcgttattatggttcgttttcgatggtcgttgtttattcggagttgttgggtatatttgtagaaaggttgttattttatatttggaagattgtatagcggttaggtagaggcgttttttattttttagatagggtagtcgggtagaggcgttttttattttttagatggggcggtcgggtagaggcgttttttattttttagatggggtggtcgggtagaggcgttttttattttttagacgaagggtggtcgggtagaggtgttttttatattttagatggggtggttaggtagaggcgttttttattttttagatgggggtggtggtcgggtagaggcgttttttatattttagatggggcggtcgggtagaggcgttttttattttttagatggggcggttgggtagaggcgttttttattttttagatggggttgcggtcgggtagaggtattttttatattttagacggggcggtcgggtagaggcgttttttattttttagatggggtggcggtcgggtagaggcgttttttatattttagatggggcggtcgggtagaggttttttttatttt

SEQ ID NO: 1451 - DNA, 7106 bp, Artificial Sequence
  chemically treated genomic DNA (Homo sapiens)
taagatatagtaatagtaataaagcgtagttatttttttttgtttgtatagtttttttgtttgtcgggggtttttgtttgttgttttttataagttttattattttttttattgtttgggtatgtatttttttttttttttatagatgaggaggttaaggtttagagaggggtggggaggaacgtcggtttatattttttattttttttagatatgattaggaatagatttgtgttaggttttagttttatattaaaatgggtttttttatgtatcgtggatttttgggtttttttgttttagtggaggataggaagttgtgaggggtattgttatttagggtttaagttggtatttttgaataatcgttttgtattaggttacggttaagtttagtgcgtgattaagttttataattttttaaggtagttattagtgtgatttttattttatagatgaggaagatggggatagagaggtgaataattggttttaaattatatattatttataattcgggtttaggtatttggttttagtttttaaatttttgaatttggttttagtgttattgttttttttgggttttaggcgttggatggggaataggaaatttgggttggatttgaggtttttttgatgttcggtgattttagatagttgtttaatttttttgtttttttgggtaaaatatgataatttttgatttttgttttttttttttattttattcgattttgatttttgaagtgttggaaggatttaattttttttgtattgagttttggagataggttaaaaagatgattaaggttaaggtggttagttttttatagaacgtttttaaaagatttgtagtaatagtagtaagaattggtattttcgagaatttgttgcgtagtaggtattttttggtattttatgtgtatttaattttataatagttttatgataaagtttattttttttatttttaggaaattgaggtttagagaggttaagtaatttgtttaaggttatatagttaatagtaagttgacgtggagtaatttggttttagagtttttaattttagttatagattgatgtttttttttttatttagttaggttgtttttgaagttttttgatttaagatttttggttttagttttgtatatagagatgatttaatgttaggttttggagtgaaatttgtttaattttagataaaatatttaggattatattttagttttgtaagtaagtagttttgtgatttttagtgagttatttaatgttttttggggtttaatttttttatttataaaatagggttaataatttgtattttatagggtaagttttgaggatagattagatgatacggtgtttgtaaaatattaggtgttagtaagtgtggtaatgatggtgacgttgaggttgatgtttgtttagtatagggttaggtagttggtaggtagtaaatagttggataatttaatggaaaatttgttaaatttagatgttgtttattgttgagtaggagtttttttttgttgaaatggttttggggagtgtagtaggtttttcgggaagaaatttattatttttcgggtaggagtttaatttgtgtgtaggtatagggagggtttttttatttggtgtttatttatgtattacgttagttattttttatttttgtttaaaggatttttttttttattgtatagttatgaagttagtgtttaaagaagtgaagttatttattttaggttttttgttagtaagtgatagggtttggttatatttgggtttatttattgtttagtttaataggttgtttgattataggcgagatttttttttttgtattttgtcgggttgtttttggttttttattttatgttttcgggtagaaatggtgtgagattaggtagggagtggttcgtttttttgtttttggtttcgtaaagagtgtttttatttgtttcgattttagaaatgttattatgaagtttttatttttttggtttaaagtttggttttagtgttcgtatattatggggtatttggttagatggcgatttttttttttttagtcgtttttttaggtattagtttttaggagtgtagggtgttgtttttgatagaagggttaggagagagtaggttttggagttttgatgttataaggaatagtttgggaggtataatgaatttaatatgatgtttgagattaatgttatagtttaattttgatatttattatttgagatttgaggatatagttgttttagtttatgatttgagtgttgggaaagttaagatttgttttagttttgttattgatttgttgtatagttttaataaggttttgattttttttgggttttaaattttttattgtgaaaggaggaaattagagtaggtgatgtgatattaggaaagatggatgggtgtgggggaatgtgttttttttagttgttattttttcgttattttttttgtattagtttttttattttttttgagtttagaatttttttgtttaggagggtatttgttttatgtttagttatgggaattttttatttgttttgttatattgaatttagatgttattttaattaagaattttggttgggtgtaggggttttcgtttgtaattttagtattttgggaggttaaggtaggcggattaagaggttaggagtttaagatttgtttggttaatacggtgaaattttagttttattaaaaatataaaaattagttaggcgtggtggtatacgtttgtaattttagttatttgggaagttgagatagaagaattttttgaattcgggaggtggaggttttagtgagtcgagattacgttattgtattttattttggtagataaagcgagattttgttttaaaaaaaatttaaaaatttatgttagtgtatagagggttttagtgaagtttttttttagttttattttgtataattggggagagtgaggttttaggattagaggatttttgttaaaggttaagtggatagtgatggttttgttagggttagaagttataatttttggttttgaggttatttagtatatttagtgtttttattttgtagaggtttaatttttttttgattattgagttttgtaatgatgggggaatttttataagttatgaaggattgtataaagtttagttgggaagtgaaagagaaattaaagggagatggaaatatatagtattaattttagtatcgtttttagttttaataatattagttagttgaagaaaaatataaatatgtattatgtaatgtgtggtttgttttatttggattatttagaggtacgagggttaggagaaaggtggtggagagaaattagttttgtattttatttgttgttttattggaaggaaatttttaaaagtttaagggggttgaagaattttaatatttgttatttttagttttttttttttagttttttattttttaaatttaaggatatttttttttttgtattttgttaagatgatggttttggttttgtgattagtagttaataatgtggttgtcgggtatattttttttagttaggattttagtttttttatttgtgaagacggtaggttttatttagggggttgtaggttggtggttcgaagtttgggtatatttggagtagaaggattattgtggggtagggtaggttttgtgttgttgtggatgacgttgattttgattattgttcggtagagtttgttttcgttggtttagttataggttttattattttttattgttttagtttcgggtatgaaatatgtattttttattggtttattatttgaagtttttgaatttgtaatatttgttaattttttttttaaaagagttgtttttttagatttttttgatgtaaggtttggtgttgagatttattttattaaatttttatatataaatattattttatgtatgaggtaaaatgaggattagggagatgaatgatttgttttggtttatatatttggaaagtgatagagttagattagattttaggtttatttgaagttaaaagaggtgtttttttattttttattttttttatttattttaaagtagtataaatttttgtttttaaggagagatgagcgtttttaaagtttttgatagtaagagtttagaattgggatattattagtgatttagacggtaggtaagttgattgtaggagtattagtttatttttgtgtttgggattatagagtattgtggggatagtttcgttttttgggaaaaaaattttaagggttgaggatttttgtgagtgttgggtgggaatagtttttaggaggtttaattatagtttttttatgttttttagttgttgttattgtgtaagatgtattttttttttgtgtagtagtttttttggttattaaatagtgggattagatagaagttttttaagggtttttagtttgatatgatttttgattttgatttggttcgatttttggataatcgtgggtaggtttatttttttttttgtgttttattttttttttttgtaaaataatggttgtattatttgtattttagggttattgtagatgtaagtgttgttgtttagagtttgggtgtaggatttagatgtaggattttggttttgttatttttttagtgatattgaatagttgatttaatttttttggttttggtttttttatttgtaaaagaaggatattagtattagtattttacgggattgttataagaaagtaatgaattaatatatgtgagtacggagaatagtgtttggtatatggtaagtattacgtatattttgttatttttttgatttttttagtgttattgatgtcggtaagtatttggtataggttggtttaataatttttaggtatttttacgtggtgttaatttttgattattgggagttattatgtgttttgattcggggtttggtttttttatttttgttttgtaggataatgtcgttttttgtttcgtggggtatttttttgttggtaggtttgtgttgtttggtttttgtttttttggttgaggatttttagggagatgttgtttagaagatagatatattttattatgattaggattatttaatttttaataagattatttttaatttggttgagttcgtttttagtttatatcgttagttggtatattagtttaatagtattaatatttttttttttttagtgagtatcgttatagtttttgtaatgttttttttggggattaaggttgatatttacgatgaaattttggagggtttgaattttaattttacggagatttcggaggtttagatttatgaaggtttttaggaattttttcgtatttttaattagttagatagttagttttagttgattatcggtaatggtttgttttttagcgagggtttgaagttagtggataagtttttggaggatgttaaaaagttgtattatttagaagtttttattgttaatttcggggatatcgaagaggttaagaaatagattaacgattacgtggagaagggtatttaagggaaaattgtggatttggttaaggagtttgatagagatatagtttttgttttggtgaattatattttttttaaaggtaaggttgtttaattagtttgagttgtttttatagaaataagtaaaaatatttttaaattattagtttttgaattttttttggtaatgtattatgggttatagtaatgttttttagcgtggattttttagttttttatatataaatattaaaatgttttttattattgagtaatttgaggaaataatagattaaattgttaaaattattgatagttttgtagaattttttagagtttttaatgtttttgtgtatattgtatatgtagaatatataatgtttagaattatagaataaattgtaatatattgtataaagggatagttttatggaatatattttatacgattttagtgttttagaattagtattagttttgtaatttgaaagatttgggtttaaattttgtttttaatataattagtttttgataaaaataatgtattttatttttttgaggtgttaattttttattttagtatggataaaatattatttttgttgttaggtttttttaggattaaataaatgataaagattgtggggatggtgtgtggtatatagtaggtgatggatttttttgtattttaggttgtttttttgtttttgaggggttaaaatgttagggttttgggggttttagggtattttaagttagtttttattgttttaggaaaatagtataggggaggggaggtgggaggtaaggttaggggttgttttttttattttgaggtttttttgtttttgaggtaaaggagggtagtggagagtagttaggttgtagttagtatagttaaagttttggttttgttgtggttttagtgggggtttaggtttttttttagttttagttttttttttttgtttaatgagaaagttgggattaggggtttttgaggtttttgtttattttgtatgtttcgatggtgaagttttgttggtatggtagaggggaggttgtttaggtatttgtattttttttgttaatttagaggatgaggaaagtttttaggaatagtaagtagaatgtttgttttggatgaataattgagttgttaattaataaggggtagggagttttagatagaaggtattaaatatgtttgatgttttaatattttatttgtaatatttaagatatttttaaataaatatatgattttaataaaaatgtatagttacgatggtattttttagtttgatatcgttacgatgtagaaattttgtatttttttttagttttgaattatttttatataatttttttcggtagtttggatggttagttttagtattttttatagatgatgaagttgagtttcgagggatgtgtgtcgttaagggggtttagggttttttagggaggggatttatggtttttttattttgttatatttttttaaatttttatttatttttggtgatgtttatttttttttttttttagg

SEQ ID NO: 1452 - DNA, 7106 bp, Artificial Sequence
  chemically treated genomic DNA (Homo sapiens)
tttggagagaggggaaggtgggtattattaggggtgagtgaaggtttggaagagtgtagtagaataaagaaattatgagttttttttttgagaagttttgagtttttttgacgatatatatttttcgaggtttagttttattatttgtaaaaggtgttgaaattgattatttaagttgtcgaaaaagattgtgtggggataatttaaaattagaggaagatgtagaatttttatatcgtggcgatgttaggttaagagatgttatcgtggttgtgtatttttattggaattatatgtttatttgagggtgttttggatattataaataaaatgttggagtattaggtatatttggtattttttgtttaaggttttttgttttttgttaattggtagtttagttatttatttagggtaaatattttgtttattatttttgagagttttttttattttttagattggtaggggaaatgtagatgtttgagtagttttttttttgttatattaatagagttttattatcgaggtatgtagagtggataggggttttagggatttttgattttagtttttttattggatagaaggaggagattggggttggagagggatttgggtttttattaaggttatagtagagttaggattttagttgtgttgattgtagtttggttgttttttattgtttttttttgttttaagagtaagggagttttagagtggaggaagtagtttttggttttgttttttatttttttttttttatgttgtttttttgggatagtgggagttggtttagaatgttttggggtttttaggattttggtattttaattttttaggggtaggaaggtagtttgagatatagaagagtttattatttgttgtatgttatatattatttttatagtttttgttatttgtttaattttaaaaaaatttgatagtaagaatggtattttgtttatgttaagatgagaaattagtattttaaagaggtagaatgtattgtttttgttaaaagttaattgtgttagaggtaggatttgaatttaggttttttagattgtaaaattgatattgattttgggatattagagtcgtgtaaagtatgttttatgaaattatttttttatgtagtgtattataatttgttttatagttttaagtattatatattttatatatatagtatatataaggatattaaaggttttgaaaagttttgtagagttgttagtagttttgatagtttaatttattatttttttaaattatttaatgatggaaaatattttagtgtttgtgtgtagaaaattgaagaatttacgttgaaaagtattgttatggtttataatgtattgttaaggagagtttaagaattgatggtttgagaatatttttgtttgtttttatgggaatagtttaggttggttgagtaattttatttttaaagaagatgtaatttattagagtaaaaattgtgtttttgttaagttttttgattaaatttataatttttttttgagtatttttttttacgtaatcgttgatttgttttttggttttttcggtgttttcgaagttgatagtgaaggtttttgagtggtataattttttaatattttttaaaaatttatttattagttttaggttttcgttgaggaataggttattgtcggtggttagttggagttggttgtttggttggttgagggtacggaggagtttttggaagtttttatggatttgagttttcggaattttcgtgaggttgaaatttaggttttttaggattttatcgtgagtgttagttttggtttttagggagagtattgtaaaggttgtagcgatgtttattggggagaagaagatattggtgttgttggattggtgtgttagttggcggtataggttgaaggcgaatttagttaggttgggggtgattttgttgaaggttgggtgattttgattatggtgggatgtatttgttttttgggtagtatttttttggggatttttagttagggagatagggattaggtagtataggtttgttagtaggaggatgttttacgagatagaagacggtattgttttgtaagatagagatgggggggttaggtttcgagttaaggtatatgatgatttttagtgattagggattgatattacgtggaagtgtttagggattattaaattagtttgtgttaagtatttgtcgatattagtaatattgaaagaattagaagaatagtaaaatgtacgtagtgtttattatatgttaagtattgtttttcgtgtttatatgtgttaatttattgtttttttgtaataatttcgtgaggtgttaatgttaatattttttttttatagatgaagaaattaaagttagagagattaggttagttatttaatgttattgaggaagtagtagaattagaattttatatttaggttttgtatttaggttttggatagtaatatttatatttgtaatgattttaagatgtaaatggtatagttattgttttataaaagaagaaaatgaggtataagaagaggaatgggtttgtttacgattatttaggaatcgggttagattagaattaagaattatgttaagttggaagtttttggagggtttttatttaattttattatttagtggttagggaaattgttgtatagaagggaaatgtattttgtataatggtaatagttagagagtatggaggggttgtgattaaattttttgggagttgtttttatttaatatttataaggatttttagtttttagggttttttttttaagagacggggttgtttttataatgttttgtggttttagatataagaataggttgatgtttttgtagttagtttatttgtcgtttgggttattaatggtgttttagttttgggtttttgttgttaggggttttagagacgtttatttttttttgaaagtaggggtttgtgttgttttaaagtagatggaggaggtgggaagtgaaaagatattttttttaattttagatagatttgggatttaatttgattttgttattttttaggtgtatgagttaggataagttatttatttttttggtttttattttgttttatatataaagtgatgtttatgtatgagaatttagtgaaataagttttaatattaaattttatattaaaaggatttgagagggtaatttttttgagggaggggttggtaggtgttgtaaatttaaaggttttaggtgataggttagtgaggaatatatgttttatattcggggttgagataatagggagtggtggggtttgtggttgaattagcgagagtaggttttgtcgagtaatggttaaagttaacgttatttatagtaatatagaatttgttttgttttatagtgatttttttattttagatatgtttaggtttcggattattagtttgtagttttttaggtagaatttgtcgtttttatagatgggaaaattgaggttttagttgaggagaatatgttcggtagttatattgttaattattagttataaaattaaaattattattttaataaaatataaagaaaaaggtgtttttgaatttgggaaatgaaaaattggagaaaaaaagttggaaataataaatattgagattttttaatttttttggatttttaaaagtttttttttaataaagtaataaatgaagtgtaaagttggtttttttttattattttttttttggttttcgtgtttttaagtaatttaaatggaatagattatatattatataatatatgtttgtatttttttttagttagttagtgttgttagaattaaagacggtgttaaaattagtgttgtatatttttatttttttttaattttttttttattttttaattgaattttgtgtagttttttatggtttatggaaatttttttattattatagggtttagtggttaggagggagttgggtttttgtagggtggggatattaaatatgttgagtggttttagggttagaggttgtggtttttagttttggtagggttattattatttatttggtttttagtaagaattttttggttttggggttttattttttttagttgtgtaaagtggggttgggagaagattttattggggttttttgtatattaatataggtttttgggttttttttgagatagagtttcgttttatttgttagggtggagtgtagtggcgtgatttcggtttattgaaatttttatttttcgggtttaagaaatttttttgttttagttttttaaatagttgggattataggcgtgtgttattacgtttggttaatttttgtatttttagtagagttgaggttttatcgtgttggttaggtaggttttgaatttttgattttttgattcgtttgttttggttttttaaagtgttggggttataggcgagagtttttgtatttagttaggatttttggttagaatggtatttgggtttaatgtagtaaaatagatggagaatttttatggttaggtatgagataggtgtttttttagataggggaattttgggtttaaaggaggtggagaggttggtgtagggagggtggcgagggggtgatagttgggaggagtatatttttttatatttatttattttttttggtgttatattatttattttggttttttttttttatagtgaagagtttgaagtttagagagggttagggttttgttgaggttatatagtaagttagtgataaagttggaataagttttggtttttttagtatttagattatgaattgagatagttgtgtttttagattttagatgatgaatgttagaattgggttgtgatattggttttaagtattatgttgggtttattatgttttttaagttgttttttataatattaggattttaaaatttgtttttttttggtttttttattagaggtagtattttgtatttttaaaagttagtgtttgggagggcgattggagaggagaaagtcgttatttggttaagtattttatggtgtacggatattgaggttaagttttaaattaaaagaatgaaggttttatggtgatatttttgggatcggggtaggtgggagtattttttgcggggttagggatagggaagcgagttattttttgtttaattttatattatttttattcgggagtataaaataagggattaagagtaattcggtagggtgtagggaagagaatttcgtttatggttaaataatttgttgaattgggtaataaataaatttaagtgtgattaggttttgttatttattggtagggggtttggggtaaatgattttatttttttgagtattagttttatagttgtataatggagaaaagaattttttggatagggatgaggaataattgacgtaatgtatgagtgggtattaggtgaggaagttttttttgtatttgtatataggttgagtttttgttcgagagatggtagattttttttcggagagtttgttgtattttttaggattattttagtaggaaggggtttttgtttagtagtgaatagtatttgagtttggtaaattttttattaaattatttaattgtttattgtttgttagttgtttaattttatgttaagtaaatattagttttagcgttattattattgttatatttattaatatttggtgttttataggtatcgtattatttaatttgtttttaaagtttattttataaggtgtaaattattagttttattttatagatagaaaaattgagttttaaagagtattaaataatttattaaaaattatagagttatttgtttataaaattgagatgtaattttaaatgttttgtttgggattaaatagattttattttaaaatttgatattgaattatttttgtgtataaagttgaagttagaagttttgaattagaaaattttagaggtagtttggttaaatgaagaggggagtattagtttgtggttaaaattaaaggttttgaggttagattgttttacgttaatttgttattagttgtgtgattttggataagttatttaatttttttgaattttagttttttggagatgagaaaggtggattttgttatagagttattgtgaaattaaatatatataaaatgttaagaagtgtttgttgcgtagtaagttttcgagaatattagtttttgttgttattgttgtaggttttttagaggcgttttataggaaattggttattttggttttggttatttttttgatttgtttttaaaatttagtgtaggaaaaattaaatttttttaatattttagagattaaggtcgggtggggtgaggggaggggatagaagttaaaggttattatgttttgtttaagagaatagagaggttgagtaattgtttgaagttatcgagtattagagaggttttaagtttagtttaggttttttgttttttatttagcgtttgagatttaagagaaatagtgatattagggttaggtttaagagtttggggattggagttaggtgtttgagttcgaattatggatggtgtgtgatttggggttagttatttatttttttgtttttattttttttatttgtaaaatgggaattatattagtaattgttttggagggttatgaggtttaattacgtattgagtttagtcgtggtttggtgtagagcgattatttaggaatgttagtttgagttttgggtgatagtgttttttatagttttttgttttttattgggataggagggtttagaggtttacggtgtatggggaggtttattttgatgtaaggttgaggtttggtataggtttgtttttggttatatttggaggggatggagaatgtgagtcggcgtttttttttatttttttttggattttaatttttttatttatagaaggggagaaagatgtatgtttaagtagtaggagaggtggtgaggtttataggagataatagataggagttttcgatagatagaggagttgtgtaaatagaaagaaatggttgcgttttgttgttgttgttgtattttg

SEQ ID NO: 1453 - DNA, 6059 bp, Artificial Sequence
  chemically treated genomic DNA (Homo sapiens)
taaaaatagatatttagaataatggaatattatagagtttagaaataattaatgttgtaaatttataattatttaatttttaataaaattaataaaaaaagaaataatgggggaagggattttttattaaataaatgattttggaataattggttagttatatgtagaagattgaaattgtattttttttttaaattatatataaaaatttatttaagatgtattaaagatttaaatgtaaaatataaaattataaaattttgtaaggtaatttaggaaatatgattttggacgtagaatttggtaaatattttatgatgaagatgttaaaagtaatagtaataaaaataaaatttgataaataggatttagttaaattaaaaagttttcgtatagtaaaagaaattattagtatagtaaattaataatttatagaatagaagaaaatatttgtgagttatgtgtttaataaaggtttaatatttagaatttataaggaatttaaattagttaataagtaaaaaatagataattttattagaaagtgggtaaaggatatgaatagaaattttttaaaagaaaatatatatgttgttaataaataaatgaaaaaatgtttaatattatagattattagagaaatgaaaatttaaatagtaattgagatagtattttatattagtcgttataatataatatatgttgttaaggttgtagagaaaagggaatatttatatattgttggtaggaatgtaaattagtttagttagtatggaaagtagtatggtaattttttaaagaatttaaaatagaattattatttaatttaagatattttattaatggttatatatttaaaggaatataaattattttattataaagatatatttatgtagtatgtgaattatagaattatttatagtattaaagatatagaattaatttaattgtttattaatgatagattggataaagaaaatgtggtatgtaaatattatagaatattacgagttataaaaaagaataagattatgttttttgtagtaatatggatggagttggaggttattattttaagtaaatttttataagaatagaaaagaaaatattatatttttttacgtataaatgaaaattgaatattgagtatatatggatataaagaagggaataatggatattagggtttatttgagggtagagaatgggaggagcgtgaggattaaaatacgaatcgagtattatgttgattatttggtgatgaaatatttttgtatacgaatttttttatgatatgaaatttatttatataataaatttgtatatgtatttttgaaattaaaataaaagttaaaaataaaattttaaaattagatatatagtttgtttatgaggtttgatggaaatagtaggtaagtttatttattattggtgggattataatatggtataatttttattaagggaaatatggtaatattattaaaattttaaatgtattttatttttgtataagtaaatatatttttgggaatttggtttataagaaagtaagttaagaaaggttatatgtggtatagtttgtaatggtaaaatattggaaataatttgcgagggtagtaatgtgggtttattgaaagttaaggtagtttataaatgattcgttttgtagttttttttttttttttttttttttaagtaattaaagaattagaatattattaataattaataatttaaattaattcgtgttttttttatttatttagaatgtttttttttttcgtttttagagttagttattattttgtatgttatttttatagtttttttattttttatgtatttttttttgagttttgttttatatgtaaatatgtttaggtaatatattttttagtttttttttatttgagttttatgataagtgggtaattttaaatattgttattgtggatttgtgttgtttatttaatattattttaattatggttatattgtgtatggttgtaatttagttatttttataattgtataatatttttttgtattaatatgttatgatatatttatgtattaatatgttatgatatatttatttagtattttagtattggtaatatggattgtttttagtatgttattgttaaaaatagtatttttatgaatattattgtgtatgttttttggtaaatatgtggaaatattttttttaattaaatttttaggagtgtaattgttgaattatagattgtgtatatatttaattttattagttgatgttaaattgtttttaaatgttttattaatatagatttttattagtaatgtataaaagttttttttttattataaattaataagaaaagataaataatttatttaaatttaaaataaaagttgaaattaaataaataagtaaataaaaggtaagatatttgaattggtattttataaaagaggatagttaaatggataatagaaatattaaaaatgggtcgggtgtagtggtttatgtttgtaattttagtattttgggaggttaaggtaggtgtattatttgaggttagcggttcgagataagtttgattaatatggtgaaattgtaaaatataaaaattagttgggtatggtggtatgtgtttgtaattttagttatttgggaggttgaggtaagagaattatttgaatttgggaggtggaggttgtagtgagttgagattgtgttattgaattttagtttgggtgataagagcgaaattttattttaaaaaaaaaaaaaaaaaaaaaaggagtattaaaaatgggttagttttattagttattaggaaagtgtaaatttaaattataggaaattttataagatgtttatttgaatggttaatgaaaaggtaaattatatgaggtattggtgagattatggagtaaatggaatgtttatatattgttgatagtagtgtgaattggtataatgatgttggaaaattgattgtagtatttatgatagttggatgtatttatattttgtgatttgtattttgtgatttagtaattttatttttaattatatatttaaaataaatgtatatttatgttttgtaagagatatgtataagaatatttatagtaatattataatagttaaaatttagaaatatttaatgtatattgatagtagaatgaatatataatatttttggtattttttatagaatattgtatagtagtgaaaatgatgaattataggtgtagattttaaaatggatgatttttaaaaatataatgttgagtaatataagtaggatatatgaatattatattttagattttatttatatataaattgaaaaagtatattaaattgaatatatattttagaatatagatagaagtggtataattataaaggaaagtaagggttaattattataaaattttaggaagtagttatttttggggaggaaggagaatgaagtaattgaggagaggtatggagtatagatatagtaaatattttttttttttatttggtagtttattttaatgttattttttaaagaatataggtattttttgtgagttttttatttgtttgtatggtttattgtataatgagtttttgtgtaaggtagttaaaggtttttatagtttgatattcgtttatgttttttttagttttaggtttggtgggtatgtggttagagtttaaatcgataaggggtggggattttattagttgaattagtgtttaataattagtttgttattttttttgttttaattttattttaatttagtgatttttttaatttagattttgtttttgataatatttaattttaggatatttatttttattatttagaatttttggtaataatgatagaatagtaagttagattagttgaagtagagggttaatttattgttttataatttaattatgagaagggtgtgtgaagaattgtttttaaggtaaaggagggaaatttggttgtgttatttgaatttttttttattattatttttttttttgttttagtgtattagagtcgttttttttagataattgatttttatttttagatttagataattatttttggaattttttggtttatatatattattttttttagaagaaggaattttcgttttttttttttattatttatttaaataaaatatgttaatagattagattaagttttatatataatatatatatatatatttatatatatatatatatatatatatttttatttgtggttaggggttaggtttttatgattagtagtttttattagatttataagttgatggtttaaagagataataattttttataagaaatagggtgttgtttaaagaagtggggaggtatgttggatatatatattgtagatgtttaatgtatatatgatatatgttttttattattttttgattattttttttttattattgtgattttaagggtattatttttttttagatttagaattttattttttaattatttttttgatgtatttgaaaggtcgtttttgaaatagtaaagtgtaataattagttattatgtatttaaggtaaatttgttttatagagttttttgtaggattagggaagaaggaaggaaatgtttagtttgatgttgggagtggtaaaatgataaagtagatttgggtggggtttgtagtattagagtataatggagaaatattttggttttgtaattaagattggatttattagtgatttgttgaataattttcggtgatttttttttttttttgggttttattgtattttaaaatatgaagaattttattgtaatgttatttaataagtgagttagtatttttattttgtgagaaagtaggaaaatttttgggataattagagatgatgtgatgtaatgtttattagttttttttgtgaataattttgagggaaagtttttaggttttttttagaatggggtggatattttttaatatagttaaggaattattttttgtaaatattatagattcgtttttggagttaggttaagttggattgtataaagattggtatggttttagtttttagttaaatatttttttgatattatgagggttagtagttttttgatcgtggtggtgttttttatcgttgggacgttggttttagaggtagttgttacgggaggtgagtgaataggtgatttgttgggttgggttggattaaggggagattttttgggatattttgggttaggatagggagtatttttgaagtagtaggtagtattggagtttagattttagttttttgttttttgttattatatttagaaaaaataggattttggttggtggattttacgtgttttttattttagtgattgagatattaggattgtttgtggaagtaatgttggtatgtggttttggttttagatgttaatatttgtgtagaatgtgtaataaaataatgaattttaggattttaaattttgggtgtggatatagtttttcgtttttttgttttataaaagtattggagtaattagtattttaaaaggaggttaagaaataataagtttttaggaattatgttgtttgaggatttttattttataaggagggaattaaaaatgtagaaatgagtgagtaattgttaaggtaatttttagagttaggatggggtttaagttttttagtatgtggtttagggtttttttttattttaatgtattttttaataaatgataatgtgttttttttattgttgggtgttattttagtttgattattgtttttgagagatttggagtggaggaagggggaagaaataaatatttaagggaattttggtttagtagattattttaaaaaaggaagagttttttaagagtgtagtttttagaggtgtattttttttatttaggttatggtttgaggatgttgtagtaagtagtggatggatttagatttagaggaaagatatggtagttgaagtagaggtttattgggtataaatgtgggttcgtttttttttttaatagt

SEQ ID NO: 1454 - DNA, 6059 bp, Artificial Sequence
  chemically treated genomic DNA (Homo sapiens)
attgttaaaagaagaaacgagtttatatttatatttagtaagtttttgttttagttgttatgttttttttttgggtttgggtttatttattgtttattgtagtatttttaaattatggtttgagtagggaaggtatatttttgggagttatatttttggaaggtttttttttttttggggtggtttattggattagagtttttttgagtatttgttttttttttttttttttattttaagttttttaggagtagtggttagattggggtgatatttagtagtgaagaggatatattgttatttgttaggaagtgtattggagtaggaaagaattttgagttatatattaggagatttgagttttattttggttttgggaattattttggtaattgtttatttatttttatatttttggttttttttttataaaatgggggtttttaaataatatgatttttgaaggtttgttgttttttaatttttttttagagtattgattattttagtgtttttatggggtagagaaacgggggattgtgtttatatttaaggtttaaaattttggagtttattattttattgtatattttgtataggtattgatatttgaggttaaggttatatattaatattatttttataaatagttttgatattttagttattgaggtggaaagtacgtggagtttattagttaaagttttattttttttgaatatgatggtaaagaatagaaagttgaaatttgggttttagtgttgtttattgttttagaagtgttttttgttttggtttagggtgttttagagggtttttttttagtttaatttagtttagtaggttatttgtttatttatttttcgtgatagttgtttttagaattagcgttttagcgatgaggaatattattacgattaagaagttgttggtttttatggtgttaggaaggtgtttggttaagagttaaggttatattaatttttatgtagtttagtttggtttggttttaggggcgggtttgtggtatttataagggataattttttagttgtattgggaaatatttattttattttgggagggatttgggggtttttttttaggattatttataggaagaattaatggatattatattatattatttttgattgttttaagagtttttttatttttttatagagtagaagtgttggtttatttattaggtaatattataatgaaattttttatgttttgaaatatagtgagatttaagaagagaaaggaattatcgaaggttatttagtaagttattggtagatttagttttgattataaaattaaggtgtttttttattatgttttggtgttataaattttatttagatttattttattattttattatttttagtattaaattgggtattttttttttttttttttggttttgtaaaaaattttgtaagataaatttgttttgaatatataatgattaattattgtattttgttgttttagagacggttttttagatgtattaagaaagtaattggaaggtggaattttaggtttgaagagggatgatgtttttgaaattatagtggtagggagaaaataattagaaagtagtagaaaatatgtattatgtatatattggatatttatagtgtgtgtgtttagtatgtttttttatttttttgaatagtattttgttttttgtgaagaattgttgtttttttgaattattaatttgtgagtttaatggggattgttaattatgaaagtttgatttttgattataggtaggggtgtgtgtgtgtgtgtgtgtgtgtgagtgtgtgtgtgtgtgttgtgtgtgagatttggtttggtttattaatatattttatttgaatgagtaatgaaaggggaaaacgggggtttttttttttggaaaaggtgatatatatgaattagggaattttagaagtggttatttaagtttgggggtggagattaattgtttgagaaaaacgattttaatatattgagataaggagagaagtgatggtgagagaagatttagatgatatagttaggttttttttttttattttgagagtagttttttatatattttttttatggttgggttatgaggtaataaattagttttttgttttagttagtttgatttattattttgttattgttattaaaagttttgagtaatagaaatgaatattttgaagttgggtattgttagggatagaatttgagttaagaaagttattgagttgaggtggagttaaggtagggaaggtaataaattaattattggatattaatttagttggtgaaatttttattttttgtcgatttagattttgattatatgtttattaagtttgaaattgagggagatataaacgaatgttagattgtggaagtttttggttattttatataaaagtttattgtataataagttatataaataaataaaaagtttatagaaaatatttatattttttaaagaatagtattaaaatgagttgttaggtaaaggaggagaatatttgttatatttatgttttatgtttttttttagttgttttatttttttttttttttagagataattgttttttaagattttatggtaattagtttttgtttttttttatagttatgttatttttgtttgtattttgaaatatatatttagtttagtatatttttttaatttgtatgtaaatgaaatttaaggtatagtgtttatatgttttgtttatgttgtttaatattatatttttgagagttatttattttgaagtttatatttgtagtttattatttttattgttgtatagtattttatgaaaaatattaaaaatgttatatatttattttattgttaatatatattggatatttttaggttttagttattatagtgttgttatgaatatttttgtatatattttttgtagaatataggtatgtatttattttggatatatggttaggaatggaattgttggattatagagtatagattatagagtatagatatatttagttgttataaatattgtaattaattttttaatattattgtattaatttatattgttattagtaatgtgtgagtattttatttgttttataattttattaatgttttatatgatttgtttttttattagttatttaggtggatattttgtgggattttttgtgatttgaatttatatttttttaataattggtgaagttgatttatttttaatattttttttttttttttttttttttttgagatggaatttcgtttttgttatttaggttggagtttaatggtataattttagtttattgtaatttttattttttaggtttaagtgatttttttgttttagttttttaagtagttgggattataggtatatgttattatgtttagttaatttttatattttgtagttttattatgttggttaggtttgtttcgaatcgttgattttagatgatgtatttgttttggttttttaaagtgttaggattatagatatgagttattgtattcggtttatttttaatatttttattatttatttggttatttttttttgtgaagtgttaatttaagtattttattttttatttatttatttatttaattttaatttttattttagatttgaatgggttgtttatttttttttattgatttgtagtagaaaagaaatttttatgtattattaatgagagtttatattggtgaaatatttaaaaatagtttgatattagttagtaaaattgaatgtgtatataatttataatttagtaattgtatttttaaagatttaattaaggaaaatatttttatatgtttattaagaaatatgtataataatgtttataaaagtattgtttttaataataatatattggaaatagtttatgttattaatattaaaatattggataaatatgttatgatatattaatgtataaatatgttatgatatattaatgtaaggaagtattatataattatgaaaataattgaattatagttatgtataatatgattataattaaaataatgttgaataaataatataagtttatagtgataatatttagaattatttatttgttataaaatttaaatgaaggagaattgggaaatatattgtttaggtatatttatatatgaagtaaagtttaaaaagggatatataaaaaatgaaaaaattataaaaatgatatataagatagtggttaattttggaaacgagagaagaaaatattttggatgggtgagaaggatacgggttgatttaagttgttggttattagtaatgttttagttttttgattgtttggagagagagagagagagagaaagttgtagagcgaattatttatagattattttagtttttaataaatttatattgttattttcgtaagttgtttttaatattttgttattataaattatattatatgtggttttttttagtttgtttttttgtgaattagatttttagaagtatatttgtttatataaaggtgaaatgtatttgaaattttgataatattgttatattttttttgataggggttgtattatattgtaattttattagtagtggataaatttgtttgttgtttttattaagttttatgaatagattgtgtgtttaattttggggttttatttttaatttttattttagttttaggggtatatgtgtaggtttgttgtataggtaaattttatgttatgggggggttcgtgtgtagaagtattttattattaggtaattagtatagtattcgattcgtgttttgatttttacgttttttttattttttatttttaagtaggttttagtgtttattgtttttttttttgtgtttatatgtatttaatgtttagtttttatttatacgtgagaaaatgtggtatttttttttttgtttttgtgaaagtttgtttaggataatggtttttagttttatttatgttgttgtaaaggatatgattttgtttttttttatgattcgtagtattttatggtgtttatatattatattttttttatttagtttattattgatgagtaattaggttgattttatgtttttgatattgtgaatagttttgtgatttatatattatatggatgtgtttttatgatagaatgatttatatttttttgggtatataattattaatggaatattttgggttgaatggtaattttgttttaagttttttgagaaattgttatattgttttttatgttggttgaattaatttatatttttattagtagtgtataaatgtttttttttttttataattttgatagtatatgttatgttataacgattggtgtgagatgttattttaattattgtttggatttttatttttttaatgatttgtgatgttgagtatttttttatttgtttgttggtaatatgtatgtttttttttgagaagtttttgtttatgttttttgtttattttttaatggggttgtttgttttttgtttgttaattggtttaagttttttatagattttggatattagatttttgttggatatatagtttataaatatttttttttattttgtaggttgttggtttattgtgttgatagttttttttgttgtgcggaagttttttagtttaattaggttttatttgttaagttttgtttttgttgttattgtttttggtatttttattatgaaatatttattaagttttacgtttagaattatattttttaggttattttgtagggttttatagttttatgttttatatttaagtttttaatatattttgagtagatttttgtatatggtttaaggaaggggtataattttagttttttgtatatggttagttagttattttagaattatttatttaataggaagtttttttttttattgtttttttttttgttgattttgttgaagattagatagttgtaggtttgtagtattaattatttttgggttttgtaatgttttattgttttaggtatttgtttttg

SEQ ID NO: 1455 - DNA, 17213 bp, Artificial Sequence
  chemically treated genomic DNA (Homo sapiens)
aattttttattaaatgagaaaaacgggaaagagaaaaaatatagaagagtttgaatgttatttttaggtaggaggttttggagacgggttttttaggggttttttttggagaatgttagaattttttttgtttttttatttgaaaatggttgaagaggggaagaaatggtttgtacgtatttttagtggtgttatattaaattgtttttttacgtttgattatagataacgaaaatttaggtttttgttttatgagtattagaattatttattagagtagttttttaattgtgtatttattttatttattattagaaatttggttatttttggttttgattgttttttattataagtttgttagaatacgatataatgaaaatgtgataaatatttatgaaataattttatgttagatatgtttttttaggaggatgttgagtttagaattattaatttacgtaatttggaaatagttttttaattttatttaaatttaggtgggatggtagagaatgttagattatagaatttttttttaggtttttttgtttagtaaatttattttgagaagaagttattgaggttaggaatgatttgttttttggtgaagttatatgggtttatatttttattttgtagatattaatattataagtggttaggtaatttgttttattgaaggtattagttaatgtaattaaataagagaaaacgattagagagatgaatattggagaaagaagtataattatttttatttataggtgatgtagtatagttatagatgatttaaaagaattaataaaaaatataaatagtaaaaaattttagtaaggtagtaggttataaagttaatatataaaaataatttttttatttataaataaaagttagttggaaaatataatggaaaaaatttgtttatatataatattaataaagagataaaataattagaaataaattaaataagaaatgtgtaaattttatatgaataaaattttaaaggaaaaaggaaaaaaattatttgaaggaatagaaagatttagtatgtttttggttagaataattaaattaaagtataaatgttggtttataatagggtaatatgtaaatttaatatgtttttaatagattattaataagatttatttttatttttatttattttatttttattttattttatgtttttgagatagagtttcgttttggtgatttatttatttttgttttttaaagttttgggattataggcgtgagttattgtatttggtttgtttgattatagtttaattttatttttttaattattatatatatatttttttgagatagggtttcgttttattatttaggttggagtataatggtattattttagtttattgtaatttttgttttttaggtttaagtaatttttttgttttagttttttaagtagttgggattataggtatacgttattaggtttagttaatttttgtatttttagtagagatggggtttttttatgttggttaggttggttttgaatttttgattaagtgatttgtttgttttggttttttaaagtattgagattataggtgtaagttattatgttttgttaataagatttttttttttagagttagataagttgatttttaaatttgtatgggtgaggtcgggtgcggtggttgatatttgtaattttagtattttgggaggttgaggagggtggattatgagtttaggagtttgagattagtttggttaatatggtgaatttttatttttattaagaatataaaaattagttgggtgtggtggtatgcgtttgtaatattagttatttgggaggttgaggtatgagaatcgtttgaatttaggatatggaggttttagtgagttaagatcgtattattgtattttagtttgggtgatagagagggattttagtttaaaaaaaaaaaaaaaagtttgtatgggagaaaaagtaataaggagagttaggaaaatttgaagtagaagagtagtaaggagaatgcgttgtacgagatattgaattataagagaaaatttttataattgaaagaatttgattaatagaattaaatagaaagtttagaaagtttagaattagatttaagtatatgtagttatttgatatataatataggtggtatgtgaagatattagtgaaaatggttttttaataaatagaggtggaaaaattgaaagttatttgaaagcgagttaaaattggatttatattttttatatattagaataaattttaaagggattagtaatttaaatataaaaaataaaattgtgtaaatattagaagaaaatattagtgaattttataatttagagattatttttttttttaaaaaaaaagagattgttttttgtgaatagagaaagtttttttaattacgatttagaaataataaaggaaaaattattaaagttgattatattaaaagagtgtatgttaaaattattagaagtaatgttagaaaatagatgataagttgggggaaatattcgtaatttatattatttaagattaattaagttataattagggaggggcgtgtggtttgtttttggtatttatttggtgaattttttttagagattttgtgaaatatgtgtgatggtaggatagtttttataattataagttatcgggtttatgcggttaatagtgtcgtagttgagaaattttgttttagggtaagtatagagggagtaaaatagtttgagtttttaaaattgaatttatgtaaaatatttggttagtattttttttatttttatttatgttagatgtttttgttttttaagattgttttgtttgagatggtagatggagtttttatatttatttggttaatttgttagtattttggggtttaatttttatgtttggagagaattggaagtttttgaatatacggtttaatgatgtgggttttgtttatttatatatatttatttttaaatttaatatatattttagtttttttatttttatagttttttggagaatacgtggtatttggttatatggtaagttttttttttttttttttgagatggggttttgttttgttgtttaggttggggtgtagtggtatgattttagtttattgtaattaattttcgtttgttagatttaagtaatttttttgttttagtttttttagtagttggtattatagatgtgtgttattatgtttaatttttttatatttttagtagagacgggggttttattatgttggttaggttggtttcgaatttttgattttatgatttgtttgttttggttttttaaagtgttgagattacgggtatgagttattgcgttttgttaagtaagttttttagtggtgatttgtgagattttggtgtatttattattttagtagtatatattgaatttaaatttgtagttttttattttttattttttttttattttttttttttaagtttttaaagtttattgtattatttttatgtttttgtatttttatagtttaggttttatttatgagtgagaatatataatgtttggttttttatttttgagttattttatttagaataatagtttttaattttatttaggttgttaatgttattaatttatttttttttatggttgagtagtattttatcgtatacgtatattatagtttttttatttattttttgattgatgggtatttgggttggttttatgtttttgtaattacgaattgtgttgttattaatatgcgtgtgtaagtattttttttgtataatgatttatttttttttgcgtagatatttagtagtgggattgttggattaaatggtagttttatttttagttatttaaggaatcgttatattattttttatagtggttgtattatttattagtagtgtagaggtgttttttttttattaaatttacgttaatatttattattttttgagtttttgattttttgattaaggttatttttgcgggagtaaggtggtattatattgtggttttgatttgtatttttttaattattagtgatgttgagtatttttttttgtttgttggttatttgtatatttttttttgagaattgtttatttatgttagtttattttttgatgggattttttttttttgttaatttgtttgagttttttgtagattttggatattattgttttgtcggatgtatagattgtgaagatttttttttattttgtaggttgtttgtttattttgtttgattattttttttgttttgtaaaagttatttagtttattttttttttttttttttttttttttttttttgagacggattagattggagtgcggtggcgttatttcggtttattgtagtttttgtttttcgggtttaagtgatttttttgttttagtttttttagtaattgagattataggtacgcgttattatattcggttaatttttgtatttttagtagagacggggttttgttatgttggttaggttggtttggaatttttgatttttagtgattcgtttgtttcggttttttagtgttgggattattggcgtgagtttcgcgttcgtttttggttggtttttttgtcgtaagttgttttattagtaaagtttttgtgatttgtatttagtttgtttatttttaaatgcgtgttttgtattttttagtggatggtcgtgtattaggagtcggtttttttttggaaataggttagtatttagtttttatagaggtattataaatacgttggtggggttttgtattgtggttaaagttaaggttttcgggtaggattcgcggttttttcggttggcgggtggggttgattcgtacgtttcgtttcgttttttttttcgcgtttcggacgggcgacggtagttcgagattcgggatttcgttcgttttttcgcgagtatttgaggttcggggcggtttcggcgtttttgttcgtcgttttgttcgttcgtttttcgttttggagtacgtgtttggtttgggagtcgttcggatacgttggtttgggtttgtcgttttaaagtcgggaaagtcgggggcgcgagcggggaggggggtagggtgggggtcgcgcggggtcgggaacgcgcgtgggtcgacggcgcgcggggacgttggagtttcgagaatggggcgtggtcgcgcggggttgtgattttagtagttttagcggggcgggggttcgggcgagcgttcggtttgggttttttttcggagtttcgtagcggtagagaacggcgacgcggtcgggtgagtcgtgcgtggtcgcgagttcggtcggtgacgtcgcggattcgaggatttcgggcgtttaggtttagcgtttacggaagaggcggtcggcgcgggatgggggcggcgtagagtttttcgggttataggtgatttcggtcggtttcgcggtttcggtgatttttcgttcgtttcgcgattcggaggacgcgtgtttagttttggggcgtcgggtgttaggagtcgggcgggaggcggagagaggtcgaggggttcggcgttaaacggtgttattcgggttttttgcgtgtgtttattggattggtcgtgttgggtttggttaattcgtagtatttttaggtcgtttagatttgtggagacgatcgtgtggattagttcggatttttttatcgttttgtgtttgaattaaattttttataggtaaattattataggttttgatgtttttaaggtaaagaggaaattttaattataaattggtatttaagttatttttttttttttttttttttttttttttgttttaaagattggtttcggaaaattgaggtatagaaaattaataattaatgtttatatgttgttaggaatatttagatgcgagggggtatttgagtttattttttgggtatttttgttttttgggatgttttcgtgtttaatgatagttttgtagttgtttgtattttttttggtgggggttaggtttgatgcgatgagatttgatgtgtttagtgattttttagttaaggttttgggtcggttttgtattgttggggtttttatgtgtgttgggattaatattagtgattgttgttattagtatagatggcgtttgtttttattttaggatcgtatttgagtaattgtatttattgtgatgtgttattaaagagaaaagtattttggttatattcgattatgtaaattaagtattttaagttaaggttaattttaatgtattttattataatttagtatgaaatagttaatacggattagtaatagtagagtgaaattagtatgaatagaattaatatttttttttatatatgtaataataagggtatttaagtagatgttgtacggttttagggaagattatatattttatatttttaggtttattgtatttgggattaagttaaggtatttaaagaaagaaaattttttttttttttttttttgttaggttggagtgtagtggtgcgatttcggttgattgtaatttttatttttcgggttttatatttggttaatttttgtatttttagtagtaatggggttttattatgttggttaggttggttttaaatttttgatttcgtgatttgttcgttttggttttttaaagtgttgggattatagatgtgagttattgcgtttagtttgaaaataatgtttaatttttatttatatgttaggttgtttagatatattaaatatatatatatataatatatatatatatatatatatatattgtataaggaaatagagggataaagtaggaagtttaagtttttattaaattagtttttaaatggttaaatttagtaggaaataaaggtatttttaatagaagttgagaagtataatttaatagtgatatttaaaaaaaaattaagatttgattagttgaataaaattaattgtgaatattgtttagttattggtgatgttataggaaaaaaaaagtgatgttaggatagatttgttaggtttgtttaaaaaatatataaaattgtttattaataagattttaatatttagtttttatgtttgtgattaaatattattttttatttttaaatggtatagtttttaaattttgaaataattaattttgtataaatatttgtttatgtatatatatatatgtgtatttatatatatatatgaaggatatttagttattttatttattgaagttaaagaagtaggtttttaaaaagttattgataggttttgagtttgtaacgtgattgtgaaataggtatttttgttatttatacgtttgttgaaaggataatagaaagttttcgatagaaaaattttattagattgtttataatttgttgatatttggagtattttgagtggtaaattttaaatgtggatttattttttttttttttttaggatttggatttttttaattttttttatgattaattgtttagtgtttatgtattattgcgaagtgataatgaaaatgtttaaatttagggttttgtaggtattgtgggggaggtagtggggacgtgaggggattatagatttagtagaagtttttcgatttttatttgtttttattttatttttttttagaatattatcgatagttatatcgaagagtttttttatttgttggttttcggataaaaaagttgttgattttttgagtatattgtagtgaagtttttagttgatatgttttgtttatgtaaatagaattttttttatgtaaatagaatttttagtattgtttgtgttttttttttaattatgtattgatatttaagggttgttaggaatgtttggaaagtttaggtataaaagagagatttaaataaaataaagtaaatattagttattataataaaaggattttagagataggtagcgtagggaacggaagatttaataaattataattgtggtatttaaagaattagtatagaaggtaaaatggaattaaatattatgatgaaaagtgtaaatgagggaataaggttagaagagaatatttatttatatgattttttttttttttttttaattttttaaatttttatttaggtttaggatatatacgtaggtttgtgatataggtaaatttatgtcgtaggttgttgtgtaggttattttattttttaggtattaagtttagtatttaatagttatttttttttttttttttttttattttttattttttattttttgataggatttagtgtttgttgtttttttttttgtgtttacgtttttattatttagtttttatttataagtgagaatatgcggtatttggttttttgttttttgcgtgtgtttgttaaggataatggtttttagttttatttatgtttttgtaaaatatatgattttatttttttttatggttgtatagtattttatggtgtatatgtattataatttttttattttatttgttatgtatgggtatttaggttgattttatgtttttgttattgtgaatagtgttgcggtgaatattcgcgtgcgtgtatttttatgggagaatgatttttattttttttttttttggttgtatatttagtaatgggattgttgggttgaatggtagttttgtttttagttttgaggaatcgttatattgttttttttaatggttgaattgttttatatatttattagtagtgtgtaagtgtttttttttttttataattttgttagtattttttaatttttgattttttaataatagttattttgattggcgtgagatggtattttattgtggttttgatttgtatttttttaatgattagtgatattgagtttttttttttatggttgttggttgtatgaatgtttttttttgaaaagtgtttgtttatgttttttgttttttttttaatggagttgtttgttttttttttgtaaatttgtttaagttttatatagatgttggatatttgatttttgttagatgtatagtttgtgaatatttttttttatttcgtaggttggttgtttattttgttgatagttttttttgttgtgtaggagtgtttaagtttaattagattttatttgttaatttttgtttttgttgtgattgtatttggtatttttgttatgaaatttttgtttgtttttatgtttagaatggtattgtttagattgttttttagggttttttatagttttggtttttatatttaagtttttaatttattttgagttgatttttgtatatggtgtatgtaaggaaggggtttagttttagttttttagagtagaattttttaatttgtgtgtgggtgttgtgttttgggtaggttaatagatttttttaattcgaggagtttgggtggttggagttttgtattggttatttttggggtgagtagtttggttttaaagtgatatataaatattattttttgtgtgtgttatagtttggagaaaggtgagaagttttagatgatattagtttaagagttttgtatttgatagaaaaagagaataaagagttagtttggaggaaattagtaagtgttttatattttttttttaagttaggtttggtggtttatgtttataattttagtattttgggaagttaacgtggaaagatagtttgaggtcgggagtttgggattagtttcggttatcgagcgagattttgtttttataaaaaataaaaatgaattgggcgtggtggtgtgtatttattatatttagtttttggattagaaaaatttaaaatggtttggtaagattttgttgttgttttaaagtaatggtttttaatttttttggtattagggattagattggttttgtggaagatagtttttttattgataaagttgggggtatggttttaagataaaattgttttattttagattattaggtattcgatttttatacgtagtatgtaattaagattattacgtgtatagtttatcgtaggtttatttttttataagattttaacgttgttattgatttaataggaggtggagtttaggcggtgatgttcgtttatttgttgtttattttttgttgcgtggtttagtttttaatagattatagacggatttgttggggatttttgtatataaagtaagtgtgtttggagggaaagtaattaatttaaagagatttttattagttaattagaataagaagaaaaaaaaatattagtaaattgaaatatattgtttgtaaaaagtttaagtttattaataagtttagatgaggtaaataagatgagttttaaaaaggtataaaagaatttagtaatgtttgtattgtgtttaggattgttatggaaaaagtttagttattatagttttttgggttaataaatatagtagttgtaaaaattaatttaaaggtttaaatatttaataaaaagattaagttatattatataatattggtttatgtaatttagatagaggaaaatttcgtattttattttaaggaaggatattaggttataagatattgaaatttggtgtttggttgaggttttataaaattttagtgaaggtaggattggagtttaaagttgttttaattagttagatatgtttggtattaaagagtgtgtgttttgtgttgagaaattgttttgatgtataaagattatgaattagggagttttattttgtttttatagaaagggatgattttttaggatttaattttataagattaattttttttataggaaattgttaaaataagtattagtgttattttaggaaaggaataggaaaatataataaagataaaataattaaatttgtgatattaatgaataatttttgttagatataagtataggtatagaaataagttttgtaattattgtattgtttgaaagttttaggagaggttagtttattagatttatatgttttgatttattagatttgtagaagtttaaaagtttattaaggtttgtgtaatttgtaagtttgtataaagtattaaaaaattagatatattaaaatatgttattaatatttaaataagaaaaaataatttttttgttttgtaagtaatgtgttgtgtttgagaaaaaaaattagtttgattagtttgttaaattataaattggttatgtattatagtagggaaatttgttttcgtttatgaatattttttttcggcgtgaaagtcgcgtatgtttagtagtatggtgatagacggagggagaggaaaatgtagttggtagattattttttgtgtcgaagtatatgaaaaaagtattgaaagggtttgattgatttgtagaatatttggggagaatttgaaaatatatagtatatagaaaattaaggaaaggggggaaaggtattattaatataaggtaaattagtattatataaaaaggaaatgggtttttattttattatttggtttagtatcgaatgttatttagtgataataaagtaaatttgtggatcgggatcgggttttcggtttttagattaggaaggtaatagataatgtttagaatttggtcgggtgtttgtagttttagtattttaggaggttgacgttaaaggattgtttgaggttaggagttcgaggttgtagtgggtcgtgattatgtaattgtattttagtttgggcgatagcgtgagatttttattttaataaaaataaatatatatataaaataaaatatgataaagttattaggttaaaaatagtagtatatacgttatgtagaaatatggtggtaaatattagaagaaagagtaaagggtttggaagtgattgtttttggggagttgggagggttgagaaggagtttgttgttttttataatattttttttaatattatttgatttttaaattgaatgtatatatagtaattttataaaaagaagagttaattaattttttttataaattatatgttatagaaaatgtgaaaatttagaaaaatataaaaaatataaaaattatcgttagaaatatttggtggatagaatttttttttattttggttgtaaaatgggtttatatttatttttttttttaatttatatggataaatttaaattgtatgtatagttttatattttttttaatgtaattttgtgtatttttatgttattattgtgatttttattattattagttttatttatattttataatgttgtatataatgttttattatgtataaaatttgtgagttttatttttagtgaaatttttagaagtggaatttttaatttagatagtatgaatgtttttatgatatttttttttttttttttattttattgtattttatttttatttttgatataattttaaattatatttaggaaatattggtgtattaatttatagtattgttattgatcgtgggtttttagatttttatgtagtggaaattgatatgagatagagaaagtgttttagataaggttttataatgggtttatgttggagtaggagggtagcggtataggggtaggagttttcgggttggttttcgggataggtgtttttggtgttttagggtgatatggatagttatgaggtgtgttagtagtattatatacgttagtggtaggtatcggggaatattatgttagtatagatgtgttatgattagggtatggtagatgagtttttgaggagagggttttagtaatataataaggtaagaggttaggatcgtcgttttgattttgtatgtatgtgggtattaggtttaatttttttgggtaagatttggggtggaatatggtttattttgtttttttttttggtttgtatggtttggtgggtaggtgtgatggcgtgggggatgtatggaaaatacgggagtgggtacgggttaagttttgtttttgttgttttcgtattatttgtatggcgtgagaaggattgtttgtttttgttagtattagtatgaattgtttttgtatttgtaaggtttatggtttgaaaaggtatttttaatgtattttttattattgttttttgggaaggttgtgtattatggtgttaagagagtgaattatagagttatgcggttttggtttttagtcgttattttgttattgttgttttgggttttttggagatatggtatttaaagagttaaggttcgatttttttgtttataaaacgtaggtgtttttagtagttattttagagggtaagggttttttagtgtggatttagtatatagtatatattaaaaaagtgatatttttttttgaagttgaaatttttaaatataattattagttattgttttttttttttgggggtaaatttgttaatgttttttgtacgtgtttttattggggtttgttttttttatttttttagtagtttagttattttattattttttagttttaagagtattttattgattttggttgttttttgggtagattattaaattgtttgttaattgtgtttattttgttttttttttgataatttttttttttattatgttttatgagttgtatttgtttttgttagaattatttgaataaagttatataaggttgggacgatagatatttttattttgtttttgtttggggagttaagggattaatgttttattattagttgtgttggtggttgttgaagtaggtaatttttattttgttaaggaagtatgggaagtattatttgttgtttgacgtaagggtgtttattaggagtaggatatttagttatttaatgattaatatagtttttgttaagaaaattaaatttttaggatatttttgatttattgtttttttgttgtttagtaatttttatgtaaggtatagatagaattttattttttacggttgttagtagtgtttttaattaagaaatggaatattattattgattttattgtgggttttgaaaattgagttatatttttgtttttttttttgtatttggtattaataattattgaatgttagagatggaagggaatttagattatttggtatatgtttttttttatatagagaggaaattggtattaggagtttagtgatttgtttagggtattagagttaggattagagattttgttttttttttgattcgtgttatttttttcgaatattttggtttggtttttttagtttagtgttttagattaaattttttgatatagtaaaatttatgtgtattgatttttttttcgaatattttgttttggtttttttagtttagtattttaaattaaattttttgatatagtgaaatttatgtgtatcgattttttttttgttttagatggtgtaatttgggttggttagataggtatttttttagtgggcgtgtttttagataaaggtggttttgttttgttgaagttattgatataaagattagcgtttgaaatagatttttcgggatattatcggagacggagtgttttattattagttttttttaggtggatatttttatttgaattaaaagttttttaggttgggcgtggtgtatggttgtaattttagtattttgggaggttgaggtaggaagattatttgaggttaggcgttggagagtagtttgggtaaggtggtaagaattttgtttttataaaaaaaaaagcgtaagagttttttagtatttgaggggaaaacgtgtgttgacggtagaatagtttaggatggggttgggggagtatgtgggatttttttttggttagttgatatggtatttaatttttgttttttttttttggtttatggaggagttattttatttggtagtttttttacgtgggttgagtttttttggggataaagatagaagtttatgtttttaggttagggaaaattttacgtgttagggtgtttgttggttttgagttttgagatacggattttataggttgtgttttttgttttggggtattttttttttttttatttttaatttagaagtttttttgttttattaattgtttttttttaagttgataagcgggtagtttttgtgatttagaatttaaagaattaaaaataggtttaattttgttttagtttcgtgtaatggttatttttgtttatattggtgtttttagggttttgcggaattttggatttatttatgtattattaaagatttttttatatttagaagaattttagtaatatgtattttttattgtttttttattagaaattagtaattttaaaatatgtttggaaaggtttggtaagttaggagtgtttagtgttttaagtattttgtgtaatgaataaagaagagtttgaaaataaaatatttaaataagtatagtaaataagttttattaggtgtatgagttattgttttggtttttcgtggttgttgtaataaatgattatggattcgtggttaaattgtatatgtttatttttttagagttttgaggttggaggttggaaatgggtttcgtagggttaggtttttttagaggattttttttgtttttttagttattgtagttgtggtttttgcgttttttggtttgaggttttttatttttaaggttagtggagtggtattttgttttattttttgtattgttttttttcgtgagattttttttttttttttttttagaaggatatttgtgattatatttagggttaattggaataatttaggataattttttattttaagagtttgaatttaatcgtgttgtatagttttttttgttatgtaaggggtatttataggttttagggattatgatttaggtatttttggagtatttgtttagttaattttagttttaaatgtaaaggtatgtatagtggagagtcgtttaatttagtatttttttatagggtttttagtaggtattttttttttttttttatttgttttaggaaatgtttgttttagtttttttttttttttgtttcgtgggtttttatttattgtttaagtgagttattgggattgttttagaatgttggtattttttgattgggatatatttatttggtaaatatttgagaattgtgttagagtaggtaggtttcgtatttttgtatttttgtatttttttttttttagtttgattgtttgtggggtttttagttgttttttgtttttttatttgattttgtagatttttttttttgagtagtagtttagaaagcgtattcgttttgcgttttaagtttagttattttttagttttattttcgttaattttattttttttgtagtgtagtggggtattgatggtaggtttttttaagggtttggtggattttaatatgtgattttgtgatttcgatttgtttgaagatattttagtttttttttttcgattatttagttgtatttttgttttggattttgttggggttgttatatttattgtacggtagggttagagagatgtgtagtttgattttatttttgagtttgtttgtgaaggtggagatgggtatgtatttatagtttatgaggtaaggtggtgttttgagtgtgttgtgagtttaggcgtaggaaggtttggtttgttgtagtaggatgtttttaagcgtggtttaaaattggggttttgttatttgtagggattttttagaaggagatttaagggttaggaggtatttgaaaggtttttacgtatttttgtatgtggtttgattgatttttttttaaggtttttgttatttagaaatgggatttttttttttattataaaaatatttggttatttttttttgtgtaattgttagtgaatgtattattttgaatattttttaaattaaaatagtatatttaagttcgtaaaatatattaaagaatataaatatagaagtaaaagttagtgttttttttgtaattttattttaaggaagagattttaggaaagggtgttttttttttattttttttacgtgcgggtaggcgtgtagggaggagtttttataaaatagggcggcgttttatatagaatttttttattttttatatttaatattagaaatatataaaataatgtggagggttttaaaaagaaatagttagagttttgtgtgtgtttttgtttgtttattgaattatagtatcggcggtgattgtcggtaaggcgcgtgagatgtagtcgcgtggaagttgtgtttaagtgatattgattttaaattttgttttagg

SEQ ID NO: 1456 - DNA, 17213 bp, Artificial Sequence
  chemically treated genomic DNA (Homo sapiens)
tttggaataagatttaaaattagtattatttaagtatagtttttacgcgattgtattttacgcgttttatcgatagttatcgtcgatgttgtggtttagtgggtaagtagaaatatatatagaattttggttgtttttttttaggattttttatattattttgtgtgtttttaatgttaagtgtggaaaatgaaagagttttatgtgaaacgtcgttttgttttgtgaggatttttttttgtacgtttgttcgtacgtggagaaagtgggaaggaggtatttttttttggagttttttttttggggtggaattatagaaggggtattggtttttgtttttatgtttgtattttttggtgtgttttgcgggtttaaatgtattgttttaatttgaaaaatatttaaaatgatatatttattgatagttatataagaaaagatggttaaatgtttttataatgagagagagaattttatttttgggtagtaagagttttaaaaaaggattaattaagttatatataaagatgcgtgaaagttttttaaatgttttttgatttttggatttttttttaggaaatttttgtaggtggtaaagttttaattttggattacgtttggggatattttgttgtaataagttaggtttttttgcgtttgaatttatagtatatttaggatattattttgttttatgggttgtgggtgtatgtttatttttatttttatagataggtttaggggtagggttaggttgtatatttttttagttttgtcgtgtagtgggtgtggtagttttagtagggtttagagtaggaatgtagttggatagtcgggaggggggagttggggtatttttaggtaagtcggaattatagaattatatgttaaagtttattaagtttttagagagatttattattaatgttttattgtattatagggaaggtgaagttgacggaagtgaagttaagaagtagttgggtttgaaacgtagggcggatgcgttttttgagttgttgtttaagaagaagaatttgtagaattaggtgagaggataaggggtagttaagggttttataggtagttaggttgggaaggaggggatgtaggaatgtagggatgcggggtttgtttgttttgatatagtttttagatgtttattaaatgaatatgttttagttagagaatgttagtattttaagatagttttagtgatttatttgagtagtgagtgggaatttacggaataaggaaggggagaagttggagtagatattttttggagtagatgggagagggaaggaggtgtttattggaggttttgtgaggagatgttgaattaagcggttttttattgtgtatgtttttatatttggagttggggttggttgagtaagtgttttaaagatatttgggttataatttttgggatttgtgaatgttttttatatggtaaaagggattgtgtagtacgattagatttaggtttttgagatgggagattattttggattgttttagttgattttaaatgtaattataggtatttttttaagagggagggagggggagattttacgggaaaaagtaatgtaaagaataaagtaaaatgttattttattggttttgaagatgaagggttttaagttaagaaacgtaaggattatagttgtagtagttggaaaggtaaggaggattttttggaggagtttggttttgcggaatttatttttaatttttaattttagaattttgagaaaataaatatgtgtagtttagttacgaatttatggttatttgttatagtagttacgggaaattaagataataatttatatatttgataaagtttgtttgttgtgtttgtttaaatattttgtttttaaatttttttttatttattatatagaatatttggggtattgggtatttttggtttgttaagtttttttaaatatattttaagattattaatttttaataaaaggataatagaaagtatatattattaaaatttttttgaatataagggagtttttgatgatatataaataaatttaggatttcgtagagttttgggaatattagtataaataaaagtagttattatacggaattgaagtaaaattgggtttatttttggttttttggattttagattataagaattgttcgtttattaatttgaagagaaataattggtaaaatagggaaatttttaggttaagaataagaaaagaggagatgttttaaagtaagaagtatagtttgtgaagttcgtgttttaggatttaaagttagtagatattttgatacgtggggttttttttggtttggggatatggatttttgtttttgtttttaagagggtttagtttacgtggagaggttgttaggtgagatggtttttttataaattaaaaaaaaaagatagaggttaagtattatgttagttggttaggggaaggttttatatgtttttttaattttattttagattattttatcgttagtatacgttttttttttaaatgttgaaggatttttacgtttttttttttgtagagataaggtttttgttattttgtttaggttgttttttaacgtttggttttaagtgatttttttgttttagttttttaaggtgttgagattatagttatgtattacgtttagtttaaaggatttttaatttaaatggaaatgtttatttaagaaaggttaataataaaatatttcgttttcggtaatatttcggagaatttgttttaggcgttgatttttatattagtaattttaataaagtaaagttatttttgtttgaagatacgtttattggggaggtgtttgtttggttagtttaggttatattatttggggtagaggagaagtcggtgtatatgagttttattgtgttaggggatttaatttgaaatattgaattggagaaattaaagtaggatattcggaggagaagttagtgtatatgagttttattgtgttaggggatttaatttgaaatattgaattggagaaattagattaggatattcggaggagatggtacgagttaggaggaagatagggtttttagttttggttttggtattttgggtaaattattggatttttgatattagttttttttttgtatgaggaaaagtatatattagataatttgggtttttttttatttttaatatttaataattgttaatattaaatgtagaaggaagagtaaaaatgtagtttaatttttaaagtttatagtgaggttagtaatgatattttattttttagttgaaaatattgttgatagtcgtgaaaggtaaaattttatttatgttttatataaaaattgttgagtaataaagaaataataaattaaggatgttttagagatttaatttttttagtagaaattatgttagttattaaataattgaatattttatttttgataaatatttttacgttaaatagtaagtggtattttttatgtttttttaataaggtaagaattatttattttagtagttattagtatagttgatgatagaatattagttttttaattttttaaataggaataagataaaaatatttgtcgttttaattttgtgtaattttgtttagatagttttggtaaaggtaaatataatttatgaaatataatgagaaaggagattgttagaaaggagataaaatgagtatagttagtaaataatttgatggtttatttaaaaagtagttagaattagtaaaatatttttaaaattgaaaaataatggagtaattgggttattaaaaaaataggaaaaatagattttagtagaaatacgtgtaaaggatattaataaatttatttttaaaaaagaaagataatagttaataattatatttaaaagttttaattttagaaaaaaatattatttttttgatatatattatgtgttaggtttatattgaaagatttttattttttgagatagttgttgagaatatttacgttttataagtaaagaaatcgggttttagttttttaagtattatgtttttagagaatttagggtaataatggtagaatgacggttggaagttaggatcgtatggttttgtagtttatttttttaatattatggtgtatagtttttttaaaaagtaatggtggagagtatattaaagatgtttttttaaattatgaattttgtaaatataaaaataatttatgttaatattgataaagataggtaattttttttacgttatgtaagtaatacggaggtagtagggatagagtttggttcgtatttattttcgtattttttatatattttttacgttattatatttgtttattagattatgtaaattagggagggaaataagataagttatgttttattttaaattttatttaagggagttaagtttgatgtttatatgtatataggattagaacgacgattttgattttttgttttgttgtattattaaaattttttttttaggggtttatttgttatgttttgattatgatatatttgtgttaatatgatgtttttcggtgtttgttattagcgtgtgtaatgttgttgatatattttatgattatttatgttattttaaaatattaggaatatttgtttcgagggttagttcgggaatttttgtttttgtgtcgttgtttttttgttttagtataagtttattataaagttttgtttgggatattttttttgttttatgttaatttttattgtatgagaatttaagaatttacgattagtaataatattgtaaattggtatattagtattttttgagtatgatttagaattatgttaaaaataaaagtaaaatataataaagtgaaggaagaaaagaaaatgttatggaaatatttatattatttgaattaaaaattttatttttaggaattttattgaaggtaaaatttataggttttgtatataataaaatattatgtataatattatgggatataaatagggttaataataataaaaattatagtaatgatatgggaatatataagattatattaaaaaagatataaaattatatatataatttaaatttatttatgtaaattaggaaaaaaggtaagtgtaggtttattttatagttagaatagagggaaattttatttattaaatgtttttaacggtaatttttatgttttttgtgtttttttggatttttatattttttatagtatataatttatggagggggttggttaatttttttttttatgaaattattatatatatatttagtttaaaaattaggtggtgttaaaagagatgttataaaagataataagtttttttttagtttttttaattttttagaagtaattatttttaaattttttgtttttttttttggtatttattattatatttttatataacgtgtatattattatttttgatttaataattttattatgttttattttatgtatgtatttatttttattagggtaggggttttacgttgtcgtttaggttggaatgtagttgtatgattacggtttattgtagtttcgaatttttggttttaagtaattttttagcgttagttttttaaagtgttggaattataggtattcggttaaattttagatattatttattgtttttttaatttagaggtcgagggttcggtttcgatttataggtttgttttattattattaaatagtattcgatgttaagttaggtggtgggatgggaatttattttttttttatgtaatgttgatttgttttatattaatagtgttttttttttttttttttagttttttatgtattatgtatttttaaattttttttaaatgttttataggttagttaaatttttttagtattttttttatatgtttcgatataaggaataatttattagttgtattttttttttttttcgtttgttattatgttgttgagtatgcgcgatttttacgtcgaagagaaatgtttatagacggggataagtttttttattataatatatggttaatttatagtttggtaggttggttagattaatttttttttttaaatatagtatattgtttatagggtaaagaaattatttttttttatttaagtgttgatgatatattttaatatgtttaattttttaatgttttatgtaaatttataaattgtataaattttagtagatttttgaatttttataaatttgataaattaagatatataaatttagtaagttagttttttttaagatttttaaatagtataatgattataaaatttatttttatatttgtatttatgtttagtaaaagttatttattaatattatagatttaattattttatttttgttatatttttttattttttttttaaggtaatattaatgtttattttaatagttttttatggggaaaattaattttatggggttaaattttaagggattatttttttttgtaaaaatagggtggggttttttggtttatggtttttgtgtattaaagtagttttttagtatagggtatatattttttgatgttaagtatatttgattagttagggtagttttgagttttaattttgtttttattgagattttataaggttttaattaaatattaaattttagtgttttgtagtttgatgtttttttttaaaatgaaatacggagtttttttttatttgagttgtatagattagtgttgtatggtataatttggtttttttgttgaatgtttaggtttttaagttggtttttataattattgtgtttgttagtttaggaagttataataattaaattttttttatagtaattttagatatagtgtaaatattattgaatttttttgtgtttttttaaggtttattttgtttgttttatttgaatttattaatgagtttgggttttttataaataatatattttaatttgttgatgtttttttttttttttgttttaattggttggtgggaatttttttaaattagttattttttttttaaatatatttattttatatgtaggagtttttagtagattcgtttgtggtttgttaggaattgggttacgtagtaggaggtgagtagtaggtgagcgaatattatcgtttgagttttattttttgttaggttagtggtagcgttggagttttgtaggagagtgaatttacggtgaattgtgtacgtggtgattttggttgtatgttgcgtatgagaatcgaatgtttgatgatttgaggtggaatagttttattttgaaattatatttttaattttattagtggaaaaattgttttttataaaattagtttggtttttggtgttaaaaaggttggggattattgttttaaagtaatagtaaagttttattaaattattttagatttttttagtttaaagattagatatgataggtgtatattattacgtttagtttatttttattttttgtagagatagggtttcgttcggtggtcgaggttggttttaaattttcggttttaagttatttttttacgttggttttttaaagtgttgggattataggtatgagttattaagtttagtttgggaaaaaaatgtaaggtatttgttgattttttttagattggttttttgttttttttttttgttaagtataaaatttttagattgatattatttgggattttttatttttttttaggttgtgatatatatagaaaatgatgtttgtatgttattttggggttaggttatttattttaaaggtgattagtgtagagttttagttatttagatttttcgagttggagggatttgttaatttgtttagggtataatatttatatataagttagaaagttttgttttggaagattgaaattggattttttttttatatatattatgtataaaaattaatttaagatggattaaaggtttagatgtaaaagttaaaattataaaaaattttggaagataatttaggtaatattattttggatataggaataggtaaagattttatgataaagatgttaaatgtaattataataaaagtaaaaattgataaataggatttaattaaatttaagtatttttgtatagtaaaagaaattattaatagagtaaatagttaatttacggaatgggagaaaatatttataaattatgtatttgataaaggttaaatatttagtatttatatggaatttaaataaatttataagaagaaaataaataattttattaaaaagaaggtaaaggatatgaatagatattttttaaaagaagatatttatgtagttaatagttataagaaaaaaggtttagtattattgattattagagaaatgtaaattaaaattataatgagatattattttacgttagttagaatggttattattaaaaagttaaaaattaagagatattggtaaggttgtggagaaaagggaatatttatatattgttggtgggtgtgtaaaatagtttaattattggggaaagtagtgtggcgattttttagagttaaaaatagaattattatttaatttagtaattttattattgagtatataattagaggagagaggaatagaaattatttttttataaagatatacgtacgcgaatgtttatcgtagtattatttataatagtaaagatatggaattaatttaaatgtttatgtatggtagatgggataaagaaattgtggtatatatatattatggaatattatgtaattataaaaaagaatgagattatgtgttttgtagaaatatggatggggttggaggttattatttttagtaaatatacgtagggaatagaaaattaaatatcgtatgtttttatttatgagtggaagttaaatgatgagaacgtggatataaagaggggagtaataaatattgggttttattagagggtggagggtgaagggtgggaggagggagaggaaaaaataattattgggtattaggtttagtatttgggggatgaaataatttgtataataatttgcgatatgagtttatttatgttataaatttgcgtatgtattttgaatttaaatagaggtttaaaaggttaaaaaaaaaaagaagaaattatataaatgaatgtttttttttgattttatttttttatttatattttttattatgatatttgattttattttgttttttatattaattttttggatattataattatagtttattgagtttttcgttttttgcgttgtttatttttggggtttttttgttatggtggttggtgtttgttttattttatttaggttttttttttgtatttagattttttaaatatttttaataatttttggatgttagtatatagttaagaggaaaatataaataatgttggaagttttgtttatatggaggaagttttgtttatatggataggatatgttagttgggagttttattgtagtgtgtttaagggattagtagtttttttgttcgggaattagtaaatgggagaatttttcggtgtggttatcggtggtgttttggaaggagatggggtggaagtagatgggggtcggggggtttttattggatttgtaatttttttacgtttttattgttttttttatagtgtttgtaggattttgagtttgagtatttttattattatttcgtaataatgtataaatattgaataattaattataaaaaagattggagagatttaaattttaaaaggaaagaaaaaataaatttatatttaaagtttattatttaagatattttaaatattaataaattataaataatttagtgagatttttttatcgagggttttttgttatttttttagtaaacgtgtgagtaataaggatgtttgttttatagttacgttgtaaatttaagatttgttaatggttttttaaggatttatttttttagttttagtaaataagatagttaagtgttttttatatatatatgtgaatatatatgtatatatgtatatagataaatatttatgtaaaattaattgttttaaaatttaaaaattatattatttaaaaataaaaaatgatatttaattatagatataaaaattggatattaaagttttattaatgaataattttatgtattttttaaataagtttaataaatttattttggtattatttttttttttttgtagtattattagtaattgagtaatgtttataattgattttatttaattaattaagttttaatttttttttaggtgttattattgaattgtgttttttaatttttattaaggatgtttttattttttattaaatttaattatttaaagattggtttaatggaaatttggattttttgttttgtttttttgtttttttgtgtagtgtgtatgtgtgtgtgtgtgtgtgttgtgtgtgtatgtgtttaatatatttgagtagtttaatatataaatgggagttaaatattatttttaggttaggcgtagtggtttatatttgtaattttagtattttgggaggttaaggcgggtagattacgaggttaggagtttgagattagtttggttagtatggtgaaattttattgttattaaaaatataaaaattagttaggtatggagttcgggaggtggaggttgtagttagtcgaaatcgtattattgtattttagtttggtaaaaaaaaaaaaaaaaaaaattttttttttttggatgttttggtttaattttaagtgtagtaagtttggaaatgtaaggtgtgtggttttttttgggatcgtataatatttgtttgggtgtttttattattatatatgtggaaaagaatgttggttttatttatgttaattttattttattgttattggttcgtgttaattgttttatgttgaattgtaataaaatgtattggaattggttttaatttaaaatatttagtttatatagtcgagtatgattaaagtatttttttttttggtggtatattataatggatgtaattatttagatacggttttgaaatgagaataaacgttatttatgttgataatagtagttattggtgttaattttagtatatataaaagttttagtaatataaggtcggtttaggattttaattagaaggttattgaatatattagattttatcgtattaggtttgatttttattagaaaggatgtaggtagttgtagggttgttattaggtacgagagtattttagaaagtaaaagtgtttaaaaaatggatttagatgttttttcgtatttgagtatttttgatagtatgtgaatattaattattaattttttgtattttagtttttcgaagttaatttttaggataaaaaaaaaaaaaaaaaaaaggaagaaaataatttaaatgttaatttgtagttaaagttttttttttgttttgaagatattaaagtttgtaatagtttgtttgtagggagtttaatttaaatatagagcggtaaggagattcgggttggtttatacgatcgtttttataggtttgggcgatttgaaagtgttgcggattggttaagtttagtacggttagtttagtgaatatacgtagggggttcggatggtatcgtttggcgtcgaatttttcggttttttttcgtttttcgttcggtttttaatattcggcgttttaagattgagtacgcgtttttcgggtcgcggagcgggcgaggggttatcgaggtcgcggggtcgatcggggttatttgtggttcgggaggttttgcgtcgtttttatttcgcgtcggtcgtttttttcgtgggcgttgggtttgggcgttcggggttttcgggttcgcggcgttatcggtcgggttcgcggttacgtacgatttattcggtcgcgtcgtcgttttttgtcgttgcgaggtttcggaagggaatttaagtcggacgttcgttcgggttttcgtttcgttgggattgttggggttatagtttcgcgcggttacgttttattttcggggttttagcgttttcgcgcgtcgtcgatttacgcgcgttttcggtttcgcgcgatttttattttgttttttttttcgttcgcgttttcggttttttcgattttggagcgataaatttaagttagcgtgttcgagcggtttttaagttagatacgtattttagagcggggagcgagcgagtagaacggcgggtagaggcgtcggagtcgtttcggattttaaatattcgcggggaggcgggcggagtttcgggtttcgagttatcgtcgttcgttcggagcgcgaagggagaggcggggcgggacgtgcgggttaattttattcgttagtcggaggggtcgcgagttttgttcggaggttttgattttgattatagtatagggttttattagcgtgtttatggtgtttttgtggagattgaatgttggtttgtttttagaaaagggtcggtttttgatatacggttatttattggggagtgtagaatacgtatttaaaaatgagtagattagatataggttataaagattttgttgatgaaatagtttgcggtaaagaagttagttaggggcgggcgcggggtttacgttagtaattttaatattgggaggtcgaggtaggcggattattggaggttaggagttttagattagtttggttaatatggtaaaatttcgtttttattaaaaatataaaaattagtcgagtgtaatggcgcgtgtttgtaattttagttgttggggaagttgaggtaggagaattatttgaattcgggaggtagaggttgtagtgagtcgagatggcgttatcgtattttagtttggttcgttttaaaaaaaaaaaaaaaaaaaaaaaaaaaaaaagtagattaaatagtttttgtaaagtaaaaggaatagttaagtagagtaaatagataatttatagagtgggagaaaatttttataatttatatattcgataaagtagtaatatttagaatttataagaaatttaaataaattagtaagaaaaaaaaattttattaaaaagtgggttggtatgaatagatagtttttaaaagaggatatgtaaatggttaataaataagaaaaaatgtttaatattattaatgattagggaaatgtaaattaaaattataatgtgatattattttattttcgtaagagtggttttaattaaaaaattaaaaatttaaaaaataatagatgttggcgtggatttggtgaagagggaatatttttatattgttgatggatagtataattattgtggaaaatagtatggcgattttttaaataattaaaaatagaattattatttgatttagtaattttattattgggtatttacgtagaggaaaataagttattatataaaaaagatatttgtatacgtatgttaatagtagtataattcgtaattgtaaaaatatgaaattaatttaaatgtttattaattaaagagtggataaagaaattgtggtatgcgtatacggtggaatgttatttagttataaaaaggaatgaattaatggtattggtaatttggatgggattggagattgttgttttaagtgaagtaatttaggaatggaaaattaaatattgtatgtttttatttataagtaggatttaaattatgaggatataaaggtataagaatgatataatggattttggggatttgggggaaaagggtgggaagggagtgagggataaaaggttataaatttgagtttagtgtatattgttaaggtgatagatgtattagaattttataaattattattaaagaatttatttggtagggcgtagtggtttatgttcgtaattttagtattttgggaggttaaggtaggtagattatgaggttaggagttcgagattagtttggttagtatggtgaaattttcgtttttattaaaaatataaaaaaattaggtatggtggtatatatttgtagtgttagttattgaggaggttgaggtaggagaattgtttgaatttagtaggcggaggttggttgtagtgagttgagattatgttattgtattttagtttgggtaatagagtaagattttattttaggaaaaaaaaaaaaaagtttgttatgtaattaaatattacgtgttttttaaaaaattatggaaataaaaaaattaaaatatatattaaatttaaaaataaatgtatataaatgagtagagtttatattattgagtcgtgtgtttaaggatttttagttttttttaggtataggaattagattttagggtattgataggttagttaagtaagtatgaaaattttatttgttattttagatagagtagttttggaaaatagaaatatttagtataaatggaagtagggaagatattagttaggtgttttatatgagtttaattttgagaatttaagttgttttattttttttgtgtttattttaaggtagagttttttaattgcgatattgttgatcgtatgaattcgataatttgtggttgtgggggttgttttgttattatatatgttttatagaatttttggaggagatttattaagtggatgttaggagtaaattatacgtttttttttagttgtggtttaattagttttaagtgatataaattgcgaatattttttttagtttgttatttgttttttgatattgtttttggtgattttggtatatatttttttaatgtagttaattttaatgattttttttttattgtttttgagtcgtagttagaaaaattttttttatttataaggagtaatttttttttttttaaaaaaaagaataatttttagattatagagtttattaatgtttttttttagtatttgtatagttttattttttatatttagattgttgatttttttaaagtttattttggtgtatgggaaatatagatttaattttaattcgtttttaagtgatttttagtttttttatttttgtttattgaaaaattatttttattaatgtttttatatgttatttatgttatatattaaatagttgtatatatttgggtttgattttgaattttttaaattttttatttggttttgttggttagatttttttagttatagaggtttttttttatgatttaatatttcgtatagcgtattttttttattgtttttttgttttagatttttttggttttttttgttgtttttttttttatataaatttttttttttttttttgagttggagtttttttttgttatttaggttggagtgtagtggtgcgattttggtttattgaaatttttatattttgagtttaagcgatttttatgttttagttttttaagtagttggtattataggcgtatgttattatatttagttaatttttgtatttttagtagagatgagggtttattatgttggttaggttggttttaaatttttgaatttatgatttattttttttagttttttaaagtgttgggattataggtgttagttatcgtattcggttttatttatataaatttaagagttaatttgtttagttttaaagaaaaaaattttgttggtagggtatggtggtttatatttgtagttttagtattttgagaggttaaggtaggtagattatttggttaggagtttaagattagtttggttaatatggggaaattttatttttattaagaatataaaaattagttggatttggtggcgtgtgtttataattttagttgtttgggaggttgaagtaggagaattgtttgaatttgggaggtagaggttatagtgagttgagatggtgttattatattttagtttggatgatggagcgagattttgttttaaaaaaatatatatataataattaaaaaaataaaattaaattgtagttaaataggttagatgtagtggtttacgtttataattttaggattttgggaggtagaggtgagtggattattagagcgagattttgttttaaaaatataaaataaaataaaaataaaataaatgaaaataaaaataaattttgttggtaatttattagaaatatattgaatttatatattattttgttataaattaatatttgtattttgatttagttgttttagttaagaatatgttgggtttttttgtttttttaaataatttttttttttttttttttaaagttttgtttatgtaagatttgtatattttttgtttagtttatttttagttattttatttttttgttgatattgtatgtaagtaagttttttttattatattttttaattagtttttgtttgtggatgagaaaattgtttttatgtattaattttataatttgttgttttattgaaattttttattatttgtattttttattgatttttttaagttatttatagttatattatattatttataaatagaaatagttgtatttttttttttaatgtttatttttttaatcgtttttttttgtttgattgtattggttgatatttttagtggagtaaattgtttgattatttgtggtgttagtatttataaaatgaaagtgtgagtttatatagttttattaaagggtaagttatttttaattttaatggtttttttttaaaataggtttattgggtagggagatttaggaaggggttttgtagtttggtattttttgttattttatttggatttaaataagattgaagaattatttttaaattacgtaggttaataattttgagtttagtatttttttagagagatatatttggtataaagttgttttataaatgtttattatatttttattatatcgtattttaataggtttataatgagaagtaattaaaattaaaagtaattaggtttttaataataagtgagatgagtgtatagttggagaattattttgatgagtggttttgatgtttatgggataaaggtttgggttttcgttgtttataattaaacgtgaaaaagtagtttgatgtggtattattggaaatgcgtataggttatttttttttttttttagttatttttagatgggaaagtagaggggattttggtattttttaaaaaagatttttggaaaattcgtttttagagttttttgtttgaaggtaatatttaggtttttttatattttttttttttttcgttttttttatttaataaggaatt

SEQ ID NO: 1457 - DNA, 13202 bp, Artificial Sequence
  chemically treated genomic DNA (Homo sapiens)
tttttttattattatgaaagagtgtggtaggagattgaagtttatagtgtggatttagtaaatatattttggtttgagggtgtgtagttattagaaaaattattttattaaaaattgaaaattttgagattaatgttgaattagataggatattagaataagtggtaggaatttatattgttttaataattaatggtaattttattgataagttaaaatttgagaggttattagggattttttatttaatttttttatttgtaatatatttaattaaagtacgaaaagatacgtttagaaattaaagagatttttttaattttttttaaattttttgttatttaatatttttttttaattttttttaaattaatggagagattgacgatttattaatgagggattaatggtagtttttaggtaatgttatattaggagttttttttttttttataagttttttgaaatataatattaggtatattaatgtaatgttttttatattaaggtttattgggttttttatatttttgattagtagaggttttataatatgtatgttttattgtttatatttgttttggtaataatttagatatttttatataagtattgttttagtttgttttgtgttgttatataggaatatttgaggttgggtagtttataaagaaagaaggtttatttggtttatattttgtagaatatataagaggtatggtattggtatttttaggtttttggagagggtttttgtgttatgttaaaagatattgaattttaggaggcggaggttgtagtgaatttttattgaatttgtaggtttaatgagggaaaggttaaaggggatgtaggtatatgcgaagagggattaaatatggggagaaattttattttataataatttatttttggaggaattaatttattttatgagagttaattgtattttattgattattaggagaataggattaaggtttttataagggatttatttatatgacgtagatatttttttttaagtggaatattggtatagtagggattgaatcgtagtgtgggttttcgtggagataaaaatttatatttaaattatagttattatgttttggattgtttagatatttattttataatttagtaattttttgaatttaggattgtgttgttagtaagtagtataaatttgtttggggaatgttaatgaaaaatgatagaagtagattttgtaaaattgatttattaatttaaaggattaattaaataatatttaagaaggttttaattgtttgaataaagagaagtggtgggagaattgaaaagagaatgtatttgtgtaaatcgaatgtatttgataggataggtatatcggttttaaaaaaattggtattaacgtagttagaatatattttaagttaaaaataggaattaattatagtaaaatagtattatagattatatatacggatattttattttattatttagtttaattttttttagagagtgaatattttattttttaagtgttattataatcgaattaattttttttgatatttatttattttaattaaattttttttttattattgaatatgtgaaatattgtttaattgttttgtgataatattattattatagggtatggtagaaaaagtagttttttgggaatgtggttatattgattgtagttttaatttttttgtgaattttttatgggattttgggtaaattatataaattatttttattttattatttttttttgtaaaatataaggaatagcgttaataatatggtttttttaaatgtttatattttatgatgttatgtttgtttttttagtattaattagttgaagtaagtgtgttttgtttttgttttttgtgtttttttatatttttttaaaattagggaagattgttgggaattttatgggagattgagagttgtggtcgggtatatatgaagtaatttttgttagagtatatggttagttattgaaggatattttggaatttcggtgagattttttgttttttgtttgtttgtttgagatagtttcgttttgttgtttaggttggagtgtagtggtataattttaatttattgtaatttttcgaggtttaagtagtttttttgttttagtgttttttagtagttggggttataggtatttgttattacgtttggtttatttttgtatttttagtagagacggggttttattacgttggttaggttggtttggaatttttgattttaggtgattcgttcgtttcggtttttaaaagtgttgggattataggtatgagttattgtgttttgtttcgtgagattttttaaggtggagtatttgtgtattttatagtaaggagtatagagatttcgaattattttaggaagttttaattatgtttggattttattttttttttgataagtggaagtttaatttggagacggtggtagtttaatttgagattagtttaggagtgtgttttttttgaggtttataaagttaggagtcgagggagttagataaaattaggttaaggttgagtcgggagttgagaattagtagatattttttagtattgattgaagagatgtgaagttaggtatgaggtaagaagatagaagatgaggttgaggatagtttttgaggtattgaattatatattttggaattttattagttatttgttgtgtttttagtgggttagggtggagtggggagtttgtttaggtttattttgaaattgggttttagttattttgagagatgggtttttttttagggtttagtatttaaattgtttatatttagaaaataaatataattaattttcgtgaatatcgatttgtagataaattttttatttaggaaaatagattagttttattttttattgtattattttaaaaattagatttgtttatttttggatttatttttgattttttttgtttttttttttttttatggtttaagaagtgatgttaaatttatgttttggaaattttttaaggttatgtttttttttttattttttttgtttttgttttattttagttttttttattttttatttatgttgcgtttttaacgttttattgtaggtaatggtatttttttataatatattttatgttgtagttagagggattttcgtaaatataaatatgattatgtttttttttagtttaaaatttttttgtgtttttttatagtttataagggaacgaagaaatattattaatagcgtttatatggtttttacgatatggttttgtggatatattagacgttgttttgtagtgttttatttatattatttgtattattgtaggtttggatacgttatggtttttatggtgttattttgtgtttttttgtatttgtacgtattgtgttttttatatgggatatttgtgtttataattaaatttttaggggttaaattatattttttgtaaaggattttaaattattaggtatttgttggaagttttacggaggaaaataagtattttttattttttaatttgttttgttggttaaagaggaaaaggagtggatggataaagtggggtttaaagtttggatttagttttgattaataaggagaaattgatgtataatggggaagtgattttggtatttttaattggtagagtcggtaagtttgggtatagtttaaatgtgagtttgtagttattagagagaggggttttaaagttatggagaaaagatgggggtgaattttgtattaagatttattgaggagagtttttgggaatagttatttttaggattttatagggaaattattgagcgagttttataaaatattgttgttgggtttttttttttaagagatttttatttaattggtttggggtgtagagtgggaatgtgtatttttaaaagtagaatttttaaattggagagttttgtgagagttttttgtaggagatattatttgaattgaattttgaaagataagtttgtatgttaggaattttatgtatatgaatagaggatatgaaggaatgtaaataatttgttatggttttaaagaaaagaagggagaaattaagacgtgaagaggtttatattttttgtttaatagtttttaatttatttttttggataagaggatgttataaaggattttaaattgaggtataaaataattagaattggaatgtttatttgaattttagagtaggtaataggttggtatggattagaattgtaggtaggaaaattaattgtttaggagagatatgagatatgatagaggtgatagagtatggataggaggaatataaaagtgatagaagtaataggattgttgattatttagttaaaagaattgcggagggatatatttaggtttttgagagatgtttagtagtatataggtaatatttacggttcgagataggttagagattttgaagaaataagttaaaagttgaaatatgaatttatggatatagtggaggttatataagaagattatattataatgaaaagaagagggtttagaatggtaggaaaggaattaggatattaagtaaaggagttaggaaagaagggaagggtgttttggaaattttgggaaggttaaagaagaaagggttaaatgtcgttaataaataaaatgaaataagatttgggatgtattttttggttaaggtaattagaaaatgattagtatttttattaggagtaattttagagaatgtttgggtggacgtttaattatagtggagttaaacgtgaattaacggtgaaaaaaggataatagttaatgtgtatattttttataaaaattattttttaaggattaggtattggtttttttttcggtgtttatagatatttatataggtttaaagaattagggattgtataagttagagtaatcgaacggttttgagttatttgtcggaagttttgtttttaattaaggcggacgtgaagtatttataaaggaggaatagttaaagtagtagcggcggcggcggcggcggtagtagtagtagtagtaggaggtgggggtttttgttaggtatcgggcggggtaggtacggaggtgtttaggttttcgcggaggttattttttttttggagtgcgtgagagaggggaagggaggaaggttagagtaggaattagagcgaggtaaaggcgggtaggaattaggagaatgacggcgggaggcggtcgggaaagagagtcgcggggttgtgggggtcgttttggtattagtcggggttttaagttttatcgcgagattcggcgaaggtcgagggtcgggtttcgagaataggtgcgtttagattcgttttgaataggaagttgtttttggagagggagcgtttgtttttaggtttgcgatttgttgcgttgtgatttgttgtcggatgggagcggggggtgacgcgagtagtgagtttggaagcgtcggaagtttgggcgggagtttcgggagggcgagtgggaggagtcgtcgttgcggaggaggtttcgggagtgcgggtggcggggtttggaattttcgtggcgtttggggtagatcggggaggcgtcgagtttttgtttttttggcgtttaagtttgtttttgtgtttatagtttattggttgtattttttttttttttttttgtttttttttttcgttttttttatttttgtttttatttttttgtattttttatatttttttttttattgtttgtttttttttaaatgggatggggttgggggtgtttttttatttacgtttttttttgttgtagttatcggcgttattttaattaattttttattttttagatatttttagttttttggttgttgttttatttttgagatttttttattttaaagggttttatttagggttgtttttcgggtttttttcgtttttttgtttcgggttttgcgtagatcgcgtttttttttttgggtttattcgtaggggtagattcgtttttttagtttttttagtatattttgatggttgggttttagttttcgtttcgcgcgcgcgtttttttttcgtttttttttgttttttttttttattatttttagatattggaaattttatagaaataggtggatttttttttttgtgtttttattagatgttttgtgtagttttatttatttttatggaatttttcggaatcgggatgttgatggttttaggtttttggttttagatagtttatttattttcgtttttaattgtttataaatatttttggttgtttttgttataggtttatttggtatggtgtgttttacgtattttaaatggaataagttatattttttattttagtttgattttttatttaaaattttagtggtttacgatttattttgagtatgaatttataatagttaggcgtttcgggattgggtttttttgtgttttgtttttatgtgagtagttattgtttggtaattttagtttttatttttttattgtagataatttttttgtttttagtagtttttggtttatggtggtggtttacgcgttagttttttagtttttttttatattaaatattgagtcgggttatttttttaaagttttaatgtatttatatgagacgtttgtttaaaaattatgtatggttttttagattataattttaagtttaaatttttaaatgtggtataagggttcgttttattttattattacgtggtttataggaaattatagaaatttattttaggggtattatataaattatgttttttgtttttttgttatatttttggtatttgttaattttttagtttattatttgtattttttattttattatttacggaatgtttgttcggttttttttttttttttttttttttgatatgtggttttaataagttttattatttattgaataaatataaaagaatatttaaaatgtgtattgaattataaagaatagtagtataatttattatttagtttaataattggaatattgttatcgttggaggtcgtgtttttttattgattatattttttttttttattatattcgttttttttttttttgtattattatttttttgagttttatgataataacgatatagttttattgtttatatatgtatttagaatgatttagtttagtttggttttgaattttacgtatatggaataatattgtattattttgtggtttaattttttaatatattatttgtgggaattgtttatgttaaaaattaaagaatttatagatatggtttttttagtttttattgttttgtattttattatattaatatattataatttatttatttattttgtttttgatggatatttgggttgttttttttttattattatattttaagttttagggtaaaagtgtataatatgtaagtttgatatataggtatatatgagttatgttggtttgtcgtatttattaattagttatttatattaggtattttttttaatgttattttttttatatttttttcgtttattttataggtttcggtgtgtgattttttttattttatgtttaagtgtttttattgtttagtttttatttatgagtgagaatatgtggtgtttgggtttttgtttttgtggtagtttgttgagaatgatggtttttagttttatttatgtttttataaaggatatgaatttatcgtttttttatggttgtatagtattttatggtgtatatatgttatatttttttaatttagtttattattgatggatatttgggttggttttaagtttttgttattgtgaatagtgtcgtaataaatatatatgtgtatgtgtttttgtagtagtatgatttataattttttgggtgtatatttagtaatggggtggttgggttaaatggtatttttagttttagatttttgaggaatcgttatattgttttttataatggttgaattagtttatagttttattaagagtttaaaagtgtttttttttttttatattttttttagtatttgttgttttttgattttttaatgattattattttaattggtgtgagatggtattttattgtggttttgatttgtatttttttgatgattagtgatgatgaacgtttttttacgtgtttgttgtttgtataaatgtttttttttgagaagtgtttgtttatatttattgtttattttttgatggggttgtttgttttttttttgtaaatttgtttgagttttttgtagattttggatattagttttttgttagatgggtagattgtaaaaatttttttttattttgtaggttgtttgtttattttgatggtagttttttttgttgtgtagaagttttttagtttaattagattttatttgtttattttggtttttgttgttattgtttttggtgttttagttatgaagtttttgtttatggttatgttttgaatggtattgtttaggtttttttttagggtttttatggttttaggtttaatatttaagtttttaatttattttgaattaatttttgtataaggtgtaaggaagggatttagttttagttttttatatatgttagtttttttagtattatttattaaatagggaattcgttttttattttttgtttttgttcggtttgttaaagattagatggttgtagatgtgtggtattatttttgaggtttttgttttgttttattggtttatatttttgttttggtattagtattatgttgttttggttattgaagttttgtagtgtagtttgaagttaggtaatgtgatgtttttagttttgttttttttgtttaggattgttttggtaatgtgggtttttttttggttttatatgaattttaaagtagttttttttaattttgtgaagaaagttattggtagtttgatggggatggtattgaatttataaattattttggtttgtttagtttttaaagttagtttttttggaaagtttttttaggattttgtagaggttttttttttattatttatttatttatttgtttttttttgaggatttttatagtatttttaaaattattttgttatagagtatttgattggtttgaaattacgtatttttatatgtgtgttttttttagggtgtaagtttttgggtagtgattaacgtatttattttttattttttttttttaaaataggtagtgaatattttatataaatgttttttgaataaatttatttttggatgttgtatggggatgggggagtggaggaggtagttcgtaggtatttggggtttttaggaggaggataatattatatatttggaaacgtaaggtttgtttttgaggttgatttttattttttttgtgagttttgtggatagtatttaattgtttttgtttttgtttgtttgtttgaaaaggaaaaattagtttaatgttaatttatttggttggttggaaataaaaatttttgatttttgtgtttttataatataatttaattgtggtattggtatttaaagtattattttgtattaaaattaattgttttttagaaatattgggtaaagtttattttgtttaaagttttaatttttttaaaagttataaagtttaaatgagattggaatattaggaagatagggggaagagttattttgttatttggtttttttttttgtttgatttttgatttgagtagaggttaagggggtgtatttgtgtgtgagtgtgtgtatatgtattgtggttgtagggtagatattgatgggaaatattatatattgattagtatttgagtgttgaaaaggaatggaagtggggatatgagatgaaggaagaggaaagatggaagaaattagaagtagtagtttgtaattaagagtagttaaaatgtaaagatgagattgatgtaatagtttagtttatttagaattattgaaattattgatttaatagtttagataggatgattaaatatatttatatatatatatatatatatatatatattttaatttaagtttatgtttgttttattttgagtttaaagtttttatgttaaggttggattaaatttaaatttatttgtgtttttgttttatttagtttatttaattttttttatttttaagtttttttggtgttattttttggttggtttagttttatgaagtttgaatatttttttttgttttttagtttttgaaatgttttcgagtgaaagatgaggttgtggaggatttcgggatttgtttgtatatattattttgttttttaatatttgtagattttagtataagttttggagaggttttatgatgtgaggatagtgagaaataggaatattttgttttataataaataattttttaagtatagagtattgttgtgtaaattatgttatgattgtgtttttttggtttatatttattttatttagttttttgaattttaattataattttaattttatttgtttttttttgaattgtattaatatttattttaaattttaaagaatttgtattgttttagattgttgttttatatttagagtgttgtttttatattttaaaaaaatatataagtttatttttttgtttaagtaagagatatttttttgttgaaaaatattttaggaggaagcgaaatattttaggaggaagtaaaatatttaatagtgaagatattttggttaatatagttgttttttatttttttgttttagttatttaatttttttttttttttgtgttttaagagatttagaagatttgtttaagatttttattaagggtatatagttttagagttgttgtaataggtattttgtaggtcgttgggaaattggatgaggttttatttgtttatagaaatgaatatatgtacgataatttatatttttagatagagtttttaggattttttattttgtttatttgttaattttttaaattggagtatattttttttgtttgattatattttttagttaaaattatatatgtttatgaaaaaaaggataatataatagaaaaaatatttgtaggattatgagattatagataatgatttgtttttttatttttttaaatgtttttaattgtaagaataaaaaggttgagggaaattgagatgagttggtgaattgtaatattttatgaaatagtttacgtttttatagggtttaatagatataaataataatgtaggatttataataatgtattaaaattataataatagtaaattgtaatagttttttagtattttaagtaaggtgtttttttagattaggtttttattttttatagaattggttgatagggatgttattttttttgatgattatattttaaaaggatggtttttaggtttttgagagattgttttgggatgtaaaattagtaagaagtttttttaaaagatttatattttaaaggggttgataaagaatttataatgataagttttttaaataaaatgttttaagaaaaaggaagaaagggtttagaggtaggaggaagtttgtttagtttgtttatttagttaagtttaggttgtttaaagttaatttaagttgaggggaatgttaagatttttttagttaggaggatttaaaaattaatgtatttaattaaaagtgttttttcgatgataagattagggttttatattttatatttatgtttatggattttttttgtaatttcgtaatttagttttagtaatttttggggaaaatggggtatttttttggagttattttaaaaagtaattttttttttttttgtttttttagtagttttatattttaggttagtttattttaaataaattttttaaatttggtgaaatgtatttagttgtttttataggaagtgatgatagaaatatagtttttattgataaagaattatatatataagttttagaatattttttatagattatattggagatattaaattgaaagataattagtagtaatagggggattttgtgtaatgattaagaatttaggttttggaattaaattgtgggtgttaggcgtttatgattatttgagggttttggaatgagttattaaattttatttagtttttttatttttaaagtggggtaataattatattgattttaatgtgttattgggtgataatggaaagtgttgaaaatagtgtttggtattaagattttttttttttttttttgagatggagttttattttgttgtttaggttggagtgtagtggcgtgatttcggttttttgtagtttttattttttggggtttaagtgatttttttgttttagttttttaagtagttgggattataggtgttcgttattatgtttggataatttttgaatttttaatagagatggggttttattttgttggttaggttggtttcgaattgttgattttaagtgatttgtttgttttggttttttaaagtgttgggattataggtgtgaggtattatattcgttcgtataaagattttttggttgttgttatattaagggaggaagtaagtaggtgttgtagggtgtttgtgtttttgttgttaagagggatataagttataggttttgagattggttattttatgaataaattagtgtttttgttttttattggtgtgataatattttattataaatttagtggttgaaaaatgatatatatttattattttatggttttggaagttttaagtttaaaatggtatagtatagtaatgttattttttggagtttttagaagaaaatttgttttttgttttttttggtttttcgaggaggttgtatttttttattagtggtttttatttttttgatttttgttttcgtttttatgtttttgtttttgattttgttttttttgttttttttttttaaggacgttcgtgattttattaagtttattgggataatttaggataattttagattttaaaatatttaattgaatattatttgtaaagtttttattgttagggtagattatgtagttataggttttgggaattaggagtggaagtttttggagggtggtttttttatttattattttagcgtttattgattgggggatgaatgattgcgtggttatcggagttattggtttatgtgtttttttttgttgtgtttttgatgtaga

SEQ ID NO: 1458 - DNA, 13202 bp, Artificial Sequence
  chemically treated genomic DNA (Homo sapiens)
tttgtattaaaggtatagtagggaaaagtatataagttaatgatttcggtagttacgtagttatttattttttagttagtggacgttgaggtggtaggtggaagaattattttttaaagatttttatttttaatttttaaaatttgtgattatatgatttgttttggtaataaggattttgtaaatggtatttagttaagtattttgagatttgagattattttgagttattttagtgggtttaatggaattacgagcgtttttaaaagagagaggtaggaggggtagagttagagatagagatatgaggacggaagtagaggttagagggataggggttattgatgaaggaatgtaattttttcgagaagttagaaaaggtaaggaatagatttttttttagagattttagaaaataatattgttatgttgtattattttggatttaggatttttagaattataagataataaatgtgtgttattttttagttattaaatttgtggtaaagtgttattatattaataggaaataaaaatattggtttatttataaaatagttaattttagggtttatgatttgtattttttttagtaataggggtatagatattttgtaatatttgtttatttttttttttggtatagtagtagttaaaaggtttttgtgcggacgggtgtggtgttttatatttgtaattttagtattttggaaagttaaggtaggtagattatttgaggttagtagttcgagattagtttggttaataaggtgaaattttatttttattgaaaatttaaaaattatttaggtatggtggcgggtatttgtaattttagttatttggaaggttgaggtaggagaattatttgagttttaggaggtggaggttgtagagagtcgagattacgttattgtattttagtttgggtaatagagtgagattttattttaggaaaaaaaaaaaaagattttggtgttaggtattgtttttagtattttttattattatttaataatatattgaggttagtatagttattgttttattttagagatgagaagattgagtgaggtttagtaatttattttagaatttttaggtagttataaacgtttggtatttatagtttgattttagagtttgaatttttaattattatataaaatttttttattgttgttaattattttttagtttaatgtttttaatataatttataaagaatgttttaaaatttatatatgtaattttttattaataaaaattgtatttttgttattattttttgtgaaaatagttagatatattttattaaatttggagggtttgtttgagataggttggtttgaaatatgaggttattggaaagataaaaaaaaaaaaaattattttttaaagtgattttaaaaagatgttttattttttttaagagttgttgaaattgggttacggagttgtaaagaaagtttataggtatggatataaaatatgaagttttaattttgttatcgagggagtatttttaattagatgtattgatttttggatttttttggttaagagggttttaatattttttttagtttgaattaattttagataatttaaatttgattaaataaataaattaaataggtttttttttgtttttaggtttttttttttttttttttaaagtattttatttagagaatttgttattgtaaattttttattagtttttttgagatgtaaattttttaaaaaagttttttgttagttttatattttaggatagttttttaaagatttggaagttatttttttgaaatgtaattattaagaaagatagtatttttattaattagttttgtggaaggtaggagtttaatttaggggggtattttgtttaaagtgttaaaaagttattatagtttattattattataattttagtgtattattataagttttatattgttgtttatatttattaaattttataaaaacgtgggttattttataaaatattgtagtttattaatttattttaattttttttagtttttttgtttttataattgagaatatttgggaaaataaaaggataaattattatttataattttatgattttatagatattttttttattatattatttttttttttataaatatgtataattttaattgaaaaatgtagttaaataagaaaaatatgttttagtttggaaaattagtaaatgagtaaaatgaaaagttttggaaattttatttagagatataaattatcgtgtatgtgtttatttttataaatagatggagttttatttagttttttagcggtttataaagtgtttgttgtagtagttttgaaattgtatgtttttagtgggggttttggataggttttttgggttttttagagtataggaggaaaggggaattgagtggttgagataaggaagtggggaataattgtattaattaaagtatttttattgttggatgttttgtttttttttaagatatttcgtttttttttaagatattttttaatagaagggtgttttttatttaaataaaaaagtgagtttatatatttttttaaagtgtaaaggtaatattttaaatatagaataatagtttaaagtagtgtaaattttttaaagtttaaaataaatgttagtgtagtttagaaaaaaataagtagggttagggttatggttagggtttagaaaattaagtaaaataaatgtgaattaagaaaatataattatgatataatttgtataatagtattttatatttaagaggttgtttattatggaataaaatatttttgttttttattatttttatattataagatttttttagagtttatattagggtttgtagatgttggaaggtagagtagtatgtgtaggtaagtttcggggttttttataattttattttttattcgaggatattttagagattgggaggtaggaaggaatatttagattttatagaattgggttaattagaaggtggtattaaagaaatttaaagatggagagaattgggtaaattgggtaagatagagatataaataaatttggatttgatttaattttagtataagagttttggatttagggtgaagtaagtatgaatttaggttggggtgtgtgtgtgtgtgtgtgtgtgtgtgtaggtgtgtttaattattttgtttgaattattgaattaatagttttaatagttttgaatgaattgaattattgtattaattttatttttatattttaattgtttttagttgtaaattgttatttttgattttttttattttttttttttttttattttatgtttttatttttatttttttttaatatttaggtgttggttagtatgtggtattttttattaatatttattttgtagttataatatatgtgtatatatttatatataagtgtatttttttggtttttgtttaggttagaagttaggtaggggagaaaattaggtaatagaatgatttttttttttgtttttttggtgttttaattttatttggattttatagtttttgaaagggttggaattttaaataaaatggattttatttaatatttttaaaaagtaattaattttaatataaaataatattttaggtgttaatgttataattagattgtgttataaaaatataggaattagaagtttttatttttagttaattaaataaattggtattaaattagttttttttttttaggtaaataaataaagatagaggtaattaaatattgtttataggatttatagaaaaagtgagagttagttttaaaagtaagttttacgtttttaagtatatgatattgttttttttttgggagttttaaatatttacgaattattttttttatttttttatttttatataatatttaaaagtgagtttatttaaagagtatttatgtagaatgtttattatttgttttgggaggagaaaatgaaaaataaatgcgttaattattgtttagaagtttatattttaaagaagatatatatatggaaatgcgtagttttaagttagttaggtgttttataataggataattttgaaagtgttatggaaatttttagaaaaaaataagtaaataaataaataataagaagaaaatttttatagaattttggaaagattttttagagaagttggttttaaaagttgggtaggttaaggtaatttatagatttaatgttatttttattaagttattaatgattttttttatagaattggaaaaaattattttaaagtttatatggaattaaaaaagagtttatattgttaagataattttaagtaaaaagaataaagttggaggtattatattatttgattttaaattatattataaggttttagtaattaaaatagtatggtattggtattaaaatagagatatagattaatggagtagaatagaggttttagaaataatattatatatttataattatttgatttttgataaatcggataaaaataagaaatggagaacggattttttatttaataaatggtgttgggaaaattggtatatgtagaaagttgaaattggattttttttttatattttatataaaaattaatttaagatggattgaagatttaaatgttagatttaaaattataaaaattttagaagaaaatttaggtaatattatttaggatatagttatgggtaaggattttatgattaaaatattaaaagtaatggtaataaaagttaaagtagataaatgggatttaattaaattaaagagtttttgtatagtaaaagaaattattattagagtaaataggtaatttatagaatgggagaaaatttttgtaatttatttatttgataaagggttaatatttagaatttataaagaatttaaataaatttataagaaaaaaataaataattttattaaaaagtgggtaatggatatgaatagatattttttaaaggaagatatttatgtaggtaatagatacgtgaaaaaacgtttattattattggttattagagaaatgtaaattaaaattataatgagatattattttatattagttagaatggtgattattaaaaagttaggaaataataggtgttggagaggatgtggagaaaaaggaatatttttaaatttttggtaggattgtaaattagtttaattattatggaagatagtgtggcgattttttaaggatttagaattagaaatattatttgatttagttattttattattgggtatatatttaaaggattataaattatgttattataaagatatatgtatatgtatgtttattgcggtattatttataatagtaaagatttggaattaatttaaatgtttattaatgatagattggattaagaaaatgtggtatatatatattatggaatattatgtagttataaaaaaacgatgagtttatgttttttgtagggatatggatgaagttggaaattattatttttagtaaattattataaagatagaaatttaaatattatatgtttttatttataggtgggaattgaataatgaaaatatttggatatagggtggggaaaattatatatcggggtttgtggggtgggcgggggggatgtgagaggaatagtattaggagaaatatttaatgtaaatgattagttgatgggtgcggtaaattaatatggtttatgtatatttatgtattaaatttgtatattgtgtatttttattttagagtttaaagtataataataaaaaagaaataatttaaatgtttattaaaaatagaatggataaatggattgtagtatattagtataatggaatatagaataataaaaattgaaagaattatatttataagttttttagtttttgatatggataatttttataaataatgtattaaaggattaagttatagagtaatatagtattattttatatacgtaaagtttaaaattaggttaaattaaattattttggatgtatgtgtagatagtaaaattatgtcgttattattatgaaatttaggaaggtggtgatatagaggggagggaagcggatgtgatgagggaggagggtgtgattagtagggaaatacggtttttagcgatgataatattttagttattaaattgggtgatgggttgtattgttgttttttataatttaatatatattttaaatgtttttttgtatttatttaataggtaatgaaatttattaaaattatatattaaaaaaaaaaagaaaaaagaaaagtcgggtaggtatttcgtaggtggtgaaatgggggatgtaaataataggttgaggaattagtaggtgttaagaatgtggtaggaagataaagggtatggtttgtgtggtgtttttggggtgggtttttatggttttttgtgagttacgtggtagtgagataggacggatttttatgttatatttaggagtttgaatttgagattatggtttggaaagttatgtatggtttttaaataaacgttttatatgagtgtattggggttttagaaagataattcggtttagtatttggtatgaaaagaggttggggagttggcgcgtaggttattattatgggttagggattgttgaaagtagagggattgtttgtaatagagaagtgggggttggaattgttaggtagtgattgtttatatagggatagagtataggagggtttagtttcgaggcgtttagttgttataaatttatatttagggtgggtcgtgaattattggaattttaaatgaggagttaggttggaatggggaatatgatttgttttatttgagatgcgtggaatatattatattaggtgaatttgtaataaagatagttaaggatgtttgtaaatagttagggacggggatgagtagattgtttagagttagagatttggagttattagtatttcgatttcgagaggttttatgagaatggatgaaattatatagaatatttagtggaggtataagggaagaaatttatttatttttgtggaatttttaatatttggaggtagtaaaaggaagagatagaggagggcgaggggagagcgcgcgcgcgaaacggagattgagatttagttattagggtgtgttgggagaattggggagacgagtttgtttttgcgagtggatttagggaagagggcgcggtttacgtagagttcgaggtagggaagcgggaggggttcggagagtagttttgggtgaggttttttggaatggagaggttttaggagtgaagtagtagttagaggattgagagtgtttggaaagtgaggaattggttaaagtaacgtcggtggttgtaatagagaggggcgtaggtgaagaagtatttttaattttattttatttgagaggaagtagataatgaagaagagaatatgaaagatatagaaagatgaaggtaggggtggaaagaacggaggggggggataggaagggaaggagaaggtgtaattaataggttgtaagtataggggtaagtttgggcgttaggggagtagggattcggcgttttttcgatttgttttaggcgttacggaaattttaggtttcgttattcgtattttcggagtttttttcgtagcggcggttttttttattcgttttttcggggttttcgtttaagttttcggcgtttttaaatttattgttcgcgttatttttcgtttttattcggtagtaaattatagcgtagtaaatcgtaagtttagaaatagacgttttttttttaggggtagttttttatttagggcgggtttgggcgtatttgttttcgggattcggttttcggttttcgtcgggtttcgcggtggggtttgggatttcggttggtgttagggcgatttttatagtttcgcgattttttttttcggtcgtttttcgtcgttatttttttagtttttgttcgtttttgtttcgttttgatttttgttttggttttttttttttttttttttttacgtattttagggaagaggtggttttcgcgggaatttgggtattttcgtgtttgtttcgttcggtatttggtagaggtttttattttttgttgttgttgttgttgtcgtcgtcgtcgtcgtcgttgttgttttgattattttttttttgtagatgttttacgttcgttttgattgagggtaaggttttcggtagatgatttagaatcgttcgattgttttggtttgtgtaatttttgattttttgggtttgtgtggatgtttgtgggtatcggagagagggttagtgtttggtttttggagggtggtttttataaaaagtgtatatattggttattgttttttttttatcgttgatttacgtttgattttattgtagttagacgtttatttaaatattttttgaaattgtttttgataaggatattaattattttttaattgttttggttaaaaaatatattttaggttttattttattttgtttgttggcgatatttagtttttttttttttgatttttttaggatttttagagtatttttttttttttttttgatttttttgtttggtattttgattttttttttattattttaagtttttttttttttattataatatgatttttttgtatgatttttattatatttataggtttatgttttaatttttaatttatttttttaaaatttttaatttgtttcgagtcgtagatgttatttgtgtattattggatattttttagaaatttgggtgtgttttttcgtagtttttttaattaaatgattaatagttttgttatttttattatttttgtgttttttttgtttatattttgttatttttattatgttttatgttttttttaaataattaatttttttatttatagttttgatttatgttaatttattgtttattttgaagtttaggtaaatattttaattttaattattttatattttagtttaaaattttttataatatttttttatttaaaaagataaattagaaattattgagtaaggagtgtaagtttttttacgttttgatttttttttttttttttttagagttatagtaaattatttatatttttttatattttttgtttatatatatggggtttttggtatgtaagtttgttttttaaaatttagtttaaataatgttttttgtaggaagtttttatagagttttttagtttgggaattttgtttttaaagatgtatatttttattttgtattttaaattaattaagtaaagattttttggaggagggaatttagtagtagtattttgtaaaattcgtttagtgatttttttgtggaattttaaaagtaattgtttttaagaattttttttaataagttttggtgtaggatttatttttattttttttttatgattttgaaatttttttttttagtggttatagatttatatttgaattgtgtttaaatttatcggttttgttagttgaaaatgttaaggttatttttttattgtgtattaatttttttttgttggttagaattagatttagattttgggttttattttgtttatttatttttttttttttttgattagtaaaatagattaaaagatgaaaaatgtttgttttttttcgtgaaatttttagtaaatgtttggtggtttgaagttttttataaaggatataatttggtttttgggagtttggttgtaaatatagatattttatgtaggaaatatagtgcgtgtaggtgtaaagaggtataagatagtattatgaaaattatgacgtatttaggtttgtagtggtatagatagtgtggatgaggtattgtaagataacgtttgatgtgtttatagggttatgtcgtgaaggttatgtggacgttgttggtggtgttttttcgtttttttgtggattatggggaaatataaaaggattttaagttggggagaaatataattatatttgtatttacgaaggtttttttggttgtaatatggagtatattgtaggagggtattattgtttgtagtgaggcgttaaggacgtagtatggatgagagatgaggaaagttgaaatgaaatagaggtaggagaaatggagaggaggatatggttttgaggaatttttaggatataaatttggtattattttttggattatgagaggaagagggagtaggaagaattaaagatgaatttaagaatgaataaatttaatttttgaaataatgtaatgaaaagtagaattggtttgtttttttaggtaaggaatttgtttgtaagtcgatatttacgaggattaattgtatttattttttgagtatggataatttaaatgttgggttttgaagggaaatttattttttagaataattaaagtttaattttagagtgagtttgaataggttttttattttattttggtttattggggatataataggtaattgataaggttttagagtatataatttagtgttttagaaattgtttttagttttattttttgtttttttgttttatatttaattttatatttttttagttagtattagggagtatttgttggtttttaattttcgatttaattttgatttagttttgtttgattttttcggtttttgattttgtggattttaggaagggtatatttttaggttagttttaggttgagttattatcgtttttaaattagatttttatttgttaagaaggaagtagagtttaggtataattggagttttttggggtgattcgaggtttttgtattttttgttgtaaaatgtataaatattttattttaaagaattttacggggtagggtatagtggtttatgtttgtaattttagtatttttggaggtcgaggcgggcggattatttgaggttaggagttttagattagtttggttaacgtggtgaaatttcgtttttgttaaaaatataaaaatgagttaggcgtggtggtaggtgtttgtaattttagttattagggggtattgaagtaggagaattgtttgaatttcgggaggttgtagtgagttgagattgtgttattgtattttagtttgggtaatagagcgagattgttttaaataaataaataaaaaataaagagttttatcggagttttaaaatattttttagtgattgattatatattttagtaaaagttattttatatatgttcggttatagtttttaattttttatgagatttttagtaattttttttggttttgagaaagtgtaaaaaaatataaaaagtaaaaataaaatatatttgttttagttaattaatgttagagaaataaatatagtattataaaatgtaagtatttgaaagaattatattgttgacgttgttttttatattttgtaggagaggatggtgaaatagaggtagtttgtgtgatttgtttagagttttatgaagaatttatagaagaattgagattatagttagtatggttatatttttagagaattgttttttttgttatattttgtggtaataatattgttataagataattggatagtgttttatatatttagtgatggaagaagagtttaattgaaataaataaatgttaggaaaaattaattcgattgtgataatatttaaggaatggagtgtttattttttaggagaagttgggttaaatgatgaaatggagtgttcgtgtatgtgatttgtggtgttgttttgttgtagttaatttttatttttaatttgaaatgtgttttgattgcgttagtgttaatttttttgagatcggtgtatttattttattaggtatattcgatttatataagtatattttttttttagtttttttattatttttttttatttaaataattaaaatttttttgaatattatttggttagttttttgagttaatgaattaattttataggatttgtttttgttattttttattaatattttttagataaatttgtattgtttattaatagtataattttaaatttaaaagattattgagttataaagtggatgtttggataatttaaaatataatggttgtggtttgggtgtggatttttgtttttacgaaaatttatattgcgatttagtttttgttgtgttagtgttttatttagggagaggtgtttgcgttatgtgggtggattttttgtgaaagttttggttttgtttttttggtagttagtgaggtataattagtttttatggaatggattaatttttttaagagtgggttgttataaagtaaggtttttttttatgtttggttttttttcgtatgtgtttgtattttttttgattttttttttattgaatttgtaggtttaatgaaggtttattgtaattttcgttttttgaggtttaatgttttttgatatagtataaaagttttttttagaagtttggggatgttagtgttatattttttgtatattttgtagaatatgagttaaataagttttttttttttataaattatttagttttaggtatttttatatagtaatataaaatagattaagataatgtttatatgaaaatgtttagattgttattaagataaatgtaagtaatgaaatatatatgttgtagagtttttgttgattaagggtatggagaatttagtggattttaatgtgaaaagtattatattaatatgtttggtattgtattttaaggaatttataaaagaaaaaaaggtttttgatatggtattgtttggaaattgttattagttttttattagtgaatcgttagtttttttattaatttgaagggggttaaggggaagtattaagtgataaagaatttggagggaattagaaagatttttttggtttttaaacgtattttttcgtgttttgattgaatgtgttgtagataggaaagttgaataggagatttttgatagttttttagattttagtttattaatagagttattattgattgttgaaatagtgtgagtttttgttatttgttttagtgttttgtttggtttagtattaattttagaatttttagtttttaatggagtagtttttttaatagttgtatatttttaagttagaatgtgtttgttagatttatattgtggattttagttttttgttatatttttttataatagtgggagag

SEQ ID NO: 1459 - DNA, 6831 bp, Artificial Sequence
  chemically treated genomic DNA (Homo sapiens)
tagattttaagtaatattgtagtatattttttaaagtaagagagtatttaagagttatagttattttttaatgatattagagtaagtttgagagtataaaggaattggaagtatataaaagtataaaatttgtataaataatagtttagttaataaaaatagaatggtttttaaagattttaataagttagttaataatatatagtgtgaatttgtattaaagatgttattatgtgttaggtattgtatgtagttaaggttttattgttgttatttttaatttttgggatgatattagaaaataggtatttatttatttagtaaatatatattgagtgtttaatattatatggtatttattgttttaaatattaaagatgaatatgataggtaaagtttttgtttttattagataatattgtagtgagaagaggtaaatagtaagtaaggaaatagataatttaataaaataagtaaggtttttaaatagtagtattatagagaaaattttaataggatattaaggtagagatgaggaaaaggaaagaagagattagtttagatgttgattagggaaatttttttgaagttgagatttaaatagtaagaaggaggtagatacgtaagttttaacggaagatttttaggagatagtagtaagtataaatttttttggatgggagtgggtttggtagaattaataaagatagtatatgatgaatgaggagtagtgtggtataatacgaagtcggagaggtgggaggggttatattaaggaggattttgtaagaatatggtagggggtttaaattttattttatgtgaaaaagaaaattagtggcggattttaagtaaaggaattttgtaaaggattattttcgttattatgagataattgcgggaaattagagaagtaggaagatagtttaatagttattatagttttaagtaagaaataatagtggtttggaaaagggtaatagtagtgagatgtatagaagtaggtggttttaggttatattttacgttttggaggtagatttaaagaatttgttgatggataggggaagtaggggaaagggaggatttagtgaggaattttagtttttaggtttgaataagtggattagagagtggtgttattatgatgagaagacggaaggaaaaagaagtggtttgttagatattaaatgaggtatgttagataaattgttagatatacgtttagagtttagagaagttaggttagaggtataaatttgggagttatatatatataataatattataatatatatataataatattattatatatatatatatataatatatagtttgaatttaaagttagtagattgaagttattttaaaaggttatttgtgatttcgataagaatagttttagggttgttgtggggataatatatgattagagtggttgaaggagggaaaggaatttaaggatattgaaaaagtgtttaggtaagattttggaaaatttttgatgtgaaggggagtaaagaaattagatggtagatgaaagggtttacgaaattttttttttgaaagagatttttattttgttaatttaggttggagattagtagtgcgattttggtttattgtagttttgatttttttgggattaagtgatttttttacgtttgttttttgagtagttgggattataggcgcgtgttgttatatttagttaatttttttgttttttgtaggatagggttttatatgttgtttaggttgtttttaaatttttgggtttagataatttgtttgttttggttttttaaagtgttaggattataggtgtgagttattttatttagtcgaatttttaagttggatataataaagtgtggtattaaatatttgtttttaagatgggatattttttacgtaatttttaggaaaaagtaaagtttagaaaggttacgaaatatgtttaatttgtttaaggttataaggttagatagtgagtttagatttaaatttaggtttgattttaaagtttatgatttttttatatttgtttgttgtttttgatttataagataattaagaaggagataaaataaaagttatgttttttggtgaaattgtaagagaataatattaatatttttatatattgatatagtgaggaggaataaggtaaaattagtaggattataatagatagtttggttttgagtgttaggaattatttaattttgttttattgtaaatggaatgatgtatattaaatttattttagtagatttaatattaaaagaaggaaatttatgtgatttatcgatggatttttttatttattttgttttttttgaagttaaagttttatttttatttagtttttttttattattttttgtattagaataaaagatattttagtgggttatttttatatatttaatatataatattaagaagtttattttttgattttttattaaaatagtagtttatatttaatttttaaatttttatttaataggttattaagatattgtttaaaaagaaaatatttattagggaaatagtaaaaatttgtataaaatataattattttattttttagatttaagggagtattttaggaatgggtttatatttattttatatagtataaaatttagaagttattatattagtgttatagattttgaatataatgaaaatgtttatttttttatttattgaaaatatattttattatatgtatttaataataatgaaggtaaatattttattataagtaattaatgataatgaaggtaaaatgggttaaagtatttatttaagaatataaaaattagaagattaaaaaaatttttttttagaagagtgtagaaattaaatatagattttaaataagttgaattaaattaaatattttgataattaaatattgtgatattgttattatttgataattatttaataattttgttattttttgatattaggaattcgtataagtaattgagaattaaatagaagatattaaattatttgaggatttagtattttttaatgtttaatagataaaatattttgaatatataatattttattgtataaataatgtaaaaattaaggtattatttatagtaagtattcggttaaatttttattttttaaaagaagaaatatttgtggtatttttagtattatttttttatgtatttggagtgataatagtattaagtttttttttatttgttagaataagatagtaaaaggaaaattaaattttattatttaataagtgtattatattgtgtttaaggtttataatggtatcgattattaatggtattatcgtaggagtttgttaatgttgggagagtagttaattaattgagatttatattaattgtggttaatgaatgattgatttttagtaaaatgcgtaggataataagatgatttataataagtttttattgttggtttatattttaaataaatttggtaagtttatttgttttataaatatatattaagtatttattatgtataaattatataaagtgttgagaaaaatgaagtgatgaattagatataattttaaagggattatagtatattaatttttttaatagtaatttgtaatttgggttttataggtggattttaagagatatgcgaataaggtggagttgtatataaattttttatatatttattttttttttttggtaagagtttatagtttttattagattattagagggattagagattttttttttaaaaagaattatttaattaaaatgtaagtttaaaaaataaaaagtataataatcgatagttaaagtattagaagaaattttatgtaggaagaaataattttagttaaggaaatttaagaaaagaaagtttggggagaaggtaagatagaggatttggatatgtggtaataggattgtgaataaaaaggagtaaagaggatgaaggtaaattagataaaggatatattttgaggaaaggtatagaaagtttagagtatatatgggtataaagagtattttgtttggttaaaatgtgaagaggataagttttagtgaagatgaagttggaaaaataagttggggttttagtgtggagggttttgaacgttaggttttaaatatagaatttttaaattattttttgtatattgagaatttattaaaggttttaagttagggaaataataatttgtatttacgttgatttttaatttaagtattttttgggtttattttaagttatattttggtataatgattaatgagaatgaataaggtaaagtttttagtttttggttttagtgtttagtatttggtaggagaataatattttttatatgaatagaaaggaaagattaagaattgttaagatagaaaggtgtcgttggggtttaattgtatatttttatatgggaggagagttgatgagatttggggttgggggaaggtaatagaaatagataaggaggtgtagaattgagattattttgagtataaaatatataggattgtatggtcgttgggaggtgtaaaaatggttaaagggtagggtagaaagatagcggatagaatttgagatttgtgggcgaagaaaaaataacgagaaagtaaagttttcgggagagtttagttaggtttttttagtttttttttttcgtagaagcggttttttaatttatatttttcgtatattatttttttttacgacggtttttttagtcgtaatagtagtagtagtagtaggttgaaaataataatattataatttggaagtatttttttttcgggttacgttaatttattttcggtttttaagtttatattttcgtttattttaaatttggaaagtcgttgttttttttgttcgtttttttttttttgcgattggttgttaggcgtgggttttcgttttatagttttgcgtttgcgcgtgggtttgggtcgttcgtcgtatttgatggtaggaggtagtagtttttcgtttttttttcgcgggagggagagttaggtaagtttcgttggacgttttcggcgtttcgttttacgaggtgtaagttattttcgcgaattgtcgaagtagttttgagttttggcgtttcgattcgtcggcgttcgtcgttagtttagcgttattttttcggcgtgttttgatggatagattttttttcggattcgagttttcgtttttgttttttagtttttttttgtttttaatttttatgttttttgattttgttttttagttggtttttcgttgtttacgtttgcgtcggcgtaggttcgggtagaatttcgagggattcgggttggggtggggttgtcggtgaaggtgcggcgatgttcgcgaaggtttttttgggtgtcgttcggaagagtttttttttcgttgcggtgcgtagcgaggtgggtcgggttatgttcgtggtatttttgtaggcgttttgggggtacgttagggtttaatcggtgttggttttttttttgtttattttggtttttttatttatttagtaaatatttgagtttgggttttgtttattgtattatatttatatttgttgttggtagttgcgatttcgagggtggtttagaaaaatcgttgaagggttatttgttgagagaatggatttttgatttttttgtttttttttaattagtttaagatagaatttatgggaaattttttttttgtttttttttgttattcgtttgttttttatgtttagtgtatttttttatattagagagatggttgtagcgtatgggattttggattattttatttgtttgtcgtgtttttttattagtaaaatatttgtttttgaaaagtattgggtgaattaaatgagagttattaggataaggtttaggttcgtttttttgttttttttattagtgggcgttttttcgtttacgcgcgcgcgcgcgtgtgcgtgtgtgtgtatagtatttttttttttgagatatttttattttttggaatattttttataatgtaatatattgattgttattttaaattaataaagtttttgtttagtagtataattagttagtttttaggtaatttaaatacgtgtattttagagacggtaatttttttttttttttttcgttcgtgttttatttttggttggaatttaatatttgtaatagacgttgttattttggtatttttgaagtattgggattttttggtttagtgtggtgttttttgaatttttgattttattggttattatttgagtattggaatgtgtatttggtgttatttggtatttgttagaagatgtgaattattgtaatgttagataagagtaaaaaaaaatattaataatttagtttaagtatatttgtggagttgttggaattataatttatgtattttagaaatcgtataaataaattttggttataattgtaataggtagtagataatttaatttatatagttgattttatttttttgatattggttaaaaaagtttaaatgaattgttttattggttttaggatatgatttttttgtagaaattagttataatatttaagaaattagtaaatttgttttttttaggttttgagagatgtttgtattatattaagaaaattaaaggtagaatagaaagttaagtttgtatgtgtatttatacgtttgtattttttgtgttttgaaataaatatattgtttatagaaaattgattttatgatttatttttaggggttaaaatatttaagataatggaaaaagtcgttattgtatatgtttttttttttttgttttttgttagt

SEQ ID NO: 1460 - DNA, 6831 bp, Artificial Sequence
  chemically treated genomic DNA (Homo sapiens)
gttaataaaaaataagaaaagaagagtatatgtaataacgattttttttattgttttaaatgttttgatttttaaaaataggttataaagttaattttttatgagtaatgtatttgttttaaaatataaaagatgtagacgtgtagatgtatatatagatttagttttttattttatttttgatttttttaatatggtataaatattttttagagtttaaaaagaataaatttattaattttttaaatattgtgattggtttttgtaaaagggttatgttttaggattaataaagtaatttatttaaatttttttggttaatattaaagagatgaaattaattgtgtggattaaattatttattgtttgttgtaattataattaaagtttatttatgcggtttttagaatgtataggttataattttaataattttataaatatatttaggttgaattgttggtatttttttttatttttgtttaatattatagtagtttatattttttagtaaatgttaaatgatattaagtgtatattttaatatttaaatggtggttagtggaattaagagtttaaagagtattatattaaattaagggattttaatgttttagaaatattaagatgataacgtttgttataggtgttaaattttaattaaaagtagagtacgaacggaaggaggaaaaaaaaattatcgtttttaaaatatacgtatttaaattatttgagagttgattaattgtattgttaaataaggattttattaatttaaagtaatagttaatatgttatattatggagaatattttagaaaatagaaatattttagaaaaaaaaatattatatatatatacgtatacgcgcgcgcgcgcgtgggcggaggggcgtttattagtgagaaaagtagaaaggcgaatttgggttttattttaatagtttttatttaatttatttaatgttttttaaaggtagatattttattgataaggaaatacggtaaataggtgaggtggtttaaggttttatgcgttatagttatttttttggtataaggaaatatattaggtatgaaaagtaaacggatggtaagaagggataaagggaaagttttttatagattttattttaagttgattgagggagggtaaggggattaggaatttatttttttaatagatagttttttagcgatttttttgagttattttcggaatcgtagttgttagtagtagatgtggatgtaatatagtgagtaggatttaaatttaaatgtttgttgaatgaatgaaggaattagagtaagtaaagagggaattagtatcggttaggttttggcgtgtttttaggacgtttgtagaagtgttacgggtatgattcggtttatttcgttacgtatcgtagcggagagaaggttttttcgagcggtatttagaggagttttcgcgggtatcgtcgtatttttatcggtagttttattttaattcgggtttttcgggattttgttcgagtttacgtcggcgtaagcgtgggtagcgaggaattagttgagaggtaggattaaagagtatgggagttgaagataagggaaaattgggggatagaggcgaaaattcggattcgaaagggggtttgtttattagggtacgtcggaagagtggcgttgagttgacggcgagcgtcggcgggtcggggcgttaaggtttagggttgtttcggtaattcgcgggggtagtttgtatttcgtgaggcgagacgtcgagggcgtttagcggggtttatttaattttttttttcgcggaagggaagcggggaattattgttttttattattaggtacgacgggcggtttaggtttacgcgtaggcgtagggttgtggggcggagatttacgtttaatagttagtcgtagaaagggaggggcgggtaaaaggggtagcggttttttaggtttggggtaggcgggagtatgggtttagaagtcggaagtgggttgacgtagttcggaaggggaatatttttaagttgtagtgttgttgtttttagtttgttgttgttgttgttgttgcggttaggggaatcgtcgtggggaaggatggtgtgcgaaaaatgtgagttaaggggtcgtttttgcgggaggaggaggttgggagaatttaattgagttttttcgggaattttgttttttcgttgtttttttttcgtttataggttttagattttattcgttgtttttttattttattttttgattatttttgtattttttaacgattatatagttttatatattttgtatttagaatggttttagttttgtatttttttgtttatttttgttgtttttttttagttttagattttattagttttttttttatataaaaatgtgtagttaaattttaacgatatttttttgttttggtaatttttgattttttttttttatttatgtaagaagtattgtttttttgttaaatgttagatattagaattaaagattaaggattttgttttatttatttttattagttattatgttaggatatggtttagagtaagtttagaagatgtttgaattgaaaattaacgtaagtgtaaattattatttttttaatttaaaatttttaataaatttttagtgtgtagagaataatttggggattttatatttggaatttggcgtttaggattttttatattaaggttttaatttatttttttagttttatttttattgaggtttattttttttatattttgattaaataaaatattttttgtgtttatgtgtattttaagttttttatgtttttttttagaatgtgttttttatttagtttgtttttattttttttatttttttttgtttatagttttattgttatatatttaaattttttgttttgttttttttttaaattttttttttttggatttttttagttagggttatttttttttgtatggaattttttttagtattttagttgtcgattattatattttttattttttaagtttatattttggttgaatggttttttttggggggaaggtttttgatttttttgataatttgatgaaaattatagatttttgttaggaaaaaaaaatgaatatataaaaggtttgtgtataattttattttgttcgtatattttttaagatttatttgtggaatttaggttatagattgttgttaaagaaattagtgtattgtaatttttttaaaattgtgtttgatttattattttattttttttagtattttgtatagtttatatatgatagatgtttagtatatatttatggaataaatagatttattagatttgtttaaaatataaattaatagtgaaagtttattataagttattttattattttacgtattttattgagggttagttatttattggttatagttaatatgagttttagttgattggttgtttttttagtattaataggtttttacggtaatattattgatagtcgatattattgtgaattttaggtataatgtaatgtatttattaaataataaagtttaattttttttttattattttgttttaataggtgaaaagaaatttggtattgttattattttagatatatggaaagatggtgttaggaatattataggtatttttttttttagaaaataggaatttaatcgaatatttattgtgaataatattttagtttttatattatttgtataatgaaatgttatgtgtttaaagtattttatttattaaatattaaagaatattgggtttttaagtgatttaatattttttatttagtttttagttatttgtacgggtttttaatattaggagatagtaaaattattaaatgattgttaagtgatggtaatattatagtatttgattattagagtatttgatttgatttagtttatttagagtttgtatttaatttttgtatttttttgaggagaaatttttttaattttttgatttttatatttttgaataaatgttttaatttattttatttttattattattaattatttatgatgaagtatttatttttattattattaaatatatatagtaaagtatgtttttaatgggtagaaaaataaatatttttattatatttaaggtttatgatattgatatagtggtttttagattttatgttatatagagtaaatatagatttatttttaaagtatttttttgagtttgagaaataaaatgattgtattttatataaatttttattgtttttttaataaatattttttttttaagtagtattttaataatttattaaatgaggatttaaaaattagatatagattattattttggtagaaagttaaggaatgaattttttaatattatatgttaaatgtatagaaataatttattaaaatattttttattttgatatagaaagtggtggaagaaagttgaatgaaaataaagttttgattttaaaaaaagtaaggtgggtaagaggatttatcgatgggttatataaattttttttttttagtattaagtttgttggagtgaatttgatgtgtattattttatttgtaataaaatagagttaggtggtttttagtatttagaattaagttatttgttataattttgttggttttattttatttttttttattgtattaatatatgaagatattagtgttatttttttatagttttattagaaaatatgatttttattttattttttttttaattattttatgaattagagatagtaggtaaatgtggaaagattataagttttggagttagatttaaatttgaatttagatttattgtttagttttatgattttaagtaagttaagtatgtttcgtgatttttttaaattttatttttttttgagaattgcgtaaaaagtgttttattttaaaaataagtgtttgatattatattttattatatttagtttaaaaattcggttgggtaaggtgatttatatttgtaattttagtattttgggaagttaaggtagatagattatttgagtttaggagtttgagagtagtttgggtaatatgtgaaattttgttttataaaggatagaaaaattaattgggtgtggtagtacgcgtttgtagttttagttatttaggaggtagacgtgggaggattatttgattttagggaggttaaggttgtagtgagttaggatcgtattattgatttttagtttgggttgatagagtgagagttttttttagaaaaaaaatttcgtgaatttttttatttgttatttgatttttttgtttttttttatattagaagttttttaaagttttatttagatatttttttagtgtttttaagttttttttttttttttagttattttagttatgtgttatttttataatagttttgaaattgtttttgtcgagattataagtgattttttagagtgattttaatttattggttttaaatttaagttatatgttatatatatatatatgtaataatattattatatatatattataatattattatatatatataatttttaaatttatatttttggtttgatttttttgagttttaaacgtatatttagtagtttatttgatatattttatttaatgtttaataggttattttttttttttttcgtttttttattatagtagtattattttttaatttatttgtttaagtttaaaagttagaattttttattgagtttttttttttttttattttttttatttattagtaagttttttggatttatttttaaaacgtaaaatgtaatttgaaattatttgtttttgtatattttattgttattatttttttttaaattattgttattttttatttggaattgtaataattattgaattatttttttgtttttttagtttttcgtagttgttttatagtaacgagagtgattttttataaagtttttttgtttaaaattcgttattggtttttttttttatatagaataaaatttaagttttttattatgtttttataaggttttttttaatatgattttttttattttttcggtttcgtattgtattatattgttttttatttattatatgttgtttttattagttttgttaagtttatttttatttaaagagatttgtatttgttgttgttttttaggagtttttcgttagagtttacgtatttgttttttttttgttgtttgggttttagttttagagaagtttttttaattagtatttaaattaattttttttttttttttttttatttttgttttagtattttgttagaattttttttataatattattatttgaaaattttgtttgttttattagattgtttgtttttttatttattgtttatttttttttattataatattatttgatgagggtaagggttttgtttattatgtttatttttggtatttagaatagtaaatattatgtaatattaagtatttagtatatatttgttgaatgaataaatatttgttttttgatgttattttaaggattagaaataataataataaagttttaattatatatagtgtttagtatataatagtatttttaatgtagatttatattatatattattgattgatttattgaggtttttgagaattattttgtttttattgattgagttattatttgtatagattttatgtttttatatatttttagtttttttatgtttttaaatttattttgatattattaaaaagtagttgtaatttttgggtatttttttattttggaaaatgtattatagtattgtttggaattta

SEQ ID NO: 1461 - DNA, 10855 bp, Artificial Sequence
  chemically treated genomic DNA (Homo sapiens)
tgagtagtggagagtgaagaagggttatttagtttttttttttttgttggtgattgtgttaatttatggttgtggagtattaagttaaagatagtttgaagggttggatttgtgtgagtttgtgggtttggttatttgtaatattttttggttaaattaagggtgtaaacggacgttttttgttgtttgtagaaatattatttaaaaaatttattttgatagtaaaagttttgggaagtggaggaaaatgttttttagaaaattttggttttagatttatttgtgtgatgattttttgtgtaaattggagtaagttattttatttttttgtttttggttttttattatttagtggagaattattttagttacgttattatgttttggtatatgtttttagtagtttttaaaattgttttagtagatagtgttagatacgtatgtatgtatatatatatatttgttttttgttgtttcgtttatttgttgttgaattataagcgtttattagatgttagttattgaatatattatagttaatttttttttagatttttattttggggagatagggttttgttttgttatttaggttagagtgtaatggtgtaattatagtttattttagattgtaatttttggatttaagtaatttttttattttagttttttaagtagttgggattataggggtgtgttattattttggttaatttttttgtttttgtagagattgggttttgttatgtggtttaggttagtttttaatttttgattttaagtgatttttttattttggttttttaaagtgttgggattagaggtgtgaattattgaatttggtttatatttaatttttataatatatttatatagtaagtataattttttttagagatattaaataatttgtttaaggttttttggttggtaggtggtaaggtttggatgtgaatttagggcgtcgaggtttagagtttttgttttttttttaaggttatataggttttttatgtttgttattttttggtttgtgttgttttttgatagtattgtatgtgagtgatgattttttaattggattatttgtttttgtggaataggggtgtatttttttgtatgttttaaatttttttggattttgagtttgttatggttggtaggtcgagaaataattattattttttttttttaaggtttgtttatgttttaatttttggagtttagaagtgtgattttatttggaaaagagtttttgtagatgtgatgaagtttaggattttgagatgaggatattattttggattagttgggtgggttttaaatattatttatataatagagaaatagagagttatttgagatatatatagaagttaatgtgattatgaaggtagaggttggagtgatatagttacgtgttaaagaatattaaagaatgttagtagtaattagaagttagaagaggtaagtaacggattatcgtttagagtttggagggtggttttgttggtattttgattttaggtttttggtttttagaatagaaagagtatatatttttgtttttttaagttattaaagttgtgttaatttgttatagtagttgttagaaattaatacggtgtttaattaaaatatagaattttagaattgaaagagttttgggaataatttggtattgttttttgatggaataaataattttgtagatttataggatgaagtgatttggtaaaggttattcggtaattagaggtagaattaggaataaaataaaggtgttttatagtgatttatgttgagttttagagttaggaaagtttagtgagaagttgtttttttgttggtatatttttttgtatgattattttaaaagaagtagggagggttgagtagatgaagtgttgtaagtttggaaagtataattattgttgttattattattattattgatttgggtaatggatttttttggtttgtttttttttttttagggttgagaaatagtattattttagggttattgggttttagatggggaaattatagtgcgagaggggaagtaagtgagtttaattatattatcggcgtgtggttgagtttagaataggacgtaggatttttgattttttgtttttttttagggttttattttttatttttttttttttgtaaattggattagtaggattagtgggttttaggtatgtggggtgtgtgtgtgtgtatgtgtatgtgtgtgtgtttgatatgggttagttaagatagttttggagattattgaaaatatgtagtaggatatgatttagtaaattatttattattatgaaatagtaaagtagggaaggaaatttgtaatttgttttttacgtttattaaggtagtatgagaagaaatgatttaatgagtgtttttttttttttttttgtaagtttttgttcgttaaatttttgtattagtgttttgtgaatttgttttgatttttattttagtttggataattggatataatttattttttgttttgggaaggaagaaataaattttataaatattttgattattgagtttaaatggagagaggtataaatcgggaattttttgaaaggagttataatttgatagaattaggtttgttttatttttgtatttgtatattttgttttttttcgtatttttttgttagatattaattttagaattggggaggagaaagattgttgaagagtaaaaaggagagtttagttattgatgtgttttggtgtttttttatttattattatggggtagagtttaggttatagtaggggagaggggattaataatgatagagatatttaggtgggtttgaaaattttagattgaggggtttttattttcgtttattttgtagagaattttggtggtttatagttttgttgatatttattgtatttttaattatatgggaatattggtatataggaggttataagagtgttgggggaaaatgtgattttgttgtataggattttttaaaggttttaggagtttgtgattagttaaatttattttgtatttataaggtgggtaaggagaggttgagggtttggaagatttattttagggagtttagtgtatggattaggagggtatagtgtggattatagaatttttaggatgagtagggataaagtttattgattaagtaggggaagttatattttagtagataaaattatttttttttggagtttaaggttagtatagtatcgtgataaagtaagattaaaataataatgggttatttttttttattgttttagtagtaatattgattatttttttatttaagatcgttttttttagattggattttaggggagagaagggagataaaaaggaagggaattttataatgaggttaaattttaaatttggagtgaagtgattgagagattattgaattgggttgagtttgtttagaagtgattaggtaatttgtttttttttattagttagattatgggtttagggtttgaaattaagttatatttggaagttattatttttattaaattaatataggaatagaaaattaaatattatatgtttttatttataaatgggagttgaataatgagaatatacggatatagggaggggaatattatatattcgggtttgttggggggggtggggggagggagagtattagaattaatagttaatgtatgtggggtttaatatttaggtggtgggttgacgggtgtaggaaattattatggtatacgtttatttgtgttataaatttgtacgttttgtatatgtaattttggaatttaaaataaaataaaaaaagaaaatttaagtttgtaaattataaaaaaagagagaaattaagttatataaagaaattatggggtttttttgtttgttattgaaatttgtgattgtgtgttaatatttataagtgagttagtggttagttaaaataagatttagggttttggttgttttgtgtttttttagggttttatttttttatttttttttttttttttggtgtttggtttataggattttgtagggagagtttgggttagttttgtataggtaggatgggtagtatttttgtgggggtttgtagtgaggggtcggggggttatatacgtgtgtgttggggagtgggttttatttttgttataggattgttacgattatttggggaatatttgggagttttaattaggttatgttttggtatggattaatagatagggaaggaggtgttattttagtttagtaggttagtatcgtttttgttatggagtcgagttcgggttttaataagattttgaggttagttatgtttaggggagtttagaagtagcgagttttttatgattttggggagtgaaataggaagggttatagttttgttagtttttggagttttgggattggtaaaaggggtttggtaggaggtgtataaggggtatttttgtttaggttaagtaatttagggagtcggaggggattttagagtaattggggatatgagattaaggattacgatagttatttttgttatttgtgttttattagatgatgttaattttaaattaagtattgggttaggtattttagagttaatatcgggttatattttttatttgtagatttggtattattattttttttttttagatgaaaagaaataggaaggtgatttgttaaaggttttgtagttagaaagcgatagaatagtatttttacgtttgatattttgttttttattttgaagttgtaacgatggaggatttttaagtaatagagtttttttaaggttaaaggaaattaaatggagttagttaggaaggttaaaatgaaaggaaagtaagggatttgtgagagttatatgattttggttggttacggtgtttgtgggagagtggttttttaagagtttaggtgtgggttaaatattgagtagagttttagttttggtagtagcgtttagtgttttgttagtagtttttagagaggtaggggttattaattggttagtaggttgtgtttttgaagttagattaacgggagagaaggaagtggttaaaagtaagtgttattgttttgggatttttagacgggatgttatttggaaagggttcgggacgatggtttaggtaattttttttatttttaatttttagttttttagatagtggggtgataaggataaggaggtagattgtgtgattgtgtgtggttggggagtaagcgtgtatatcgtagtgggacgagtagggatgtacgtgtgtggaagttttttatttttttttgagaaatattagtaggtgggaagggatttttgtggttagtatatgtaattttatttttttagtttggtttgtgtttggattttttaattttttatagttgattaattgtgtggttttagataagttatttaatttttttgatttttagttttttaatttgtaaaataaagatagaaataatatttattatttagggttaatgtgggtttaaatgagaaaatataggtgaaatagttttgtaatttttagaatgaaataggaattgttttatattttttagtttagtttaattaattaaggatttattgaatattaatagatttggaattagatagtgcgtataaagtatggtatttagtaagtttttttttattttttgaggttttttatttgtggttttttggtaaaggtatgtttagttttttttttttgggtttttaagaatttttgaaattttttgtaattttatttcgttttgttttagtagatttttgttatgggagatataaatgtgtgttatcgtattattttgttttttttagaggtagaaaaaaagaggtttttacgggattattgagtgaggtggagttgagttttataggtagtatgattaatttttgttgttttttttggttttgtagttagtagattttagatatgggttttttttttttttgtttattttgatagtagtttaagttagtagtgggatcgttcggtataagggtagtagcgggttaagttttatttttgatttttagttttttttgtgtaattgttatagtgtttggggttattgaagttgtttttattttgtgttattattttttttttttattaggggaattatagattttttaatatttggagaggagatgttaattttaggggtttaggtagaaggtagttgtttggtgtttggatataggtttttttagagttagatttggaattttttttttatttttgtttcgtttttggatgtgttaaagtagtagaaagaatattgagttaggagttaggaaagtaattttttttgtttattttttagtgtcgttagatttttgtggttttaggtgataaaaaatggggttatataggtttttatttagtaaatttatttgttttgggtttttatattttcgttttatttttttttgatattaacgaggaggtaggtagggttggttttgtgatgttattttttagttgaggaaattaagatatcgtgagtttatgtgagtggtgtgaagttattagtaagtttgaacgatgaggttttggtatagttattttgatatggttatgaggatattttgatgttatttaaaaagtaaattatttaatttaaaaaaaaatatttatgtattgtgtttagtagagatttttatttatgttttgttttttttttggaggggttggggttggagttttaatgttattggtatcgatatagtatggtggagtggaaagaggttttggcgttaatatgtttggttatatttatggttatgtaatatattttatatatggtaggtgttaaataaatagtagttaatattttttaggaagaaatttttttgttggtatttatttttgggtttaggtgtttttttattttttaattttttatttttttgagatggaattttgttttgttatttaggttggaatgtagtggcgtgattttggtttattgtaatttttattttttgggttttagcgatttttttattttagttttttgagtagttgggattatagatttatgttattatatttagttaatttttgtatttttagtatagatggggttttattatgttggttaggttggttttgaatttttgattttatgatttatttattttagttttttaaggtgttgggattataggcgtgagttattacgttcggttttaggtgtttttttataagaattgtttttttcgtgaaaggtagagaggaaagaattgaataaatttttagttcgttaagattgaatattttgtttttttttttttttattgtttttttttaataggaagattttttgaggtaaagtagagtggttaagggtttatgtttttgatttagaattttatttaagttatttattaattgtgtaattttgggtaaatgttttatttttttgtgttttaattattttatttatgaaatggggttgtttattttgttttattttttatggtggttgtaaaaatggaatatattaatatatgtaaagtatttggaaaggatttagcgtacgtttttttagtttagtttatagtgtttgtttttttttttatttatatgagtttaatttaagtagtttattttttatttttttatttttaaaggatgtttagtaagtagatttttatttttatattaagtttaggggatttttttttttttgaaaaagagggaaatttgagattagatggataaaggtttggattttatattatgagagatgaagtgtagttattttaattgaataggagttagttaaatatattttataaaaagaaaaattattttttagtatagtttatatttttgttttaatttataattgtggggatatatgttatatatatgttgggatattaatttagtaaattgaaaatgatttagtatattttagttttagtagtgaaaaaataattgttagtttaaggattagaaaacgtgtttttatgtatgatataatattatatatataaaatttaataaagtaggtttttttgtttatttaaagagtgataatggggtagtgattttaaattaggattttgttgtgggttttggggtcgagaatttttataatttttagatttttaatttgtgttatgaggataataatatttattttttgggttgttgtgttgatggatgaagttttataagaaaagaatttagtaaagtatttggtacgtagtaggtgtttaatattatgtttttttttttttttttttaagtaaattttttaaatttagttttagttattttgggttggggaggtttttcgagatttgaatttttaggtttggaagaaagtttttggttttgagaggaaggggtttgtaatgattttgaaagttcgaggtttttttaaatgttattagagaaattgtgttttaagttttagttttgggtaaagaagagtttttgtttttgaaagtaggggtatttttttttgttaattattttatttaggattggattgtgtgtatttcgttgatgttgttatttgttcgatttgtttgtgtatgtttgatgtttttatttttggtttgagattatgtagagggtaatgggtgtatatatatgttttttttttatataaatatgtatagttatttaaatatgttataaaatgagaagtttgggatagaggttagggtggtttttattttggagaagttggtatttgattttttgtaatttaggttaagtttagaggagggttgtattttttagtttagtttgtgggaagattatttttgttttacgtaaatatgaggtagtttgtttatttagaggtgaggataggaataagaagtaaggatagttgttgttggtgtgggtttttaaaagtaggtagtattttgtttttttatttgtgattgtatttattttgtgttagtataagtagaaaatggtagattttttaggattttgtagttagtttattttaattgtttttgagattttttggttttttgaaagttgtttttatttgggagtattttttatggtagtttgtagtgtttacgtaggtgatgatattttagttagtgttttttgattgtttttatgttggagttgattggtatttggttaaggttttattttaggtattaattattgatttggtaagaaaggtttggggtaattaatcggatttaagagagttttaacgttgttatttgatatttatatttgtttttattttttttttttatttttttaaagaattgtagaaataaaatatttttatatttataaggaaataaaaggttttttgttgggaaatttttttgtaataaagaaataattaagataaataattttattgtttttggtttaagttggtgaagggagtttgggagtaggagtaggggttagggtggtgagggaggtttgggagataacgtttagtttttttttgtttatagcgtttttatttttatgggtatttattattgtttaaatttacgattatttaatattttttttgttaagataattttaaagtttaaagtttgttaaagtttgggaaagtggagatttttgtttttttttttaggttgtagttggggttttgatgatagttgttgttaggtagatttttgggatttttaattttttttagttttgggttgtgtttacggtggagataaagtttatataggttgtttcgtttgagtggttttattttcgattttttatttttgtttgttaggttttattaggtaggattataaagattttaatatttaagtttttaattttaattttataattaagttgttgggaaaacgtaagtttattatttagtattttaagattttaatgttttatttataaaatggttgtgattatattcgtttgttttattttaagggaatatataaagtttaaatgaaataatgtaaatggtagtgtttttataagtaatagggtttttataaataatataaataagtataaggtaaaagtatgtttttgtatttggggtgcgatatagtagtggagaggttaagtatatggattttgtagttagataaaggtgggtttaaatttttttcgatttttattttgtgtatttttatatatttaattttatgtgtttttgaggaaagtatttaattttgaagtttttatttttttttatgtgaatgtggataaggatattaattttatagggttgatattaagtttgtatgagatagtatatataaattatttaatatagtgtttgagatagaataagggagtaattaatggggttaggattattattattatatttatagttttaataattatgatattttttttgtgggttttagtttttttatttgaatatattgtgaaatatgttagttcgttttattttttaggaatgtagggagggtagttgaaatagagagatgggggttacgtattggtaggaattaattatttagtaagttatttttgagattttacggtgtgtttgggattgtgttttatgggtagggaaatagagtaaatgatataatatttttattttaaaggagtttgtagtttagttgagaagataaaagttatttttagttattaaggatatataagtgttgaaggatgataagattttgaattgttatggaaaaagtggaggtattgatttatttaataggatttatgttagttgttggagatataaagttaaatagatgttatagaaattttaaggttaattagttttggaagataaggggcgttttatttttttgtgattattgttttttagt

SEQ ID NO: 1462 - DNA, 10855 bp, Artificial Sequence
  chemically treated genomic DNA (Homo sapiens)
gttgaaaaataataattataaggagatgaagcgttttttgttttttaagattagttgattttagagtttttgtgatatttatttggttttgtatttttagtaattgatataaattttgttgaatgaattagtgtttttattttttttataataatttaaagttttattattttttaatatttgtatatttttaatagttagaagtagtttttgtttttttaattaagttgtaagtttttttgggatagagatattgtgttatttgttttgtttttttgtttatgagatatagttttaggtatatcgtaagattttaggaatggtttgttgggtgattggtttttattaatacgtggtttttatttttttgttttagttgttttttttatatttttgggaggtgaagcgggttgatatattttatagtgtgtttagatgaggaaattgagatttatagaggaggtgttatgattattaaggttgtaaatgtaatgatgatggttttaattttattgattgtttttttattttgttttaggtattgtgttgaataatttatgtgtattattttatatagatttgatattagttttgtgaggttagtatttttatttatatttatatgggaggaaatgaaggttttaaggttaagtattttttttaagggtatatggggttaaatgtgtgggggtatatagaatgggggtcggggaagatttgggtttatttttgtttgattgtaaagtttatgtgtttaatttttttattattgtatcgtattttaaatataagagtatgtttttattttatgtttatttgtgttatttgtagagattttgttgtttatgaaagtattattatttatattattttatttgagttttatatgtttttttgaaataagatagacgggtataattataattattttatggataaaatattgaggttttgagatgttgaatgataggtttacgtttttttagtaatttggttatggaattggggttaaaagtttaggtgttagggtttttgtaattttgtttggtaaggtttggtagataaagatgaagaatcgaagatgagattatttagacggagtagtttgtgtggattttgtttttatcgtggatatagtttagggttgaggagagttgagggttttaggggtttgtttgatagtagttgttattaagattttaattatagtttagaggaggagatagaagtttttatttttttagattttgatagattttaaattttggagttgttttgataaagagagtgttaaatgatcgtaagtttgggtagtaatgagtgtttataaagataaggacgttgtaagtaggaggaagttgggcgttattttttagattttttttattattttggtttttgtttttgtttttagattttttttattagtttgagttaaaggtaatagagttgtttattttggttatttttttgttgtaggggaattttttagtaaggaattttttatttttttgtgaatataaaggtattttgtttttgtagttttttggaagaataaagggagggagtgggaataaatatgggtgttagatggtaacgttgaggtttttttgagttcggttaattgttttagattttttttattaggttaatgattaatgtttggagtggggttttggttaaatattagttagttttaatatggaagtaattaggggatattagttgggatgttattatttgcgtgggtattgtaagttgttatgggagatgtttttaggtgggagtagtttttaggaggttaggaagttttagaaatagttgggatgggttggttgtaaagttttgggagatttattattttttatttgtgttggtatagggtgggtgtagttataggtgggaggataaaatgttgtttgtttttaagaatttatattagtagtagttgtttttgttttttgtttttgtttttatttttagataagtaagttgttttatatttgcgtgagataggagtggtttttttataagttgagttgggggatgtagtttttttttggatttggtttgggttgtagagagttagatgttagtttttttaaggtgaagattattttgatttttgttttagattttttattttgtgatatgtttgggtggttgtgtatgtttgtgtagagaggggatatgtgtgtgtatttattattttttgtatggttttaagttagggatgagagtattaggtatgtataggtaggtcgggtagatggtaatattagcgggatgtatatagtttagttttagatgggatgattggtaggagaggatatttttgtttttaggaataggagtttttttttgtttaaagttaaaatttgaagtataatttttttagtagtatttgaaaggatttcgagtttttagaattattatagattttttttttttaaaattagagatttttttttaaatttggggatttaaatttcgggagatttttttagtttagggtggttggggttggatttaaaggatttgtttaaggaaggaagaaaaagaatataatgttgggtatttgttacgtgttaaatgttttgttaggttttttttttgtaagattttatttattagtataataatttaagagatagatgttgttatttttatgatataggttggaaatttaagggttatagggattttcgattttaagatttatagtagaattttaatttgaggttattattttattattattttttaaatgagtaaagggatttgttttattgggttttatatatatgatattatattatgtatgagggtacgttttttggtttttaaattagtagttgtttttttattgttgaggttaggatgtgttagattatttttagtttattaagttagtattttaatatatgtgtaatatatgtttttataattgtggattggggtaggagtgtaagttgtgttgaaggatagtttttttttttataaaatgtatttaattagtttttgtttagttaaagtgattgtattttattttttatggtgtggagtttaaatttttgtttatttaattttaggttttttttttttttagaggaagaaaggttttttggatttggtatgagagtagaagtttgtttgttggatattttttgaagatagagagatggagagtgagttatttaggttggatttatgtggataagagaggagataagtattatgggttaggttagaagaacgtacgttgagttttttttaggtgttttatatgtgttaatgtgttttatttttatagttattataggagatgggataaaatgggtaattttattttatgagtgagataattgaggtatagagaggtgagatatttgtttaaggttgtatagttggtaagtgatttagatgggattttagattaagagtataggtttttagttattttgttttattttagagggtttttttattgagaggaagtagtggagagaggaagaagtaggatatttaattttagcgaattgagaatttgtttagtttttttttttttgttttttacggaaaaggtagtttttataaggagatatttggggtcgggcgtagtggtttacgtttgtaattttagtattttgggaggttgaggtgggtggattatgaggttaggagtttaagattagtttggttaatatggtaaaattttatttgtattaaaagtgtaaaagttagttgggtgtggtggtatgggtttgtaattttagttatttaggaggttgaggtaggagaatcgttggaatttaggaggtggaggttgtagtaagttaagattacgttattgtattttagtttgggtgatagggtaagattttattttaaaaaaataaaaaattaaaaaatgaagagatatttggatttagaggtaggtgttaatagagaaatttttttttggaaaatattagttgttatttatttagtatttattatgtgtaggatatgttatataattatgggtataattaggtatgttgacgttaaagtttttttttattttattatattgtgtcgatgttagtgatattgggattttagttttagtttttttagagagagggtaagatatagatgaaggtttttgttgagtataatgtataggtatttttttttaagttggatagtttgttttttaggtgatattaaaatgtttttatgattatattaaaatggttgtattaaaattttatcgtttaaatttgttggtgattttatattatttatatagatttacggtgttttggtttttttaattagggaatgatattataaaattaattttgtttattttttcgttggtattaagggagaatgagacgaaggtgtgaaagtttagggtaagtgggtttattaaatggaagtttgtgtgattttattttttattatttaaagttatagaggtttagcggtattaggagataagtagagagagttgtttttttgatttttggtttagtgttttttttgttattttagtatatttaggggcgggataaggatggagagagaattttagatttggttttgggaagatttatgtttaggtattagatagttgttttttatttaaatttttgaaattggtattttttttttagatgttaaaggatttataatttttttagtgaagggggaaagtgatggtataaaataggagtagttttaatggttttaggtattgtggtaattgtataaagggaattgggggttagggatggagtttgattcgttgttgtttttgtgtcggacggttttattgttggtttgggttgttgttaggatgggtaaagggaggggaagtttatgtttgagatttgttggttgtagagttaggaggaatagtaggagttgattatgttgtttgtggggtttagttttattttatttagtgatttcgtgaggatttttttttttttatttttaggaagggtaggatgatgcgatgatatatatttatgttttttatggtaggaatttgttagagtaaagcgaggtggaattgtaaaggattttagaggtttttggaagtttagaaaaaaggagttgaatatgtttttgttagaaagttataagtgggaaattttaaagaatggaagaggatttgttaggtgttatattttatgcgtattatttaattttaggtttgttggtgtttaataaatttttgattaattaaattaaattgaaaaatatgaaataatttttattttattttagaggttataaagttattttatttgtgtttttttatttgaatttatattgattttgaatgataggtgttatttttatttttgttttatagattaagaaattgaggattagagaggttaggtggtttgtttaaggttatatagttaattaattatgaggagttaggaaatttaggtatagattaagttgaaagagtagaattatatatgttgattatagaggtttttttttatttgttgatattttttagaaaaggatggggggtttttatatacgtgtatttttattcgttttattgcgatatgtacgtttattttttagttatatatagttatatagtttgtttttttgtttttgttattttattatttaggagattgggagttgggaatggagggggttatttgagttatcgtttcgagttttttttagatagtatttcgtttggggattttagagtagtaatatttatttttagttatttttttttttttcgttgatttgattttagggatatagtttgttggttagttggtaatttttgtttttttaggagttattggtagggtattggacgttgttgttaaaattgaaattttgtttagtgtttgatttatatttgggtttttaaagggttatttttttataggtatcgtggttagttagggttatgtgatttttatagattttttgttttttttttattttggtttttttggttggttttatttggttttttttgattttggggagattttgttatttgggaattttttatcgttgtagttttaggatgagggatagaatgttaagcgtgaagatgttgttttgtcgttttttagttgtaagatttttggtaagttatttttttatttttttttatttggaaaagagggatggtaatattaaatttataggtagaggatatagttcggtattagttttaaaatatttggtttaatgtttgatttgaagttgatattatttgatggggtataggtggtaggagtggttgtcgtagtttttggttttatatttttagttgttttggaatttttttcgattttttaggttatttagtttggataaaaatgttttttatatattttttgttaagttttttttattagttttagagttttaggaattggtaggattgtggttttttttgttttattttttagagttatgaaagattcgttgtttttgggtttttttgaatatggttgattttagagttttgttaggattcgggttcggttttatagtaaggacggtgttgatttgttgagttgaagtagtatttttttttttatttgttagtttatgttaaaatatgatttggttgggatttttaggtgttttttaaatgatcgtggtagttttgtgataaaagtgaagtttattttttaatatatacgtgtatggtttttcgattttttattgtaaatttttatagaaatgttgtttattttatttgtgtagggttgatttaggttttttttatagagttttataggttaaatattagaaggggaaggaaaaatagagaaatagagttttggagaaatataaggtagttagagttttgggttttattttagttaattattggtttatttgtgggtgttaatatataattatagattttaatggtaagtaaaaaaattttataatttttttatgtagtttaatttttttttttttttgtggtttgtaaatttagattttttttttttattttgttttaggttttaggattatatgtgtagaacgtgtaggtttgtgatataggtaaacgtgtgttatgatggttttttgtattcgttaatttattatttaggtattaagttttatatgtattagttattagttttaatgttttttttttttttattttttttaataggttcggatgtgtaatgtttttttttttgtgttcgtgtgtttttattgtttagtttttatttatgagtgagaatatgtggtgtttggttttttgtttttgtgttagtttgatgaggatgatggtttttagatgtagtttaattttaaattttaaatttataatttgattgataaaagaaaataagttatttagttatttttaggtaagtttagtttaatttagtgattttttagttattttattttagatttaaaatttagttttattatggagttttttttttttttgtttttttttttttttttggggtttagtttggagagagcggttttgggtgagggggtggttaatgttattgttgaggtagtgaaaaggggtggtttattattattttggttttgttttgttacgatgttgtgttggttttgggttttagaaggaaatagttttgtttattgagatgtgattttttttgtttggttagtgggttttgtttttgtttattttgagggttttgtggtttatattgtgtttttttagtttatatattgagttttttggggtgggttttttaggtttttagtttttttttgtttattttgtgggtgtagggtgagtttggttgattatagatttttgaggtttttgggagattttgtgtagtagagttatatttttttttaatatttttgtaattttttgtgtgttagtgtttttatataattgggggtataatggatattagtaagattgtggattattaaagttttttataggatgggcgaaggtgagggttttttaatttggagtttttaagtttatttggatatttttattattgttaatttttttttttttattgtagtttggattttgttttatggtggtgggtgggagggtattaagatatattagtaattaagtttttttttttattttttagtagttttttttttttttagttttggggttaatgtttagtaggaggatgcgaggggagataagatatgtaggtgtagagatgagataagtttggttttgttagattatagttttttttaaaggattttcgatttatatttttttttatttgaatttaatagttaaaatatttgtagggtttgtttttttttttttaaagtaagaaataagttgtgtttagttgtttaggttggagtagaagttaaggtaggtttatagaatattagtgtagaaatttgacgagtaaaggtttgtagggaggaaggggagaatatttattaaattatttttttttatgttgttttggtgggcgtggaggataggttgtagatttttttttttgttttgttattttatgatggtgggtaatttattagattatgttttgttgtatgtttttaatagtttttaaaattgttttagttgatttatgttagatatatatatatatatatatatatatatatattttatatatttggagtttattgattttattgatttagtttatagaaaggggaaaatgagaagtagagttttgggaagaggtagggagttaaaaattttacgttttattttgggtttagttatacgtcggtggtgtgattggatttatttgttttttttttcgtattgtggtttttttatttggaatttagtggttttaaaatagtattattttttagttttgggggaggagggataggttaagagagtttattgtttaaattaataataatgatgataatagtagtgattatattttttaaatttataatattttatttgtttaattttttttgttttttttaaagtaattatataagaaaatatattagtagaagaatagttttttattggatttttttgattttgggatttagtataagttattgtggaatatttttgttttgtttttgattttgtttttaattgtcgagtgatttttgttagattattttattttgtaggtttgtaggattgtttgttttattagaggatagtgttaaattgtttttaaggtttttttagttttaggattttgtgttttggttgagtatcgtattagtttttgatagttgttataataaattaatataattttagtggtttaagaaaatagaaatgtatgttttttttgttttggagattagaagtttgaaattaaggtgttagtagggttattttttaggttttagacgataattcgttgtttgttttttttagtttttggttgttgttgatattttttggtgttttttggtacgtagttgtgttattttaatttttgtttttatagttatattggtttttgtgtatgttttaaataattttttgtttttttgttatatggatggtatttagggtttatttagttaatttaagatgatgtttttattttaagattttgaattttattatatttataaagatttttttttaaataaggttatatttttgggttttagagattgagatatagataaattttggggaagagggatggtggttatttttcggtttattaattatgataagtttaaggtttagggagatttgagatatgtaggagagtgtatttttgttttataagggtaagtagtttaattgagaagttattatttatatgtaatattgttaaggaataatataagttaggaggtagtaagtatagagagtttgtgtagttttgggaaaagagtaggggttttggatttcgacgttttgggtttatatttaagttttattatttgttagttagggaattttgaataaattatttaatgtttttggggaaaattatatttattgtataggtatgttataaagattaagtataggttaggtttagtggtttatatttttagttttagtattttgggaggttaaggtgggaggattatttggggttaggagttggagattagtttgggttatatagtaagatttagtttttataaaaataaaaaaattagttagggtggtggtatatttttgtagttttagttatttgggaggttgaggtgggaggattgtttgaatttaggagttgtagtttgaaatgagttatgattgtattattgtattttggtttgggtgatagaataagattttatttttttaaaataaaaatttaaaaaaagattagttataatatgtttagtgattagtatttaataggcgtttatgatttagtagtaaataaacgggatagtaaaaggtaagtgtgtgtgtgtatatgtatacgtgtttggtattgtttgttaagatagttttggagattattaggagtatgtattagaatatgatggcgtaattagagtgattttttattgaatgatgaaggattaagaatagaaaagtgaaatgatttgttttagtttgtataggaggttattatatagatgggtttagaattaaggttttttagaaagtatttttttttattttttaaaatttttgttgttaggatgaattttttggatgatatttttatagatagtaagggacgttcgtttatatttttggtttagttagagaatattgtagatgattaagtttataggtttatataaatttaattttttaggttgtttttagtttgatgttttataattatgggttgatataattattaatagagaaagggaagttagatagtttttttttattttttattgttta

SEQ ID NO: 1463 - DNA, 8392 bp, Artificial Sequence
  chemically treated genomic DNA (Homo sapiens)
gatttaaggggtgtttttatttttaattgttaaattttttaaaagggttttgggtttttttggggttttcgttttggggggtttttaaaaaagttaagtttttttttttttttttttttggtttttttttaaaagtgttgggattatagatatgagttagttaattttttagttttgtaaatttattttagatataattattttatcgaagaattttttttttttttttttggagatggagttttgttttgtcgtttatggttggagtgtagtggtgcgatttcggtttattgtaattttcgtttttcgagtttaagcgatttttttgttttagttttttaagtagttgggattataggggcgtgtttttatgtttagttaatgtttgtatttttaatagagacgggtttttattatgttggttaggttggttttgaatttttgattttatgatttgttcgttttggttttttaaagtgttgggattgtaggtatgagttagcgcgtttggtttttattaagaaatttttgtatttattttaatgtattttttttaatggtttagaaatttagaattttatattttggtagttgatgttataggatgggagtgttggtgagatgtagttagtttttttgaaaagattgttgttttgggtattatgttttagatgttttattatttttagttgtttggtaagggtgagattttagagttttatttttttagttttatgtttttttattagtattgtattaattgggtgatttggttttagttttgagatttttgataaaaatttgtgttgaagaaattagggacgtgtataggtttattatgtttttaattttgtgatagagggttgatgttttataaatttattttaattttaaatgttaatttttgggtcgggtacggtggtttatgtttgtaattttagtattttgggaggtcgaggcgggtggattatgaggttaggagtttgagattagtttgattaatatggtgaaattttatttttattaaaaatataaaaattagtcgggtatgatggtgtgtgtttgtaattttagttatttaggaggttgaagtaggagaattgtttgaatttgggaggtagaagttgtagtgagttgagattatgttattatattttagtttgggtgatagaatgagattttatttttaaataaatatatatatatatatatatatatatattaatttttattttttttttagtttttgttggtagtttttggttagatatagtatttgagttatttgtttagtagttggtttttatttttgtttttgtatggtggtatttgaatataagtaaagtatatatatatatttttttattgttgttttgttttttttgaggtagatttttattttgttgtttaggttggagtgtagtggtgtaattttggtttattgtaatttttattttttggggttaagtaatttttttgatttagttttttttggtagttgggattataggtgtttgtcgttatgtttggttaatttttttgtatttttagtagagataaggttttattatgttgtttaggttggttttaaatttttgggtttaagtattttatttgtttcggttttttaaagtgttgagattataggttgagttattttatttggttttgtaaagtatggtttttataagttaatatagtatgtttttatttagtaaatatttattgaatgtttattatttgtaagattgagaagtttttatattagatttttaaaggttgttttgaagtgatttgtttaattttaggattagtgttttaataatatgtgtagtgattgtgtagttttgttcgtgtttacggaagtttattggttaagagtttttgagtatagagatttttttatatattgtggtgagaaatagtattttaaaaagtatgttgataatatttgaattttgtgattaattttagtatggttaaaagtaagattattagatattatatttttttaaggagtttataatgaatttatatttaaattttttagattattttaaagataggttttgtttgtttgttttttgttttttttgagatggatttttgtttttgttgtttaggttggagtgtaatggtataatttttgtttattgtaatttttattttttgggtttaggcgatttttttgttttagttttttgagtagttgggattatagttttgaattattatgtttggttaatttttttgtatttttagtagagatagggtttcgttatgttagttaggtttgttttaaatttttgattttaggtgatttatttatttcggttttttaaagtattgggattataggtataagttatcgtgtttggtttaaagatagttggttttttttttttgagatagagttttattttgttgtttaggttggagtgtagtggcgtgattttagttaattgtaatttttatttttttggtttaagtgatttttttgttttagtttttcgagtagttgggattatagatatacgttattattttcgattaatttttgtatttttatttttttgagacgaagtttcgttgtgttgtttaggttggagtgtaatggtgttgtttaggtttattgtaatttttgttttttaggtttaagtaattttcgtgttttagttttttgagtagttgggattataggtattcgttattatgtttggttaatttttgtatttttagtagatatggggttttattatattggttaggttggtttcgaatttttgattttgtgatttatttgttttggttttttaaagtgttgagattataggtatgggttatagtgtttggttaagatagttttttatagttgatttgttttagttaatattggatttggttgtgttttttaagtgttttttaaattttttaatagtttttttattatttttttttttttttttttgatattgattagttggagaaattatataatttgttttattgaagatgttatattttttatttggttgattgtttttttgaagtatttaatttttttttttgttttttgtaaattagtatatagattagatttaaagttttgattagatttaagtttagttttgttttgtgtgaatggtaagtattgattattgtattttatgaggagatatataatgtttgatagttttatttttagtaatgttaagattaggggatttttgtagtgttaataagatagatacggacgattgtaaagttttttttttttttattttattattatttatgtttttagtatttattaatgattattgtttagatttgttagtttattagtatttgtagaattgtgattttttaatttattattttttttttatttattagtaaaagaagttttaaaaattgttttttaatttttatttttttaagatagggttttattttgttgtttaggttggagtgtagtggtattattttagtttaatgtagttttagatttttggatttaagtaatttttatgttttagttttttagtagttgggattataggtatgtattattacgtttggttaattttttgtatgttttgtagagatagggttttgtttgttgtttaggttggttttaaatttttggatttaagtaatttatttatttaagtttttttaagtaatggtattataggtatgggttattgtgttcggttttttgttttttttgatatgatatttttattaatggtataattgttaaatgaattttggtttatttaattttagcgtttatgtttttttaattattattgttgtatttttttgaaggaagtttttaaggaataggtaagatttaaatggtattattaaagggtgtatttgttgggatagtgcgtttgttttgatatgaggagtttattttttatgtgaatataggtttagtagtaggaaggtagaaggtattgtgatattagtttcgggttgtagagtgatgggagagtaagaaaaataggttagagaaatagtataaggggttttgttatttgtattgagcgatttggtgtttttaatgtttaggggatgggtcgtgaggttgatagaaaattgtttttgttggttgggtacggtgggttacgtttgtaattttagtattttgggaggttaaggcgggcggattacgaggttaggagatcgagattattttggttaatacggttgaaatttcgtttttattaaaaatataaaaaatttagttaggtatggtggtaggcgtttgtagttttagttattcgggaggttgaggtaggagaatggcgtaaaattgggaggcggagtttgtagtgagttgagatgttattattgtattttagtttaggtaatagagagagattttattttaaaaaaaaaaaaaattgtttttgtagagaaagggtttttttgattgtaaattgtttttgttgagagagggtttttttgattgttatttttattggaatttgtagagaaaaatttagtttaagaagttaatattttttaaataaagtttggagaaaaattatttgttaagtgttggttaattaaattttttaggattttgtaatttttaagtatgtagtttatttagatgttaaatatttatgttgaatttgaattaatgtggtgtgtgtgtgtgtatatatgtatgtgtatatatttttatttatatgtatataagaataattttttttttttagttggtggtatggattggataatgtatatatatataatttgtgaagtgataaaagtgtatttaaataatttatttttgttgatttatttttggtttttaaaatattatattatttaattggttttttgttatattattggttatattgaaatttaaggattaattgtagattagtggtttttattatattttggtataaaatttggttgatggttgttttgttatgttttaattattgatttttagggtttcgtggttatgaatgtgttttagttttataatgttttttgttatggtagatatttttgatatttgggcggtggatttatagatagtatttgatggttttatatttgtggatttttttttgtttattgggatttatatttagttggaggtatttcgggaagttattattttttatattaagtaggtatgttaataggtataatttttatgtgtttagtatattgtgttatttgggggaaatattattttataatagaaaatgttaatgtaaattatatgtgataatgatagtaatgaagtgatggtaattaagaaaaattagtttatgttagttagtttgaaatgtttgtttgggttattaaaattgttaagaagatttttttttgagttcgtttttgaaattattgtttttgagtttgttatatttttaaaaatgtgatttttggtttattttttttttttttttttttttttttttttttttttttttgatttttgggggaagaaagatttttttgttgtttattagatattttttttttagtaggtttgttttttttgttgtattagtttttaaagtaaattgatgagtatcgttgatttgtaaaaattagtatatatatgaatttgtttttttaaattttttttttaatgttttttaaaaagttgaatttaatgtgaatattaggagttacggtatttttaagaaaatatatttatgatatatttttgaaaatttttggttttggataagttttttaatttttttttaagtttttttattagagaaattggaattttaaaatggtatgatttttaaagtaaaaagaaaatatagaattgatttaagtattttatacgtttatgtatggtgtatttatttttatagttattagtgataagtatggatttttatggttatattttatattagattaattatttatttttttttaattgtgaaatatatataatttggaatttattatttagatatttttaggtgtgtatttatagtgttgtgtaattattattagtatttatttttagtatttaattattattttaaatagaaattttatatttataattgttttttttttttaatttttttttatttttattttgttttttatttttattagtttgtttatttttggtattttatataagtggaaatatataataaatagttatttttttgtagttggtttgtatagtatagtgtttttaaagtttatttatgttgtagtatatattttagttttatttttttttatggttgaataatattttattgtatgtatatgttatattttgtatatttatttgttgatgaatatttgggttgtttttagtttttggttattgtgaatattatgttattttgagtattggtgtataaatgtttgtttgaatttttgtttttagtttttttgggtatatatttagaagtgtgattgttggtttatagtggtaattttatgttttaatttttgaggaattgttatattgttttttatagtggttgtattatataatgttgggattagtagtgtataagggttttagtttgtttatatattggttaatatatgttatttttttttcgttttttttttttttttttttttttttttttttttttttttttttttttttttttttttttttttttttttttttttttttttttttttttattttttttttttttttttttttttttttttttttttttttttttttttttttttttttttttttttttttttttttttttttttttttatattattttttttttttttttgtttgtttaagagatacgattttgtttgttatattttttgtgtgtgtgtgtgtgtgtgtgtgtgtgtgtgtgtgtgtgtgtgtgtgtgtttaatagtatttattttaatggatgtgaagtggtattttattgtgggtttttttttgttttttgttttgtttttttgagacggagtttcgttttgtcgttagattggagggtagtgttatgattttggtttattgtaattttcgttttttgggtttaagtgatttttttgttttagtattttgagtagttgggattataggtgtatattattatgtttagttaatttttgtatttttagtagagatgggattttattatgttggttaggatggttttgattttttgattttatgatttgtttattatggttttttaaagtgttgggattataggtgtgagttattgtatttagttttattgtggtttttatgtgtattttttttatgattaatgatgttgagtatttttttatgtgtttgttggttatttgtatgttttttggagaattattttttttagatttgtattgatttttaaattttgttttttgttattgagttgtaggagttttttatatattttggatattaatattttgttagatatatatgatttgtaaatattattttttattttgttggttgtttttttatttttttgataatgttttttgttgtatagaagttttaagttttggtgaagtttagtttattttttttttttaatgttattattttgagtttttagaatgaaaagtttatttattattattattattgttgttgtttgtatttttttttgtatgttttatgtaattgaatttgagttgaggattggttataatttttaatttaggtttgttatttttagtttttagtttttgtattggttgttaataaaatatgtaatttttttttgtttttgtgtggtgaattttttttatattattttatttaggagatatggaaagagatgttgagagattgattatgattattttgataggatagtgttagtaaggatatttttgataaaagaaaagagtgtaggataaaaataatttaaatattgtatggaggtggtgatatatattttaaattaaaatttttttttgattatttttgattagtagtttttgtttataggaaagtgaaatatgaaagtttttattgagttttatttgttatagataatttgtttttagtaattttatttataatgtattttttgtgtattatgttattatattattttataaatatgggataatattatatatatttttttataatttgttgttgtaagaaaatttgaatattttgtatggttttttattttagaatgaatttatatttttttttatttttttgaatatatttttattatttttatcgttttgtaatattttataatttatttaattaattttttattgttaaatatttgatttgtttatagttttttatttttataaatagtgttgtagtgagtatttttatatttttgtatatttgagtaagtgtttttattttagaaaatgttttattatttttttttataga

SEQ ID NO: 1464 - DNA, 8392 bp, Artificial Sequence
  chemically treated genomic DNA (Homo sapiens)
tttatgagaaaaaataataagatattttttggaatggaaatatttgtttaagtgtataaagatataaggatgtttattgtagtattgtttgtaaaaataaaaaattatgaataaattaaatgtttagtaataaaagattggttaaatgaattatagaatattatagaacggtgaaaataatagaaatatatttagaaaaatagaaaaaaatataaatttattttgaaatggaaaattatataaaatatttaagtttttttataatagtaaattataggagagtatatatggtattattttatgtttgtagggtaatataatggtatagtgtataaaaaatgtattataaatgaaattattaaaagtaaattatttatgataagtaagatttaatgaaaatttttatattttatttttttgtaagtagaaattattgattaggagtaattaaaaaaaaattttaatttaaagtatgtattattatttttatataatatttaaattatttttgttttgtattttttttttttattaggggtatttttattaatattgttttgttagaatgattataattaattttttaatatttttttttatgttttttggatgagataatataaaagaagtttattatataaaaataaaaagggattgtatattttgttaatagttagtataaaagttaagagttgaaaataatagatttgagttaaaaattgtggttaatttttagtttagatttagttatataaaatatataggagaaagtataagtaataataataataataatgataggtaaattttttattttaaaggtttaaaatagtaatattaagaaaaaaaggtaaattgaattttattaaaatttaaaatttttgtatagtaaaagatattattaagagaatgaaaaggtaattaataaaatgggaggtaatatttgtaaattatatatatttgataagatattaatatttagaatatataaagaatttttataatttaataatagaaaataaagtttaaaaattagtataggtttagaaaagataattttttaaaaaatatataaatgattaataagtatataaaaagatgtttaatattattagttatgagggaaatgtatataaaaattataatgaggttgggtgtagtggtttatatttgtaattttagtattttgggaggttatggtgggtagattatgaggttaagaaattaagattattttggttaatatggtgaaattttatttttattaaaaatataaaaattagttgggtatggtggtgtgtatttatagttttagttatttaggatgttgaagtaggagaattatttgaatttaggaggcggaggttgtagtaagttaaggttatgatattgttttttagtttggcgatagagcgagatttcgttttaaaaaaataaaataaaaaataaaaaaaaatttataatgagatattattttatatttattaggatggatattattaaatatatatatatatatatatatatatatatatatatatatatatatatatagaaaatatggtaaataagatcgtattttttagataaataaaaaaaggaaagaaataatgtaagaaaagaggaaggaagaaaggaaggaagaagggagggagggagagaggggaggggaagggaggagagggagaggaaggaggggaggtaggaaaagagggagggagggaggaagagagggagggaggaagagagggagggaggaagagagggagggaggaagagagggagggagggagcgaggagaaaatagtatgtgttggttagtatgtagataaattggaatttttgtatattgttggttttaatattatatggtgtagttattgtggaaaatagtgtggtagttttttaaaagttaaaatatggaattattattgtgaattaataattatatttttaggtatatatttaaaagaattgaaagtaggaatttaaatagatatttatatattaatgtttagagtagtataatatttataatagttaaaagttggaagtaatttaaatgtttattaatagataaatatataaaatgtggtatatatatataatggaatattatttagttataaaagggaatgaaattaggatatatgttataatatggatgaattttaaaaatattatgttatgtaagttaattataaaaggatagttatttattgtatgtttttatttatataaagtattaagaataggtaaattggtagagatggaaaatagaatagaaataaaaaggaattgagggaaaggggtagttatgggtatgaagtttttgtttgggatgatggttaagtgttggaaatggatattggtgatggttgtatagtattgtgaatgtatatttaaaaatgtttaaatagtaaattttaggttatgtatattttataattaaaaagagataaatggttaatttaatgtgaagtatagttataggaatttatatttgttattggtgattataaaaataggtgtattatgtatgagcgtatgagatgtttaagttaattttgtattttttttttattttaaggattatgttattttagaattttagtttttttaatgaagaagtttggaaaggagttaagaggtttgtttaaagttaagagtttttagaggtatattataaatatgtttttttaaaaatatcgtaatttttgatatttatattgggtttagttttttgaaaaatattagaaagaaagtttagaaaaataagtttatgtatatgttggtttttataaattaacggtgtttattaatttattttaaaaattaatgtaatagaaaaggtaagtttgttgagggaaaaatatttggtgaatagtagaaaagtttttttttttttaagagttaaggaaagggggaagagaagaaaaaggagagaagagaaaatgaattaaaaattatatttttaaaagtgtgataagtttaaagatagtaattttaaagacgaatttaaaagaaaatttttttgatagttttaataatttaaataaatattttaaattagttaatataaattaattttttttaattattattattttattattattattattatatataatttatattaatattttttattatagaatgatattttttttaagtgatatagtatgttaaatatatagaaattatatttattaatatatttgtttaatataagaaatggtagtttttcgaggtatttttaattggatataaattttagtgggtaaaaggaaatttataggtatggagttattagatgttatttgtgaatttatcgtttagatgttaaggatgtttgttatagtaggaggtattatgaaattgaagtatatttataattacggggttttagaaattagtaattaaaatatagtaaaataattattagttaaattttatattaagatatgataaagattattaatttataattagtttttagattttaatatagttaataatgtaataggaggttaattaaataatgtgatattttaaaaattaagagtaagttagtagaaataaattatttaaatatatttttattattttataaattatatatatgtatattatttaatttatattattaattaaaggaaaaaaattatttttatatatatataaataaaaatatatatatatatatatgtatatatatatatattatattgatttaaatttaatataaatatttgatatttgaataaattgtatgtttaaggattatagggttttaagaaatttagttaattagtatttgataggtgatttttttttaaattttatttagaaaatattagttttttaggttgagtttttttttgtaaattttaatgaaaatgataattaagagggtttttttttaataagaataatttgtaattaagagggttttttttttataaggataattttttttttttttgagatggagtttttttttgttgtttaggttggaatgtagtagtgatattttagtttattgtaagtttcgttttttagttttacgttatttttttgttttagtttttcgagtagttgagattataggcgtttgttattatgtttggttaaattttttgtatttttagtagagacggggttttaatcgtgttagttaggatggtttcgattttttgatttcgtgattcgttcgttttggttttttaaagtgttgggattataggcgtgatttatcgtgtttagttaataaggataattttttattaattttacggtttattttttaagtattaaaaatattaaatcgtttaatatagatggtaaggttttttgtgttatttttttggtttattttttttgtttttttattattttatagttcgagattggtattatagtgttttttgtttttttgttgttagatttatgtttatatgaggaataaattttttatattaaaataaacgtattattttaataaatgtattttttaatagtgttatttaagttttatttattttttaagggttttttttaagaagatataataataataattggaagaatatgagcgttaaagttaaatgaattaaggtttatttaataattatgttattaatgaaagtgttatattaaaagagataggaggtcgggtatagtggtttatgtttgtaatattattatttggggaggtttagatgggtggattgtttgagtttaggagtttgagattagtttgggtaataaataagattttgtttttataaaatatataaaaaattggttaggcgtagtggtgtatatttgtagttttagttattgggagattgaggtatgaggattgtttgagtttaagaatttaaggttgtattgagttaaaatagtattattgtattttagtttggataataaagtgagattttgttttaaaaaaataaaaattaaaaaataatttttagaattttttttgttaataaatggaaaaagaataataaattagaaaattataattttgtaagtgttaatgaattaatagatttaggtaatgattattaatagatgttaaagatataaataataataaggtgaaaggagaagaaattttataatcgttcgtgtttgttttgttgatattataggaattttttgattttagtattattaaaagtgggattattagatattatgtgtttttttatgaaatgtaatagttagtatttattatttatataaaataaaattgaatttgaatttaattaaggttttagatttgatttatgtgttagtttataggaaatagagaaaaaagttaaatattttaaggaagtaattagttaagtagagaatgtggtatttttaataaaataaattatatggtttttttagttaattaatattaagaagaggaggaagaagatggtggaaggattgttaaagaatttaaaaaatatttaggagatatagttaaatttaatgttagttggaataaattaattataaaaaattattttagttaggtattgtggtttatgtttgtaattttagtattttgggaggttaaggtaggtggattataaggttaggagttcgaggttagtttggttaatatggtgaaattttatgtttattaaaaatataaaaattagttaggtatggtggcgggtgtttgtaattttagttatttagaaggttgaggtacgagaattgtttgaatttgggaggtagaggttgtagtgagtttagatagtattattgtattttagtttgggtaatatagcgagatttcgttttaaaaaaataaaaatataaaaattagtcgggggtggtggcgtgtgtttgtagttttagttattcgggaggttgaggtagaagaattatttgaattaggaaggtggaggttgtagttagttgagattacgttattgtattttagtttgggtaatagagtgggattttgttttaaaaaaaaaaaattaattatttttgggttaggtacggtggtttatgtttgtaattttagtattttgggaggtcgaggtgggtggattatttgaggttaggagtttgagataagtttgattgatatggcgaaattttgtttttattaaaaatataaaaaaattagttaggtatggtggtttaagattgtaattttagttatttaggaggttgaggtaggagaatcgtttgaatttaagaggtggaggttgtagtgagtagagattgtgttattgtattttagtttgggtaataagagtaaaaatttattttaaaaaaaataaaaaataaataaataaaatttatttttgaaataatttgggaaatttaaatatggatttattataagttttttgaggaaatataatgtttagtggttttatttttagttatgttaagattgattatagaatttaggtattgttaatatgttttttaaagtattgttttttattatagtatatggaaaggtttttatatttaggaatttttaattaataaattttcgtaaatacgaataaaattatatagttattatatatgttattaaggtattagttttaaaattaagtaaattattttagagtagtttttgaagatttggtgtaggagttttttaattttgtaagtaataagtatttaataagtatttgttgaatgaaaatatgttgtattaatttataaagattatattttgtagggttaggtagggtggtttagtttataattttagtattttgggaagtcgaagtaagtggagtgtttgagtttaggagtttgagattagtttgggtaatatggtgaaattttgtttttattaaaaatataaaaaaattagttaggtatggcggtaggtatttgtaattttagttattagggagggttgagttaggagaattgtttgattttagagggtggaggttgtagtgggttaagattatattattgtattttagtttgggtaatagagtgagagtttgttttaaaaaaaataaaataataataaaaaaatatatatatatattttgtttatatttaaatattattatgtaaagatagaggtggaagttagttattgaataagtaatttaagtattatgtttaattaagagttgttaataaaagttggaggaaaaatgaaagttagtatgtatgtatgtatgtatgtatgtatttgtttagagatggagttttattttgttatttaggttggagtgtagtggtatgattttagtttattgtaatttttgttttttaggtttaagtaatttttttgttttagttttttgagtagttgggattataggtatatattattatgttcggttaatttttgtatttttagtagagatggggttttattatgttggttaggttagttttaaatttttgattttatgatttattcgtttcggttttttaaagtgttgggattataggtatgagttatcgtgttcggtttagaagttagtatttaaaattgaggtgggtttatgaaatattagttttttgttatagaattagaaatataataaatttgtatacgtttttagtttttttaatatagatttttgttaagaattttagaattgaaattaaattatttaattaatataatattaataaaagagtatgaaattagaaaaataaaattttgggattttatttttattagatagttggaaatggtaaggtatttgagatataatgtttagagtagtaatttttttaaagagattgattgtattttattagtatttttattttatagtattaattgttaagatataaaattttaaatttttaagttattagagaaaatgtattaaggtagatataaaaattttttgatgaaggttaggcgcgttggtttatgtttgtaattttagtattttgggaggttaaggcgggtagattatggggttagaagtttaagattagtttgattaatatggtgaaaattcgtttttgttaaaaatgtaaatattagttgggtatggaggtacgtttttgtaattttagttatttgggaggttgaggtaggagaatcgtttgaattcgggaggcggaggttatagtgagtcgagatcgtattattgtattttagttatgggcgatagggtaagattttatttttaaaaaaaaaaaaaaaaaatttttcgatgaaatgattatatttaaaatgaatttataaggttaaagagttggttggtttatgtttataattttagtatttttgggggaaggttaaaggggaaagggaagggaaatttggtttttttgaaaattttttaaagcggaagttttaaaaggatttaaaatttttttggggggtttaataattaagggtgaagatattttttaaatt

SEQ ID NO: 1465 - DNA, 5287 bp, Artificial Sequence
  chemically treated genomic DNA (Homo sapiens)
tttttaatgtttattttgtgttgttttgttttttgattgagagttgagggggtttgttagttttttttggttgtgtttttatttgttgtttttgtggataggagagtgttggtttatttaggcggtgtttgattattagttagaagggaggttttttttttttgagttgttttagtttttttggttttattttttttgtattgtagtatagtttttggttttaaagtttagttttattgttagtttttttttatggggtggaagttttcggatttagatttaggttttgtaattttttttatagggtgttttttttttggatggggtttttaattaattttgggatttgtaaggttattttatatttttttttagataagggagggttagagttgttagggtggttataggatttatggtttaagaaagtatttaaggttttagaaagttagataagtgattgttggattgggttgggaatagagtgattttggggtagtagtgaggaataggttacggttttatttgtggatgaggtgaggagagttgtagatttcgtaaggaattttttagtttgtttgtgagtaataattttgaagggttttttgagggttttgggaaagtttgatgatcggagttgaaaggtgattttgtttaaggaagattacgatggttaagaattaatgtagggttaagttttaggtgtttgttgcggaggaattaaggttgaagtattttgaattatttatttttttttttatttatttaatatatatttagggagtttttgttaggggtcgacgatgtttagtgtttttagcgatattattttgttcggaggtattaattttttttgtttaggtgttgttcggaggttttatttattatgtgggattgtagagttagattaggatttatattttagttttgttattttttgttattgattttaggtaagagattttatttttttgaattttattttttttatttgtataataaagagacgaatagtttttattttgtagaattgttatgagaagttaatgagataatgtgtttaaatgtttggtatatggtaaggttttaatatatagtggtaatagttattatttattatatcgtggttaggtttttagatgtattatttaatataatttttgttattaatttataacgaagatgtgatttttatttaaaaattaggaatttacgaggtgggtggattatttgaagtttggagttcgagattagtttggttaatatggtgaaattttgtttttattaaaatataaagattagttaggtgtagtggtaaacgtttgtaattttagttattcgggaggttgaggtaggagaatcgtttgaatttaggagggtgaagttgtagtgagttgagatcgtattattgtattttagtttgggtgatagagtaagagttcgttttaaaaaaaataaataaataaaaataaaaaataataattaggaatttgtgttttggagaggttaattaatttgaaggagtttatagtttaggttgattttaaagttcgtgtttttagaaatattaatttttagttataattttttgtgtaagaatgaaaaatgtaggtttttaggtttagaaggatttttaagtaagtttattaggtaggagtagatatagtaagttgttaaaatgtgtgatgttatagaattttatatgggttattttagggggatttggtgaaggaattttatatttattttaggagtttgggttattgtagaagagtttttttttttaattttttttaggttttgaatttttttatgaatttgatggaagttaaggattttttttttggaaaaatgtttgtaagtattatatatatttttgtgtataattttagagggtttggaaaatttttgtaattcggtcgtggattttatttaagaatttttcgagggtatattttttaagtgtaggatatatattatttatagtgtttgagattagtttaataatgtaaaaattaaatgttttatattttaatatttatattttatagttattttttatttatggttaatgagattggttttttatttatggtaatgatataaatttgttttttaaaagtatatttattaggtcgggtgcgatggtttacgtttgtaattttaaaatttagggaggttaaggtaggcggattatttgagtttaggagtttaagattagtttggttaatatggtaagattttgtttttataaaaatagaaaaattagtcgggtatggtggtgtgtatttgtattttagttatttaggaggttaaggtagaagaattatttgaatttagatcgcgttattgtattttagtttgggcgatagagtgagattttattttaaaaaaataaaataaaataaaaagtatatttatttaaaaaataaagggagtttaaataaaattattatatagaatattatatatagtattattttttattttttatttatttattttttttgagagagtttcgttttgttttttaggttggagtgtagtggtgcgatttcggtttattgtaagtttagtttttggggtttacgtcgtttttttgttttagttttttaattagttgggattataggcgtttattattacgttcggttaattttttttttttttgtatttttagtaaagatggggttttattatgttagttaggatggttttgattttttgatttcgtgattcgtttgtttcggttttttaaagtgttgggattataggcgtgagttattatattcggttatataaggtattattaatgaataattatattattatattatgatgatagtattattatagtaaaaattaaataaataataataggggtagtgtagtgtagatatggaaaaaaattatgaggatgatttaggaaatttttttggggtttttatttagtggagttatcgtggttttattttagtgttatttgtatttttagggtttttatttgttgttaatttattttttttttaagagaggtattatagtaatattataattttttaaattttgaattttattattagaaatatggaattggaaaaagttgttgatttaattgatatgtatatgttgaatttgaaaaggttttaattattgttatttttttttttttttttttttttgagacggagtttttaggttggagtgtaatggcgcgatttcggtttattatagattttgtgttcgggtttagtgatttttttgttttagttttttgagtaggtgggattataggtacgtgttattatgtttagttaattttgtatttttagtagagatggggtttttttatgttgattaggttggttttaaattttttattttaggttatttattcgtttcggttttttaaagtgttgggattataggtatgagttatcgtattcggtttatttttatttttttttttttggagttgtgtgtttttgtttaaattgttttatttttattttttgagatggggtttggttatattgtttaggttggtttttaattattgagtttaagcgatttttttgattcggttttttaaagtgttgggattataggtgtgagttattatgtttagttataaattgttttaaggagtaatgagagtagatggttagaggaaaatgtagaaatgtaaataggaagtttttagatatatgattaatttgataatttatttatggaggttcgaaaaatatattataggtattttagagttggttgtttaaaattttgttgtggtttttgggatagttgtataaattgataattattgataagatttattgattatttattatgtgttttatattgtgttgagagaattttaaatgtttaatattgttaataagcgtatgaattggtttttttttatatttagtttttttttatttaaagaagatatttaaatagttagtaaatgatagtgttgggatttaaatttagatttgatttgttttttaatttttttaagattttgtttttttaattatttcgtgttttttttttaagttagaggggacgttatttttttaacggtcgttttttcgtttattagaatattttttttttagagataaattttaattaagaattttttttatataggaaagattgttttatttgagtaagaagttttattttggataaaaatttcggggtttaatatttttaaatttattcggatttttatttttaattttttaaaggatgttcgtattgtttggtagagattttatttttggggataattttttaattcgtaaggaaatattttttttttttgaagtttttttttaattttgaggatgtttttttttaaatattttagagtagaatcgattataaatggggtttagtgtaaaatgaaaacgtaagggttttttttgtgagattgtattgttggtttatttacgaagtcggttttgttttagagatatttttttagtaaagggagaggttatttttgtcgtaattttgttaatttggggtgcgagattatgcgatttgtcgtggtgggggggcgggggggtgggggtaggaatggttattaatttttagagattgttgttcgagaatatattttgggataattttcgtgaatttggaattattttttttggtttcggtagaagttttttttttatttttttagatagttgggtggttttcgtaattcggtcggggttttattttttgggtgtgtgggtttcgtagcgtgcggtttattgttcgggtaatcgacgtcgtgagcggtgtattgtggtttgtaataaaatgtaggagaaagattttgagggaattatggagttatggataatggaagaatgcgtgggttgcgttaagtaatagggtcgcgcggcgaggggcggggtcggcgggagtagggcggggtttgagtattaggcggcggcggttggcgtggggttgtttagatgcgttacggtttcggtagcgacggtatttttagtcgggtttgagttgtgttagtattttttttaggagatcgttgtagtcggttagtttttttttttacggtgagaaattcggggggttagggggtgttttcgttgttttatttcgttttatttcggatttagtttttcgcgtagttcgcgttttttgagaagtggggtggggggcgtcgtttcgtggtggcgtcggtcggggtgggggtagttagtgtttggggggcgcggtttaatttaattttttattttaggttttgtttattagg

SEQ ID NO: 1466 - DNA, 5287 bp, Artificial Sequence
  chemically treated genomic DNA (Homo sapiens)
tttagtgggtaaggtttggggtaaggggttgagttgggtcgcgttttttaggtattaattgtttttatttcggtcggcgttattacgggacgacgttttttattttattttttaggaagcgcgggttacgcggagggttaagttcggagtggggcgaaataaggtagcgaggatattttttggtttttcgagttttttatcgtggagaagggggttggtcgattgtaacggttttttggggggggtgttagtatagtttaggttcggttagagatatcgtcgttatcgaaatcgtggcgtatttaagtagttttacgttagtcgtcgtcgtttagtgtttaggtttcgttttgttttcgtcggtttcgtttttcgtcgcgcgattttattgtttgacgtagtttacgtatttttttattgtttatgattttatggtttttttaggattttttttttgtattttgttgtagattataatgtatcgtttacggcgtcggttgttcgggtaatgggtcgtacgttacgaggtttatatatttagaaggtggagtttcggtcgggttacgaggattatttagttgtttggagaggtaggaagggagtttttgtcggggttaagggaagtgattttaaatttacggaggttgttttagggtgtgttttcgaataatagtttttagaagttggtggttatttttgtttttattttttcgtttttttattacgataggtcgtatgatttcgtattttaggttagtaggattacgatagaggtggtttttttttttattgaaagggtatttttgaagtagggtcggtttcgtgggtaaattagtagtgtagttttataggagggatttttacgtttttattttgtattgggttttatttgtagtcggttttgttttgaaatatttaggggagggtatttttaggattgagggagggttttaaggagggagggtgtttttttacgaattaagggattatttttaagagtggggtttttgttaagtaatgcggatattttttaaggggttggggatggggattcgggtggatttgggagtgttgagtttcggggtttttgtttagggtgaagttttttgtttaggtgaggtagttttttttgtgtgggagagatttttggttgggatttatttttgaggaggaggtattttaatggacgaaaaagcggtcgttagagagatgacgttttttttggtttagggaggagatacgaagtggttaaaaaagtaagattttgggggagttgagggataagttagatttggatttaaattttagtattgttatttattagttatttgaatgttttttttaagtaaaggaggattaaatgtaaaaggaaattagtttatacgtttgttagtagtattaaatatttgaagtttttttagtataatgtgaggtatatagtaaatgattaatgaattttattaataattgttagtttatataattattttaaaggttatagtaaggttttgaataattagttttgaaatgtttataatgtatttttcgaatttttataaataagttattaggttaattatgtatttggaagttttttatttatatttttatatttttttttgattatttatttttattattttttaaaataatttgtggttgggtatgatggtttatatttgtaattttagtattttgagaagtcgagttaaggggatcgtttgagtttagtagttggagattagtttgggtaatatggttaaattttattttaaaaaataaaaataaaataatttgagtagaggtatataattttagaaagaaaaagatgggaataggtcgggtgcggtggtttatgtttataattttagtattttgggaggtcgaggcgggtggatgatttgaggtaaggagtttgagattagtttgattaatatggagaaattttatttttattaaaaatataaaattagttgggtatggtggtacgtgtttgtaattttatttatttaggaggttgaggtaggagaattattgaattcggatatagagtttgtagtgagtcgagatcgcgttattgtattttagtttgggaatttcgttttaaaaaaaaaaaaaaggaaaaaaatggtaataattagaatttttttaggtttaatatatgtatattaattaaattaatagttttttttagttttatgtttttaatgatgagatttagggtttgaggagttataatattattatagtattttttttgaggaagaaataggttgataataagtgaggattttggaaatgtaaatgatattaaagtaaagttacggtgattttattaagtagaaattttagggaaattttttaaattatttttatgatttttttttatatttatattatattatttttgttattatttatttaatttttattataataatattattattataatatagtaatgtaattgtttattaataatattttatatggtcgggtgtggtggtttacgtttgtaattttagtattttgggaggtcgaggtaggcggattacgaggttaggagattaagattattttggttaatatggtgaaattttatttttattaaaaatataaaaaaaaaaaaaattagtcgggcgtggtggtgagcgtttgtagttttagttagttgggaggttgaggtaggagaacggcgtgaattttagaggttgagtttgtagtgagtcgagatcgtattattgtattttagtttgggagatagagcgagatttttttaaaaaaaataaataaataaaaaataaaaaataatattgtatataatattttatataataattttatttgaattttttttattttttaaataagtatattttttattttattttatttttttgagatggagttttattttgtcgtttagattggagtgtagtggcgcgatttgggtttaagtgatttttttgttttggttttttgagtagttgggatataggtgtatattattatgttcggttaatttttttatttttgtagagatagggttttgttatgttggttaggttggttttgaatttttgagtttaagtgattcgtttgttttggtttttttaagttttgggattataggcgtgagttatcgtattcggtttaataagtatgtttttaaaagataaatttatattattattataaatggaaagttagttttattggttataaatagaaggtaattataaaatataaatattagaatataaaatatttggtttttgtattgttaaattgattttagatattatgagtgatatgtgttttgtatttggaaaatgtattttcgaggggtttttaaatggggtttacgatcggattgtaaaggttttttaagttttttggaattatgtataaaaatgtatgtagtgtttataggtatttttttaaagagaggatttttagtttttattagatttataaagggatttagaatttaaggaggattaaaaaaaaaaatttttttataataatttagatttttagaataaatgtgagatttttttattaggtttttttgaagtggtttatatggggttttgtagtattatatattttggtaatttattatatttatttttgtttgataaatttgtttaaaaatttttttaagtttgaaaatttgtattttttatttttgtataggaaattataattaggggttaatgtttttgagagtacgggttttggaattaatttaagttatgagtttttttaagttagttaatttttttaaggtataggtttttgattgttattttttatttttatttatttattttttttgagacggatttttgttttgttatttaggttggagtgtagtagtgcgattttagtttattgtaattttatttttttgggtttaagcgatttttttgttttagtttttcgagtagttgggattataggcgtttgttattatatttggttaatttttgtattttagtagagatagggttttattatgttggttaggttggtttcgaattttagattttaggtgatttatttatttcgtaggtttttgatttttaaatggagattatattttcgttataggttggtggtagggattatattaaataatgtatttagagatttagttacggtataataaatagtagttattgttattgtatattgagattttattatgtattagatatttagatatattattttattggttttttataataattttataaggtaagaattgttcgtttttttattatatagatgaagaaaatgaggtttaaagagatgaagttttttgtttaaagttagtgatagaaagtgatagagttgggatgtgaattttggtttgattttatagttttatatggtagatggaattttcgagtaatatttaaataaagggagttgatgttttcgaatagagtaatgtcgttggagatattaagtatcgtcggtttttggtaggagttttttaaatatgtgttggatggatggaagaaaggatggatagtttagagtattttagttttgattttttcgtaatagatatttgaaatttgattttatattggtttttggttatcgtgattttttttggatagaattattttttagtttcggttattagatttttttagggtttttagaaagttttttagagttgttatttataggtaggttgagggattttttacggggtttgtagttttttttattttatttataagtaggatcgtggtttgttttttattattgttttaggattattttgtttttagtttagtttagtaattatttgtttagttttttggaattttgagtatttttttgaattatgagttttgtgattattttagtagttttaatttttttttatttgaaaggaagtgtgaggtgattttgtaggttttagagttgattgaagattttatttagaaagaaggtattttgtgggagagattgtaaggtttaggtttgaattcggaagtttttattttatggagaagggttggtagtggagttgagttttggagttaaggattgtattgtagtgtagggagagtgaggttagaaaggttgagataatttagggaaagaaaattttttttttggttaatagttaagtatcgtttgagtagattaatatttttttgtttataggggtagtagatgaagatataattagagaggattaataggtttttttagtttttagttagagggtagagtaatatagaatagatattaaagg

SEQ ID NO: 1467 - DNA, 14253 bp, Artificial Sequence
  chemically treated genomic DNA (Homo sapiens)
  unsure 888, 1050..1051, 1107, 3456, 3852..3853: n is a or g or c or t
  unsure 4088, 4113, 4468..4469, 4471: n is a or g or c or t
  unsure 6266, 6284, 6362, 6665, 6923, 8547..8548, 10510, 12250: n is a or g or c or t
ttttgttttttcgtggtgatttttagtatttagaggatttttttatattagttagattatgtttttttttggtttgaagttttgtaagtgtttttaatttcgtttagagtaaaagttgaatttttttttttttttttgagatagagtttgtttttgttgtttaggttggagtataatggcgtaatttcggtttatcgtaattttcgttttttgggtttaagcgatttttttgttttagttttttacgtagttgggattataggtatgtgtattacggtcggttaattttgtatttttagtagagacggggttttattatgttagttaggttggttttgaatttttaattttaggtaatttaattattttaaattttttaaagtgttggaattataggtgtgagttattgtatttagttaagttgtatttttttttgttgttgttgttgttgtttgagatagagttttgttttatcgtttaggttggagtgtaatggagtaattttagtttattgtaattttttttttttgggtttaagtaatttttttgttttagttttttaagtagttgggattataggtatttattattatttttagttaattttgtgtgtgtgtgtgtgtgtgtgtgtgtgtgtgtgtgtgtgtgtatttttagtagagatagggttttcgttatgttggttagtttggttttgaatttttgattttaggtgatttaatcgttttagttttttaaagtgttgggattataggcgtgagtaatcgtgtttagttataaaaggtgaattattataaggtttaataggatttggtttcggttatttttttttttttttttatgattagttcgttttattttttcgtttttttgtttttttagttttanttatattggttttgttttttttgtttattttttaatatattaatatttttttgttttagggtgtattttttgtgtttggaattttttgtttagatatttttaaatgtttcgagtttttcgatttttgttaaggttttgtttgattgttattttttttataannnttagtttgattaatttttttaaaatttaattttgttaggtgaggtggatcgtttnggttaagagtttaagagtattttagttaatatggtaaaattcgtttttatttaaaatataaaaattagttgggcgtggtgttatatatttgtaattttagttatttaggaggttgaggtaggagaattattcgaatttggggggtagagattgtagtgagttgagattatattattgtattttagtttgggtaatagagcgagattttattttaaaaaaaaaaaaaaaaaaaaaaaaattaattttattttatttttgaattgttttaatttattttttttattttatttattatttgttaatattttgtataatttattttttatatttgttaaaatgttttttttttttttattagaatttgggttttaggagggtaggggtttttgatgtgttttgtttatagatgatttttaagtttttagaatagtgtttattatatagtagttgtttaataaatatttgttgaataagtgatatagtagaatagtttttaaatgtgggtttttttagtttatatattttataagtgtgtttttttttttaggtgagttattttttgtttttttttttagataagggtttgagagtaagttttttgtttgttttttatgttaagtattgtattttgtttttggggtggagttgagtattgggatttagtttatagtgaaataaatattatagttatatttataaatgaatatataataaaattttataaatataattatagaatagtaattttaaataattttatattgttttgggattattagtaggtttagtagttttatagtttattatggtattttggatttttgtaaggttaggatttgaggatttgattttgtatgatttgaggatttttattttgttaattattgtttttttgggaggagtagtttttatttttttttttgatgtatttggatttgggtttatgattttttggagggagtttttatgggggttttgtagtttttaaaagtagtaggggtatgattttagattaatagttttaggttgggttttggtatttggatttgtagaggaggttaggtagaggatggttgtgggaatatgggattttggtggttttttagtaggtatttatttgtgttttgtatttgttatttattatttttgttagttttaaggatgattatagtttttgattgaggagtttagagaagcgaagttatttttttaaagttttaatagtaggaagttgtaaagttaagatttaaatagtttttttattttatattttggagtagaggttttaaagatagggagggggtagaataaattttatttattttatttatttaagttgggttaggtttgtattttatgggggagggattggaaagggttagttttgaagtacgtttggattttgattattttgaacgttggtatttttgggtgataatattttttttttaggtttttagagaaagtagtggtggagagattaagtgaagtggtttgaggtaggtattggtgttaatattaggttttttttttttgtttttagtgattttagaagttttattattttatttatttttatatagatatagaagattgggtatggttaggagagtgagatgttagaaatttttttattaaagaattagtttttggggtatgtgtgggttttttgtgtatttaaattaagtttgttaaatagttttttgagttatcgggattttagggtattttgtataggtaattgagagttgggttttgaggagggtaatttaggtatttggttagggttgggtttatagacggttttgggagttgagggtagagggagtgaaggtaaagggaatggaatttagtaattttgtggtttggtataaagtttttttgttttttttgagttttagtttttttatataagtttatttatattatataggtttatttttagtaggaattagtagagtattttttagtttgtgagagttaggaggggtcgatagttaggggaagagaggagaggattggagtgagggtttatttacggttttgagtagtcgtcgggtttttttatgagtagggcggggtagtttttaatgtttggtagaatttggttgtatgtgttagttttgagttagtagtgtttattttgtttaagaattttgggttagggaggaggttgtagtttttatgtttgtgttaggggtagaggagggattttgtgaggtgggtttggagtatgtaaaggaagagtttggttgtatttttatatggtatatagataaagggaaagaagaggtttttaggtaatgttttggtttggggtttggggttagagttgggagatgatgtkvntatataggaatgatgattgagatgaagttatgtttatttttggtgttagagttttattgtgacgttgtttaggaagaggaggggggtttgaggaggtttgatttgttgagtataggggtttgtaggttttaggagtattagaggtgtaagtggtaggttttaaggtttgaggaggttttagagggtagagaaggggatttttttttttatttattttttgtatggaggtttagagtgatgtttgttagtatgaatttgtttattttttagtaaatatggtgtgtggttttgggtagaaagggaaattaaggaaggaattgataggtttgtttaggggggggttgtttcgtattgtaggatagtattggagttgagtgttaggtaaggggtgaagtnnntttgtggagagggggtatgtagagtaggggggttttttaaagttagaagttttgatttatttttaatttttagaattagaagattgttttttagttgttttatattttttatttaaggttatttagggttaagaagaggagggattggggtgagttagtttttttttcgtagagttgggtttattagttttgtttgaatttttatattggttttattagtttaggaggtttggntggttttttgggaggttttttgggnttttttgatattaagagtttagtttttttaagggattttttaaaggggtggtgggtaataggatttagggatttttttaggttgttggtgggaggggtttttgggtaatttataaagggggttttttgggttttaagagttagggggtgggtttgtatagggattttgtttagatagttttttggaggttatttgaagaagggattttggggatttttttttcggttgtatggatcgttggggttttgagatatgagtggtttaaaagtgaaattcgtgtatttgtttgttttttttttttatatttttaatattttattaaaggtatttttggggttagaaattttttagcgannnngaaaggggattttttttcgataaggtttaggtattgttttttgaagattttttaatcgtgttcgtgtatttatttcgtagaagggaatgcgaattgggagttgcggttggaattggaacgtcgcgtttttttagcgtagtagttcggtgggcgtcggattttatacgatttttttttcgggatgacgtcggattttttttagtattatttcgattttagcgaggcgttttataatagggcgtggggttcggtcgttcgcggtaatgatagggttcgcggttcgtgggtggcggcggcggaggaagttggaggaatttggttatttttggtcggggcgcgttcgttggttcgggttagggttggttagttttttcgggtttttagttttgttttttttttcgcgtttttagaagggggcggggagagacgagggttggcgggtttagggggcgggggcgtagggtagcgggggcggggcggtgtttcgggattattttcggtttttttttatcgcggtttatttaggtttttgtatcgtatttcgttcggattttaggtcgtcggtgttgtcgttatttaagtgagtttcgcggtgtttttttcgtcgcgtcgttcgtcgggtatggattcgggtcgggattttttgattttgtacggtgagtgtttggttcgcgcgagcgggagattttgtaggggtggatttttggaaagttgtttcgggttttggatagggagtttttagttttttcggtcgtttttatattatttcgggttcgtttttttgtttttttttcggattgggaaaattttagttcgcggttttttgggtgggattgtcgggtacgattttgggcgtgttttcgtttgttttagatttagttcggggggtgggtgggcgggcggtattagttttaagattttttttcgtttcgcggatttttttgttttggttatgaaagtttgggttttacgatttcgttcgtacggaggggcggcgaaggaaggaaatagtatttaagaacgattaaaattttttttgttttattcgggttttttagaggttttttaaagtttgggcgtgtttgggatttttaggtcgcgcgggtgtggcggagtaggggttaagcgggtggggagaggaggtgtgtaaggttaatcgtggtcgggtcgtgtagttttaattgtttagcgtagaatagttagcgatgttaggttgaaagaagtagtacgatttttttatttgcgattttttcgggggatagggttaggttttagtcgagttgtttgttttattttttgtttagcggagttttgttttttttaatatgagttagttttttgttttttcgttgtttttttagtagcgaggggtttgggttttcgaaggtagatttggaggttttttgggaggcgggaggttgggagggtaattttgggcgtttttttgttttagataggtatttatttatttttggtggggtttgtttttttgtttttttaggttatttgttattttagtaaattttgttttttttatattaattattgttttattgtatattttttttttttttagtatttttggggttggaggttttagtggttattatttatttatttaaattgtttatggatataatagatgggaaagagaagggtagagttttttagttttttattagagtttttttggaatttagagggatttagagatgtttttattagttagtttttagtttatttcgtgttttgtagttggtatagatttggtttttttggtttagagagatttttntttgtgtttagagttgtngtttttatattaatagtttaggttttttaaagttattttgtttagatgagttatggagtttttgttttttttagtgtntttttttttttttttaggttagaggtgtttttcgtgcgtttgttagattagtaagaagggaggttggttagttgagaggatatagtggatatttttgttttttttttgatatagcgttattttttggtttttgttggaataggttttatttttagtgtttgtgtttttgtttagttttttttttgaggtagttttgatattttttttatggaggaagatatatggaggtttagttaggattttttagttttgtggtataggtttggttgttttggtttattttatttgagattagttttttanatgtttaatttagtttagttttttttgaagggttgatatgaatattgtgattttaagttgttttttttgaagttttgttatttttagtttattatttaaaattattttaattgttttttgtttatattgtaaattagatggggaaataagaatttgttaaggagaattgttggtgggagggggtgattattgtgttttgtgttgttttaggttgtttatatttgtattggagagtttgtattcgttttatagtgtggngtttttagtattggatgtgttgtaggattatattttttggtttagggttttatattttttggaaggagttagagggattttttttattggtttggggagttatgcggtttatttagatgtgatatgttttttttgtttttattttagatgtatgtagaagtaatgtagtttattggtatagattttgaaagtaaagtatttgagtttaagttttggtttttttattttagatgaattttttgatttttttgtgtgttagtttttttatttgtaaaatgggggataatattatttattttatagggttgttacgaagattgaatgagataatatttatatagtagttagaatagtgtttggtatttagtgagtattatgtttttgtaggaggttttttttttaaatttttatgttttatgagttgttatttatagttttttgggagatgatgggggtattataaggtagtttttagttatggaaaatagggttagaattagatttaagagcgagttagttagttttttttagtgtttttgaagtttttagattgatgcgatagtatttatttttttttttttattttattttttttattttttattttgttatgtttggattggtttttttagtaggtttttcgatgtgttttaaaggatattattttttagggttttttttttattgaatattttttatatatatattaattttttttatatttaattttttttgtttttatttttgtaagaggtgttatttgtaaaaatagaaaataggaggttttattttggtttagtagatttgggttttagttttagttttggttttatttattgtgggtttgagaattatttatgggatagtagtatatattttatagtgggtgttgtgaatataaattttaatgggtatagaaattttaggttgttttaaaaattagttttttaagagatgatgattttagagtttttagtaagttggggtggttagttttttatttatttgtgttttaaagtagtttgtttttggtttttaggtttatgttatataggtatatattgatttatattaattttaattttttgtgttatagattattttggtagttaggtgaagtttgtagatttttttttaggattatgtttttatttatttatttgtttatttatttatgagatagaattttattgttatttaggttggagtgtagtttgcgttatttcggtttatcgaaatttttattttcgggtttaagggattgttttgttttagttttttaagtagttgggattatagggtcggtcgttacgttcggttaatttttgtatttttagtagagacggggtttttttatgttggttaggttggtttcgaatttttgattttaagtgatttttttattttggttttttaaagtgttgggattataggtgtgagttattgcgttcggttaggattatgtttttaaatatagaaaataaaatatataagaatttaaaggaagttaattattttgagatgttattttatttataggtttttgaggggtttttggtttggttaagaatttttgcgtagtttttttataatataggttttttttgtattttgtttttttttnntaaagaatagttttttcgtgtttatattttagtttatttattttgtttatttatttattttgtttatgatttattttttttgatatgattttaggtaagttattttgcgttttagttttttgttattattgttgtgtttgtttgtgttaataattggttttgtagtgaatttattgttaatgttggtgattggagttgtagtgaagcgaattgggggaattatttagaggttgagagtaagagttaggtttttgggtggtgttttgatattggtatatagtaggggtttaataaataattattgggtgaatgaaagggaagttgtgatgtatatgaaaggatttattgttttcgagtatattggtagtaaagttttgtgtaaagttatagtcgtttttatgtatttatgaaagttattttgggttaatgggtttattttaagattagaatttttttaagaatttcgtttgtattcgttattttggggattattattttggtggttaaatcgagagaagtaaataggtttatttgaggtttataaatgaggtaaatagtaagttgagtcgtaatgaattagttgagtaattgaagtaaaatatttggggggggttcggtgtttggtttaggttttattttcggtttcgtttgatttcgttttatttaggttttcgttagattgtcgtttatttttattgggattttttttagtttttttttttagatttaagttttcggttttgcgttagttttaaaggtggcgttagaattcgtcgtttcggttttttggttagatttcgtttatattgtttttcggattttggtttcgttttcgtatcgtttttaaagtcgagggatcgtttttttttgtttggatatcgtttttttagtgcgggatttttttaggttcgttttttgggttttggtttcgttttcgggttgttttttgggtatggttttgtttttacgtcgtttttggagtagaggttttcggtttgagtttcgtttttgagtttggtttttttttcgtttcgttgttttggttttggtttttgtttttaggtttcgatatagatttgttttttgggttatggatttgttttatttcgttttcgcggggttcggtattttttcggtttcgttttttgggttttggatttatttttatttttatttacgtttcgatattattttcgttttatttttaggggtcgttagttttatttttttttggatggttagttttttggggtttgattttgttttttttagtttagatttttttttcgtttcgttttttgtattttgattttttttatttatttattttgtttcggtttcgttttcgttttatttttagggggtataggtttcgtcgttcgtggattagtttcgttttttagcgtttgattatttttttagtttagatttttttttcgtttcgttttttcgaagtgcgttttttttttcgaattttagttttttttttttatttttggatttcgtttttgtttttttttaagggcgatagtttcgtttttcggattagagtagagggtgttgtgagtataaaatattggaggcggtattgtttcggattcggtttcgcgtaggtaggggtattgtggagggttatgtagtgtttggggattcggagtcggagtcgttttagggagttttatttgtaggagcggagttttaaggtggcggcgtttaatggacggaggttgggtaaggggcgtagagtatttcgagatttgcgggggaatgggaaggtagttggagtaggacgtcgattatttgttttttaaacgcggggttatttgttttggagtttttaattggatatgtttagtatttttgtgagtgtgtggtttattgtggggtagtgtttgtagtggtagtacgtcggggtgagtattagggtgattagttatttttttttattatttaatttagttntttaacgttttttattttttgttattcgacgtttttttgttataaatttttgaggtatcgtgtatgtggtttggtttgtgtaattaatgaggtgatttgtaagagtttgtgttttaatatgattttgtgtaaaagtgtgtttgtatgtgatgggtgtgatagtggtgatttakttatgggatttagtgtcgattgagtagttttgttatgtttggggtttgtggtggggttattgtatagtgtgtaatgatggtgatggtgtgtaatgttgtgaaataaagtgtgtgatattgtggtattgaggtggttgtttgtaatttagtgtgatagcgtgtgatttgttgtgatattgtttaattgagtgtgattgtataattaatgtgatagtgggtgatttagggtgattgagtggttttgttattttattatggtgtgtgtgttatatggattttttgatgtttttattttgtggtagtatgtttttttatagtggttgcgtaaagttttatatcgttgattttgtggtaagttatttgtttttgagttttgattttattatgtaatttttttgagttttagtttttttttgtgtaaaataggaataatgatagtgttttttttagagggttattgagagaattaagtgtatgtgttaagaatagtattttatttaaatattaattattattatgggagtytttattattattattatgatgttttggtattatatgttggtgtggttatgtatgattaagtgtgatattgtgtaattttttgtgatagtgtgtaattttggggggtagtgtgttattgtgtgtggtttattgtttttttgaggttgtgtgagtggtggtttagggtgtgattgtgtatttgtgtggttatatttgtgtagttgtgtatcgttgtgggttttaggtttagtgtgtttttattatgtattatttttggtataggaataggatttttggtattttttttagttttttattggtatttgtaatattttgtatgttttattatatggttattttattgtgtatagttagtttgggtaggttgtaaggttaatttagggttagtttaaagttttttcgttacgatttttttataggaggagaagtttttagattgatgtaaaagtaattatagtttttgttattgaaagtttttgttattatttttaatagtaaaaatcgtgattatttttgtattaaattaatattatgattgggttgagtagggttgggtgaggggtgtatagattttttgggtgttaagggagtaagggtggtggggtaggaagtttagaagttttgggaatagaagggttttaaatgaggttaagagatggagtatttgttmmggttttttaatggtttagagggttgtggttattatttttttggaattattattttggaattgatgtttattttttagaaattattgttggtagttgggggtttatttttgtttgattgtagataggttatagtttggttttaggataggatgagtatgttatttttttatggtgttttttagaataggagggtggtgtttaatttttattttttggtttttagttttatttttatatatgttgttggtagtggtttgttttgatgtatgtttagtttgtggggtggggtgttggtagagggtaaggagatgttttttttagttttagagggatattagttttagaagggatagtggaattttcgttagakncggagtggttttcgtttttttggtagtttgggaattttttttttgtttttttttgttttakgtttttcgagatatagttagtagttgggaatattttattagagttttttttttttttattgggattttttttggttaagagggagttgtttacgttaaggtataatagtttattaagtgggtggatagatttgggagaaaggtggaggaaggttatattagattgttatttttgaggaggtttagggatgttttttttatattgtttttagtttagtgttgatggggggataaaagtagagagagggaagggagttgtttaaagttataggggggtggatgttagtattgatttttattttgattggaagtaggagattggggaaggataaagagtgtgtgagtaattgaagtttggggaagtggtttagagggttttgtgagttttgaagatatgtgggataggttggttgggggaggggatatggataaaatgggagaggttatttgttgttggggatttgggtttagaaaagaaaaggtttgtgttttatgagggttttttatataggtttaggtttaagatttttagattagatttttgaagtttttgaggttgttattgtgttggagtagtaggatagagattgttgatgkgttvtvttagttttagggagagaagtgaagtggtcgattgtttttaatagagttggttgttggattatgtacgtggttagggtgatatacgtatatatacgtttttatagatgtttttatattatattagtgggttattaagggttggggttatttttattaattttattagttggtatagaatttgttgggtggtgaaggttttggcgtttttttggtgttttttgtttgggtttggtaggattgagggtatcgtatttttgggagtttatatttttgagagtagtaaaagaktggggtaggattggggtaagtagttaggtttttttttttgggttttgggataggatttgtttagtttcggaaagggatgtattgtgttttaaagttgttgtattttgaggggtttagattttgggtattttgagatggggttggggtagcgaaggatagggttattttagtagattaaatataggttatagtgtatttatttgtttttttttggggtaaagattagagattatttatgtgggtttaagttagaggtgggggggatagtaagggtaagggtggtagagatgggtataggrkttttataghaattataatgttgatattaagaattttaattgttattatttcggrrmawgtatagatttaggtattattttattgaatttagaatttttttttgaggtggttgttgttattatttttattttatagataggaaagtagaggtttagtagtatgaagttttttgtttaggttatatagttcgttgggaagggtatttaaatttaggtataatgattttggagttattggagttggacgttgttggttttatgacgttttgggtttatttgtgtttgttttttttttatttttttgtttgtttaattttttgattttagttttttttagtttattttgatttttaagtgtgattaggaggggtttatttaattttttaaaattattttttagaatattttttagggggttggttttttaggaattaggggtttttgaattagttgttttttttttgtttatttagttgtgggtggtacgttatagtgtgtaagtatggttttgggtgggtaggtgtttcgtttgtatggttattttagttggtaattagggatgattttttggaggagggtaggttttgggagtaggttggagtatgggtggaggagggaggagtaaatagagttgaggatgaggttggtgaaaagtgggttttgagagggtcgaggtggtatggttagtgtgaratttagggtattagggaaattagtggagaaggtggtattttattggttttgatttttagg

SEQ ID NO: 1468 - DNA, 14253 bp, Artificial Sequence
  chemically treated genomic DNA (Homo sapiens)
  unsure 2004, 3744, 5706..5707, 7331, 7589, 7892, 7970, 7988 <223> n is a or g orc or t
  unsure 9783..9784, 9786, 10141, 10166, 10400..10401, 10798, 13147: n is a or g or c or t
  unsure 13202..13203, 13366: n is a or g or c or t
tttggggattaaagttagtaagatgttattttttttattagtttttttgatgttttaggtyttatattggttatgttatttcgatttttttagagtttattttttattagttttatttttagttttgtttattttttttttttttatttatgttttaatttgtttttagagtttgtttttttttaggaagttatttttgattgttagttaaggtgattatgtaaacgggatatttgtttatttaagattatatttatatattgtgacgtgttatttatagttgaatgaataaaagaaaggtagttaatttaagaatttttggtttttagaggattagttttttaagaaatgttttgaaagatggttttgaaagattaggtgagttttttttggttatatttaggagttagagtgaattgaaggaagttgggattaaaaggttaggtaaatagggagataaaaggggggtagatatagatggatttagagcgttatggagttaataacgtttaattttaatagttttagaattattgtgtttaggtttaggtgttttttttaacgagttgtgtgatttgggtaagggattttatgttgttgggtttttgtttttttgtttatgaaatggagataataatagtaattattttaaagggaagttttaggtttaatgagatgatgtttgaatttgtgtwtkyytcgagataatggtagttggggtttttggtgttaatattgtggttdttgtgggamytttatgtttatttttgttatttttatttttgttgttttttttatttttgatttgagtttatatgagtgatttttgatttttgttttaagaagagatagatgagtgtattgtagtttgtgtttggtttgttgggatggttttgtttttcgttgttttagttttattttagagtgtttagggtttggattttttaggatatagtagttttaaggtatagtgtattttttttcgaagttgagtaggttttgttttagagtttagagagaggaatttggttgtttgttttagttttgttttamttttttgttgtttttagaggtgtgggtttttaaagatgcgatgtttttagttttattaggtttagataggaggtattaaaaggacgttagagtttttattatttagtaggttttgtattaattgataaagttgataaaagtgattttaatttttagtaatttattggtgtaatatagaaatatttataagggcgtatgtgtgcgtgtattattttagttacgtatatagtttagtagttagttttattgagagtaatcggttattttatttttttttttagaattaababaatmtattagtaatttttgttttgttgttttagtatagtggtagttttagggattttaagggtttagtttgagggttttgagtttaagtttatgtgggaagtttttatgaagtataggtttttttttttttgagtttagatttttaataatagatggttttttttattttatttatatttttttttttagttagtttgttttatatatttttagggtttatagaattttttggattatttttttaggttttagttgtttatatattttttatttttttttagttttttgtttttaattaggatagaggttagtattaatatttatttttttatagttttaggtaatttttttttttttttttgtttttgtttttttattagtattgggttaagaatagtgtaggggaggtatttttgggtttttttaggggtgatagtttgatgtgatttttttttattttttttttaggtttgtttatttatttgatgagttgttgtgttttagcgtgagtagtttttttttagttaaggggagttttagtggaaaagaagggggttttgatagaatatttttaattattggttgtgtttcgaggagtmtgagataagaggaggtagaaagggagtttttaggttgttaagaggacgagggttatttcgnmtttggcgggaattttattattttttttaaggttgatgtttttttaaagttgagagggatatttttttattttttgttagtattttattttataagttgggtatatattagggtaagttattgttaatagtatgtatgggaatggagttgggagttaggaagtagaagttgagtattatttttttgttttggaaaatattatgaagagatgatatgtttattttgttttggagttaggttgtggtttatttatagttaggtagagataaatttttagttgttaataatggtttttaaaaggtggatattagttttagggtgataattttagaaaggtgatagttatagttttttggattattaggaaattkkggtaggtgttttattttttagttttatttggggtttttttgtttttaaagtttttggattttttgttttattatttttgtttttttagtatttagaaagtttgtgtattttttatttagttttatttaatttagttataatattagtttggtgtaaaagtaattacggtttttgttattgaaagtaatagtaaaaatttttaatagtaaaaattgtgattatttttgtattaatttaagagtttttttttttgtgggagggtcgtggcgaggagattttgagttgattttgggttgattttgtagtttgtttaggttagttgtgtatagtgaggtggttatgtggtggggtatatagggtgttgtaggtgttagtgggaagttgagggaggtgttaggagttttgtttttatattaagggtgatgtataataaagatatattgggtttgggatttatagcgatatatagttatatagatatggttatataaatatatagttatattttagattattatttatataattttaaagagataatgagttatatataatgatatattgttttttaaaattatatattgttatagggagttgtatagtgttatatttagttatgtatagttatattaatatatagtgttagagtattatgatgatgatgatagargtttttataataatagttaatatttaagtaagatattgtttttagtatatgtatttaatttttttaataattttttgaggaaggtattgttattatttttgttttatataagaggaaattgaggtttaaggaagttgtatggtggagttaggatttagaagtaggtagtttattatagggttagcggtatgaaattttacgtagttattgtgaagggatatattgttatagagtaagaatattagaaaatttatataatatatatattataatggaatgatagaattatttagttattttaggttatttattgttatattggttatatagttatatttagttgaatagtattataatagattatacgttgttatattgggttataagtagttattttagtgttataatgttatatattttgttttataatattatatattattattattattatatattgtatagtggttttattatagattttaggtatgatagaattatttagtcggtattgggttttataamtagattattattgttatatttattatatataggtatatttttgtataggattatattgaagtataaatttttgtagattattttattggttatatagattaggttatatatacggtgttttagaaatttgtaataggaaggcgtcgggtgataagggatggggagcgttgganggttgagttaaataatgagaaggggtaattaattattttagtatttatttcgacgtgttattattgtaaatattgttttatagtgggttatatatttatagaagtattaaatatgtttaattaaaggttttaaggtaaatggtttcgcgtttaagggataagtggtcggcgttttgttttagttgtttttttattttttcgtagatttcggagtgttttgcgttttttatttagttttcgtttattgagcgtcgttattttaaggtttcgtttttgtaggtagagttttttggagcggtttcggtttcggatttttaggtattgtatggttttttatagtgtttttgtttgcgcggagtcgggttcggggtagtgtcgtttttagtgttttatgtttataatattttttgttttggttcggggggcggaattgtcgtttttggaggggagtaggggcggagtttaggaatgggagggaggagttagagttcgagaggaggggcgtatttcggaggggcgggacgagagggaaatttgggttgagggggtagttagacgttaggaggcggagttagtttacgagcggcgggatttatgttttttgaaggtgaggcgagagcgaaatcgaggtaaagtaaatgagtggggggagttagaatataggaggcgggacgagaagaaaatttgggttaaggagggtagagttagattttaaaaggttggttatttaaagaggggtgggattaacgatttttggagatggggcgagagtggtgtcgaggcgtgggtggggatgggggtggatttagaatttaggaggcggggtcgaggaggtgtcgggtttcgcggaggcggagtgggataaatttataatttaggaagtaaatttgtgtcgaagtttgggggtaggggttagagttaaggtagcggggcgaaggaggggttaggtttagaggcggagtttaggtcgggagtttttgttttagaggcgacgtgggagtagagttatatttaggaagtagttcgggggcggggttagggtttaggaggcgagtttgggaggatttcgtattggaagggcggtgtttaggtagggaggggcggtttttcggttttggaggcggtgcgggggcggagttagggttcgggaggtagtgtgggcggggtttgattaaggagtcggagcggcgaattttaacgttatttttgaggttggcgtagaatcgaaggtttgagtttggggagaaaagttgaggggagttttagtggaggtggacggtagtttagcggggatttgagtggggcgaggttaggcgggatcggggatggagtttgggttagatatcgagttttttttaagtattttattttaattgtttaattaatttattgcgatttagtttgttgtttgttttatttgtgaattttaggtgggtttgtttgtttttttcggtttgattattaaagtgataatttttaaggtgacggatgtaaacgaaatttttgaaaaaattttgattttaaaataagtttattaatttagggtggtttttataaatatatgagaacgattgtaattttgtataaaattttgttgttaatatgttcgggaatagtgggtttttttatgtatattataattttttttttatttatttagtaattatttattgagtttttattgtgtgttaatgttaggatattatttagaggtttgatttttatttttagtttttgaatagtttttttagttcgttttattgtagttttagttattagtattgatagtgagtttattgtaaagttagttattggtatagataagtatagtagtaataataagaaattgaagcgtagagtaatttgtttaaggttatattagagagaataaattatgagtaaggtgagtagatggataaggtagatgagttgaaatatgaatacggaaaagttattttttgnngaggggaagtagagtgtaaagggagtttgtgttatggagaaattgcgtaggggtttttaattagattaaagattttttaagaatttgtagatagaataatattttaaaataattggttttttttgaatttttatgtattttattttttgtatttaaaaatatgattttggtcgggcgtagtggtttatatttgtaattttagtattttgggaggttaaggtaggaggattatttaaggttaggagttcgagattagtttggttaatatggagaaatttcgtttttgttaaaaatataaaaattagtcgggcgtggcggtcggttttgtaattttagttatttgggaggttgaggtaagataattttttgaattcgggagtggaggtttcggtaagtcgagatggcgtaaattgtattttagtttgggtgatagtgagattttgttttataaataaataaataaataaataaataaaaatataattttgagaaggggtttataggttttatttgattgttaaagtggtttgtggtataaaaagttaagattggtgtggattagtgtgtgtttgtgtagtatgggtttggaagttaggggtagattgttttggaatataggtgagtgaggagttggttattttaatttgttaagagttttggaattattattttttggaggattggtttttggggtaatttagaatttttatgtttattggggtttatgtttataatatttattgtgaaatatgtattgttattttatggatgatttttagatttatagtaagtagaattaaagttaggattggagtttaggtttattgggttaagatgaggttttttattttttgtttttataaatggtattttttgtaggggtgggggtaaaagggattgggtgtaggaaaagttagtgtgtatgtggggggtgtttagtgaggggagggttttgggaggtaatgttttttggggtatatcgggggatttgttagagaagttagtttaggtatagtagaataaagagtggaagaagtaaggtgaaggaaggaggatggatgttgtcgtattagtttgagggttttagaggtattagaaagagttggttggttcgtttttgaatttagttttggttttattttttatgattaggaattattttatgatgtttttattattttttaaagaattatagatggtaatttatagggtatagaaatttggggagggggttttttgtaggaatatagtatttattgggtattaggtattgttttaattgttgtgtagatattattttatttaattttcgtagtaattttatgaggtagatggtattattttttattttatagatgaggaaattgatatatagggaagttaagggatttatttgagatgagaaagttaagatttgaatttaggtattttgtttttagaatttatgttagtaaattatattatttttgtatgtatttggggtgaggatagaagggatatgttatatttaggtgagtcgtatagttttttaggttaatagaaggagtttttttggttttttttagagagtgtggagttttaggttagagagtgtggttttgtagtatatttagtgttgggggtnttatattgtgaaacggatgtagattttttaatgtaagtgtagataatttggaatagtatagggtatagtgattatttttttttattaataattttttttgataggtttttatttttttatttggtttgtagtgtggatagaaggtagttgaggtaattttgggtgatgagttagaagtggtagggttttagggaaaatagtttggggttatagtgtttatgttaattttttaggaaaggttggattgagttaggtatntgggaggttggttttaaatggggtgggttagggtagttaagtttatgttataggattgggaggttttgattgagtttttatgtgtttttttttatggaaaagatattaaggttgttttaggagagaaattggataaaggtatagatattgaggatgaagtttgttttaataggagttaaggaatgacgttgtgttagagagaaagtagagatgtttattgtgtttttttagttggttagtttttttttttgttagtttggtaggcgtacgaaagatatttttggtttgaagaaagaagagggngtattggaaggggtagggattttatgatttatttagataaggtggttttaaggagtttaggttattggtgtaaaagtnatagttttgggtataganaaaggtttttttgggttaggaggattaggtttgtgttaattgtagaatacgagatagattggaggttggttgatgggaatatttttaagtttttttaaattttagggggattttagtggaaggttagaggattttgttttttttttttttatttattatgtttatgaatagtttagatggatgggtggtggttattaaagtttttaattttaagggtattaaaaaagagagggatatatagtaaagtagtgattggtatgaaaggagtagggtttgttgagatggtaagtgatttgggagggtaggagggtaagttttattaagagtgagtgagtgtttgtttggagtaaagaggcgtttaaagttatttttttaatttttcgttttttagaaggtttttagatttgttttcgggagtttaggtttttcgttgttggagggatagcgaaagggtaaagagttggtttatattggaggaaataaagtttcgttggataaaggatggagtaggtagttcggttgagatttggttttgtttttcgaggaggtcgtagatgaggggatcgtgttgttttttttagtttagtatcgttgattattttgcgttgggtagttaaggttgtacggttcgattacggttaattttgtatattttttttttttattcgtttagtttttgtttcgttatattcgcgcggtttgagggttttaggtacgtttaggttttggggagtttttggggggttcggatggggtaaggagaattttggtcgtttttggatgttgtttttttttttcgtcgttttttcgtgcgagcgggatcgtggagtttagatttttatgattaggataagggggttcgcgaggcggagggaagttttaagattagtatcgttcgtttatttatttttcgggttagatttaggataagcgaggatacgtttagggtcgtgttcggtagttttatttagggagtcgcgggttgagatttttttagttcggagaaggggtagagaggcgggttcggggtggtgtggaggcggtcgaaggagttgggggttttttgtttagggttcggaatagttttttaggggtttatttttgtagggtttttcgttcgcgcgggttaggtatttatcgtgtagggttaggaagtttcggttcgagtttatgttcgacgggcggcgcggcgggaggggtatcgcgggatttatttgagtagcgatagtatcggcggtttggggttcgagcggagtgcggtgtagggatttgaatggatcgcggtgggaggaggtcgggggtggtttcgggatatcgtttcgttttcgttgttttgcgttttcgttttttgagttcgttaattttcgttttttttcgtttttttttggggacgcgagagggagggtagagttgggggttcggaggaattggttaattttggttcgggttagcgggcgcgtttcgattagaaatagttagatttttttagtttttttcgtcgtcgttatttacgggtcgcgggttttgttattatcgcgggcggtcgggttttacgttttgttgtggggcgtttcgttggggtcggggtgatgttggaaagaattcggcgttatttcggggaagggatcgtgtaaggttcgacgtttatcgggttgttgcgttagggagacgcggcgttttagttttagtcgtagtttttagttcgtatttttttttgcgaaatgggtgtacggatacgattagaaggtttttagagagtaatatttggattttgtcgggaggaggtttttttttnnnntcgttgggaggtttttaattttaagagtgtttttggtggagtgttgggggtgtgggagggggaagtaagtaggtgtacggattttatttttgagttatttatattttaaaattttagcgatttatgtagtcgaggggaggatttttagggttttttttttaggtggtttttaaggggttgtttgggtaaggtttttatgtagatttattttttaatttttgggatttagaaaattttttttataggttgtttagagattttttttattaataatttgggagggtttttagattttgttgtttattatttttttggagagttttttgggaaaattgggtttttggtgttagaggantttagagggttttttaggaagttanttaggttttttgggttgataaggttaatgtgagagtttaggtaaagttagtggatttagttttgcggggagggggttggtttattttaattttttttttttttggttttaggtggttttgaataagggatgtgaaatagttgaaggatagttttttggttttgggggttaaaagtggattaggatttttggttttggagagtttttttgttttgtatgttttttttttataagnnngttttattttttatttggtatttagttttaatattgttttgtagtgcgaaataatttttttttgggtaggtttgttagttttttttttggtttttttttttgtttagggttatatattatgtttgttgagggatgagtaaatttatattggtaggtattattttggatttttatataggggatgagtggggaagaaggtttttttttttgttttttggagtttttttaggttttggagtttattatttgtatttttgatatttttggagtttgtaagtttttgtatttagtaaattaggtttttttaagttttttttttttttttaggtagcgttatagtgaaattttgatattaggagtggatatggttttattttagttattatttttatgtanbmatattattttttaattttgattttaggttttaagttaggatattatttgggagttttttttttttttttgtttatgtattatgtggggatgtagttaggttttttttttgtatgttttaaatttattttatagaattttttttttgtttttggtatagatataggagttgtagttttttttttagtttagggtttttgggtaggatgggtattgttgatttagagttggtatatgtaattaggttttgttagatattgagggttgtttcgttttgtttatagagaaattcggcggttgtttagagtcgtgggtgagtttttattttagtttttttttttttttttttggttatcggttttttttggtttttataggttgggaggtgttttgttggtttttgttaggggtaagtttgtgtggtatgagtgaatttgtgtggaggggttggagtttagaggaggtaaagaggttttgtattaagttataaagttgttggattttattttttttgtttttattttttttgtttttaatttttagggtcgtttgtgggtttagttttggttaggtgtttaaattattttttttaaaatttagtttttagttgtttgtgtaagatgttttgagatttcggtgatttagagggttatttggtaggtttagtttgggtatatagagggtttatatatgttttaaagattagttttttaatgggggagtttttggtattttatttttttgattatgtttagttttttatgtttgtgtgaggatggatggggtgatggagtttttgggattattggagatagggaagagagatttagtgttggtattagtgtttgttttaagttattttatttggtttttttattattattttttttggaggtttgaggagggggtattattatttaagaatgttaacgtttaggatggttagggtttaagcgtgttttagggttggttttttttagttttttttttatgaaatgtaaatttagtttagtttgggtaggtgaggtgaatggggtttattttgttttttttttgtttttagagtttttgttttaggatatggggtgaaggggttgtttaaattttgattttgtagttttttgttgttaagattttggaaaagtgatttcgtttttttgagttttttaattaggagttataattatttttagaattggtagaagtaatggatggtaagtatagggtataaataagtatttgttagaaggttattagaattttatatttttatagttattttttgtttggttttttttatagatttaggtgttagagtttaatttgaggttgttggtttgaggttatgtttttgttgtttttgagggttgtaaaatttttataggagttttttttagagggttatgggtttaagtttagatgtattaggaggaaaagtgaaggttgttttttttaagggagtagtggttggtaaagtgagagtttttaggttatgtagggttagatttttaggttttgattttgtagggatttaggatgttatagtgaattatgaggttgttggatttgttggtagttttaggatagtatgggattatttggggttattattttataattatatttgtgggattttattgtgtatttatttgtgaatgtaattgtgatgtttattttattgtggattgagttttaatgtttagttttattttagaggtagaatatagtgtttggtatggggaatagataggaaatttgtttttagatttttatttgaaggaggaggtagagggtaatttatttgaaggaggaaatatatttatgggatgtgtgaattgaagagatttatatttgaaaattgttttgttatgttatttatttaataaatatttattgagtagttattgtgtagtgggtattgttttagaggtttgggagttatttgtgaataaaatatattaaaaatttttgtttttttggagtttaaattttaatggaaagaaaagagatattttaataaatgtaagaaatgaattgtataggatattagtagataataagtaaaatgaaaaaagtgggttaaagtagtttaggaatgggatagggttaatttttttttttttttttttttttttgagatggagtttcgttttgttgtttaggttggagtgtagtggtgtgattttagtttattgtagtttttgttttttaggttcgagtgatttttttgttttagttttttgagtagttgggattgtaggtgtgtggtattacgtttagttaatttttgtattttgaatagagacgggttttattatgttggttggggtgtttttgaatttttgattnaagcgatttattttatttgatagaattaaattttaaaagggttgattaggttggnnnttatgggaaaggtgatagttaagtaaagttttgatagaagtcgagggattcgagatatttagagatatttgggtagaagattttaggtataggaaatatattttgaagtaggagggtgttggtatgttggaggatgagtaaggaggataaggttaatgtggntggagttaagagagtaagagaacggggaagtggggcgggttgattatgggaggagaaagagaggtaatcgggattaagttttgttgggttttgtaataatttattttttatgattgggtacggttgtttacgtttgtaattttaatattttgggaggttgaggcggttggattatttgaggttaggagtttaagattaggttggttaatatggcgaaaattttgtttttattaaaaatatatatatatatatatatatatatatatatatatatatatataaaattagttgggagtggtggtgggtgtttgtaattttagttatttgggaggttgaggtaggagaattatttgaatttaggaggaggaggttgtagtgagttgagattgttttattgtattttagtttgggcgatggagtaagattttgttttaaataataataataataataaaaaagaatataatttggttgggtgtagtggtttatatttgtaattttagtattttgggaggtttgaggtggttggattgtttgaggttggaagtttaagattagtttgattaatatggtgaaatttcgtttttattaaaaatataaaattagtcggtcgtggtgtatatgtttgtaattttagttacgtgggaggttgaggtaggggaatcgtttgaatttaggagacggaggttgcggtgagtcgagattgcgttattgtattttagtttgggtaataaaagtaaattttgttttaaaaaaaaaaaaaaaaatttaatttttattttgggcgaaattgggagtatttgtaaggttttaagttagggaggggtatgatttgattaatgtaaaagaattttttgagtgttggaagttattacggagggataagg

SEQ ID NO: 1469 - DNA, 6285 bp, Artificial Sequence
  chemically treated genomic DNA (Homo sapiens)
atttgtttgaattcgggaggtagaggttgtagtgaatcgagattgcgttattgtattttagttaggacgataagagtaaaaaaaaaaaaaaaaaaaaatggtttaaagaaaaaggataatgttttatatatggattaaattagatattgtaagattataaatttgtatttttttaatgtgaaaagggttttattgagttatatttgtatattatgttttcgatatttatttaaggttattataaggaataaatgaaaacggtattagtatttgttattaattagttgagaatattttttattattttaattaaataagtatttaggtgagaaattttttttataatttaattttagaaattttttttattttaaagaattagttaatagaatagaaagtgttattgttttggttattaggaagtttagttatgtttaatttttaattatattagttatattaatttataaattatattatcgtttttttttttataattttattttttatttttatattttattttttatttttaagtatttaaaatatttttaaagggttgaaaaagaatatatttgtggtagatatagtaacgtgttatttagattttttttaaagaaggatttgttgatttaattattgggagagttgttagtagaaaatttttagttgttagtttttcgaagattattttggttgtagagtgttatttggtttaggttaggttttttttaggatattataatttttttttaggttagtgttagataatagagattttgggagttggttgagattgttattaggtttgtattttagtttagttttttttgtgtttatttttgtttttttttagtattttttagagtgttgattttagggttattttttaataaatatattgtatattaatttgttatagagtttatatttaaagaatttaatttgtgatagtattaaattaaaagagatttaggaggttgaggtaggattgtttgaattcgggaggcggagattgtagtgagttaagattgtgttattgtacgttagtttgggcgacgagagagaaattttgttttaaaaaaaaaaaaaaaaaaagagagaaaatatattaggtaggggtattttataaaggagagaggatatataataaagtgtttatatatatatgggaagtaaaatagtattgattttggggttagattatttgggtttgaattttgttttttagttttgtgttttagtttttttatttggaaaatggggataataagagtatttatagggttgtaatgaggaagaaatgagataatgtggataaagtagttttatagtgtttattatatgttaattattgttttaagtggttatttaataaatagttgtgaggttaaatttataggtttcgaggggtagttgggttgggattttttttagattttgggtatgggtataggtatagtgtaggttagggtatgttgaagtatgtatgtttatagaaataggtttgagtagggttagtatgggtgacgttataggcgtgtgtttgtgtgggtgttgggttgttttttttagatagcgtagttgtacgtattgttatttatatttacgtatttatatatatgttgagttgggggaagtttatatagattatattttttgtatgttttgttttttttgtattttttttggtggaaggaggtatttgaggtttgggatgttggtttagaagttttaggaggaaatgggttttgttttttgattataggtttggtaacgggttgaaaatttaagtttttgttggtagggattttttgagtttttagaggtttagatttagaggtaaaagtaaaagtaaggaagttttattttgtatgttaggaagtttttaaaaaaatggagaaacggatgtaaaaagtgtattagagtttataggttgtcggagttagtatagtaagtttaatgagggttgtagtatttaagagggtgttttttgtataaaataggattagatagttagagaggggttttatttagttttcgtttgtttttttggttttattattttttgttttttttttagttaggaaattttagttttgtaattttaaatttaataatttttttttggttttagggtttttgtatatgttgttatttttatttggaatgtatttttttttaatttatttttaataatttatttcgttatcgatttattttttttagatttttgttgaggtttgaagagatttcgatttaatgtttttttttttagtttttattataattgtttttatgtaatagagtgtttatttaatgtttgaatttttagagagttggcgttgtgttttttttgtgttttttatgttgttaatgtttaatatagagaagagtagggtttatagaattttaagtttaagttagtttaagttatattttgtgagtatttacgttttgttggattttttgtgtttaaggttagcggtgagtatgtttttttttatttatgttgattaattagatagtttttatgtttattgattattgattattaggatttatttaagttagtggattttttgtgaggtagaaaatttatggagttaggtcgatttgggttttagtttttatttagttatgttatgtggttttggggtaaattgtagaatttttttgaatttttgtttttttattagtaaattgtggattattatttttgattagaagataattatgaggattaggtgtgattataggtgtatatttttagtatagggtttacgttagtttcgtttcgtttacgtaaagatttgttattaggtggtagtttattttagttattttatcgttttttattttatagaggttggttaggataaagggttttaatgttatgttgaattttgagttttttaggggacgtatttgaggaaattaacgttaatatataagtttttattatagtaagataaagttagaagtagtagttttaggttattatttagttgagtgggttgtttgagtatacgtttttataaattttagtttagttttattattttataatttttaggaagtttggttttttttttggtattagttggaagttttgttgggttttttatttttgaaatgtagtaagttgttttgttgtgtttggtagtcgatttattgtttggtttaatatgttagataggttttatcgcgatcgtgggtgtttttaattttggcggtgttgataagggtagatagattgtaggggtgagttttaagaatggttttagaaagataaagagtatgaattatattttataattagaaaaaggttttgtggttggagaatggagagtgaaggattatttgtgagagatgaaattggtgagatgggtaggttatatagaatttgttaggttaagtagggagtgtggattttaggtgtaatgggaatttacggagggttttagtttggatgtaggggattatgatttaattttattttaaagatttaaagtatgataaatttaggtaaaattaaattgatagatttaggtaaaattaaataaggtgagtagtttgggtgataggagatggggtttttagtttgtgggttgagtgataaggttttgatggattggaggtgaggtaaagggaggaattaaagttagttgtaaggtttttgattttttaatttagagaagtttagcgtcgcgttttgagaaagtgaagattgtggaaggaatcgtttggggagggaaggcgagttgtttaagggggggggatgtggaatatgtagtgggatgttggggtttggaacgtaggggagatgtaggtttggagttatcggtgtttgtgttgttgggtaaagttaggggaaaggttaggtcgttttgggatttggtttagtattgagtgtagaggaagagaagtttttgagatcgagaggtagcggttataggaggaggaagaaagtaaggcggggaaaattaaagtttaggagagtatttgtaggagggcgttgcggggtagggtttgagtcggagtttcgaatcggattcgagttttgtcgcgtggggacggagcgtgtagaggtttatgcgagggatagatataaaggttttgggagttgtaggttagattattggatagcgcggtcgcggatttaacgtttttgtaaggggtgtttacgtttggggggaatttttcgaaagagaggattattgaaagttattttggtagtaggggcggaatagatagacgtgggtttggtcgtcgttagaattgtttgcggattagtttcgcgttgtcgggggggcgggatatgtcggttgtttattagtgttcgcgattaattcgtaggtagtttcgttttcgtttttttcgggagagggcgcgcggaggattcgtcgtcgtcggtgtgaggcggttcgttttggtttttttgttcgggaagttcgtttaggtaattgagtttggtcgggtattttcggaggacgcgttatttttttacgtttcgtttcggtcgttgtatgggcggtgttcgggacgcgggggttgcgtttgtgcgggatcgcggggtagcggtcgttcgtgcgagtacgtttgattgacgcgtcggtcgtcgggtttgcggtttgtgggcggggttgtcgtgcgtgatagggtcgttcgtggtcgtcgggttgtgttcggggtcgcgtgagaaagttttgcgggattgagggttgggtgggtcgatcgggaacggcgcgcgttttcgtcgttatcgcgttttcgttttcgtttgcggtttgtttgggggtcgcggggcgtaggcgcggcgggtcgacgggcgggggttttttttacgggtgcgcgggcgtttttgttttcggcgtcgaagcggggtggggttttagggtagtttcgtttcgtcgcgttgaggtttcgtttcgtgttcgtttgtaggagtcgtcgtcgggtttcgttcgtttgtcgttttagttttagttttaattttagtcgtcgtcgttgcgtttgttttcgggcggttttggtttgtgtcgtcgtcgtttttagcgtcggagttatggcgggcgtcgcgtttttttgcgttaacggttgcgggttcggcgcgttttcggacgtcgaggtgttgtatttttgtcgtagtttcgaggtgggtatcgttatgattttgttttattttaagaagtcgtagcgattcgagcggaagattttttaggttaagttggagacgcgttagattacgtggagtcggggcgtcgataagatcgagggggttagtaagtgcgtttattttttgtttgggttcgtttcgcgcgggggtcgtgggagttcggttcgattgtttgtatttcggtcggtcgttttagcgatttgggtaaattttcgggtttttttagatttttttcgggtttcgttttcgtttcgtttcgggtggttattgggggcggggggtattcgggttttcggttatttgataggatatttttttttttttagttggggggagtgttttaggcgttttgttttgaggtttaaaaattttcgcgggttggagatttgcggtgtaggtatcgggttttttagattttgggagtggtggcggcgtcggcgaggggagttaaggtagtggtttttattttgtacgggaatttggggtttgattagacggttttcgtttattttttatttagaaagagtagtttgtgaaatttttcgggtttttaggttgggtttttatttgtaaaggaatttttgggttttttaagtagaatttaggtagatgttgggtagggttggttttggagtagagttgggtttatttatttttttttgggggagagggaggaaggtggttttgtttggtttggagaagtttgagagaagttagtggttggaatttttttttttttttttttgttatttttgttttaaagttgggttttggaggtttatgtgggtgggtagatatttaatgttagggtagggattttttttgttttgggaagtacgtttttaggagatgggttttataaaggtttgttttagcgttttggagttaggtattttttttaggagtgtagttagtttgtgagtttagttttttgttttttgttcggtggttttagggagcgggagcggttttttttagttttttgttttttcgtttttttaggtttgagtttggttgtttttgcgttggtttttagtgggaggagggagttgggggattttgaaaaattttagatttttgagagttgttttatttagcgcgtgttt

SEQ ID NO: 1470 - DNA, 6285 bp, Artificial Sequence
  chemically treated genomic DNA (Homo sapiens)
aggtacgcgttaagtggaataatttttaaagatttggggttttttaaaattttttaattttttttttttattagagattagcgtaaaagtagttaagtttaggtttgggaaggcgaaaaggtaggaaattaagagaagtcgttttcgttttttgaagttatcggatagaggataaagggttagatttataaattagttgtatttttgagaagaatatttgattttaaggcgttggggtaggtttttatggggtttattttttgggaacgtgttttttagggtaaggggagtttttgttttggtattgagtgtttgtttatttatataggtttttaaaatttagttttgggataaaagtagtagaaaaaaaaaaaaaaaaattttagttattggttttttttaggtttttttaaattaaataagattattttttttttttttttttagagggagatgagtaggtttagttttgttttaagattagttttatttaatatttgtttaagttttatttagggaatttaaagatttttttgtaaataagagtttagtttgggggttcggagagttttatagattgttttttttggataaagagtgggcggggatcgtttggttaggttttaggttttcgtgtagggtgggggttattgttttagtttttttcgtcgacgtcgttattatttttagggtttggggggttcgatgtttgtatcgtaggtttttagttcgcgaggatttttaggttttagggtaaagcgtttggaatattttttttagttgggggagggggggtgttttgttaggtgatcgaggattcggatgtttttcgtttttagtgattattcgagacgaagcgggggcggggttcggagggagtttgggagggttcgaaagtttgtttaagtcgttggggcggtcggtcggggtgtaagtagtcgggtcgggtttttacgattttcgcgcggggcgggtttaggtaggaagtgggcgtatttattggttttttcgattttgtcggcgtttcggttttacgtgatttggcgcgtttttagtttgatttggaaggtttttcgttcgggtcgttgcgattttttggagtagaataaagttatgacggtgtttatttcgaggttgcggtagaggtgtagtatttcggcgttcgagggcgcgtcgggttcgtagtcgttggcgtaaggggacgcggcgttcgttatggtttcgacgttgggggcggcggcggtataggttaggatcgttcgggagtaagcgtaacggcggcggttgaggttggggttgaggttgaggcggtagacgagcgggattcggcggcggtttttgtaggcggatacggggcggggttttagcgcggcggggcggggttgttttgaggttttatttcgtttcggcgtcgggaataaaggcgttcgcgtattcgtggggaggattttcgttcgtcggttcgtcgcgtttgcgtttcgcgatttttagataggtcgtaggcggggacggaggcgcgatggcggcgggagcgcgcgtcgttttcggtcgatttatttagtttttagtttcgtagagtttttttacgcggtttcggatatagttcggcggttacgagcggttttgttacgtacggtagtttcgtttataggtcgtaggttcggcggtcggcgcgttagttaggcgtattcgtacgggcggtcgttatttcgcggtttcgtatagacgtagttttcgcgtttcgaatatcgtttatgtagcgatcgggacgggacgtgaggggatggcgcgtttttcgggaatgttcggttaaatttagttatttgggcgggtttttcggataagggagttaggacgggtcgttttatatcggcggcggcgggtttttcgcgcgttttttttcgggaggggcgggggcggggttgtttgcggattggtcgcgggtattgatggatagtcgatatgtttcgttttttcggtagcgcggggttggttcgtaggtagttttggcgacggttagatttacgtttgtttgtttcgtttttgttgttagggtggtttttagtggttttttttttcggagagttttttttaagcgtgagtattttttataggggcgttaggttcgcggtcgcgttgtttagtggtttgatttgtagtttttagggtttttgtgtttgtttttcgtatgggtttttgtacgtttcgtttttacgcgataggattcgagttcgattcggggtttcgatttagattttatttcgtagcgtttttttgtaaatgtttttttgaattttggtttttttcgttttgttttttttttttttttgtagtcgttgtttttcgattttagaagtttttttttttttgtatttagtgttaggttagattttaaggcgatttgattttttttttggttttgtttaataatataggtatcggtgattttaaatttgtattttttttacgttttaggttttagtattttattgtatgttttatattttttttttttagatagttcgttttttttttttaaacgattttttttatagtttttatttttttagaacgcggcgttaaatttttttaagttggaaggttaaaaattttgtagttaattttgatttttttttttgttttatttttaatttattaagattttgttatttagtttataagttgaaggttttattttttgttatttagattatttattttgtttggttttgtttggatttattagtttggttttgtttggatttattatgttttaaatttttaaaatgaaattaaattatgattttttatatttaggttaaaatttttcgtgaatttttattgtatttaaaatttatattttttgtttggtttagtaggttttatatgatttgtttattttattagttttattttttataagtgattttttattttttattttttagttataaggtttttttttggttatggaatataatttatattttttgtttttttgaagttatttttgaaatttatttttgtaatttatttatttttgttagtatcgttaaaattgaggatatttacggtcgcggtggagtttgtttgatatgttgagttaggtagtgggtcggttgttaggtatagtaggataatttattgtattttagaggtgagaagtttaatagagtttttagttgatgttagagaaagagttaggttttttgggaattgtgagatagtaggattagattagagtttgtaagagcgtgtgtttaggtaatttatttagttggatagtgatttggggttgttgtttttgattttgttttgttgtagtggaaatttgtgtgttaacgttgatttttttaagtgcgttttttaagaagtttagaatttagtatgatattgagattttttgttttagttagtttttgtggagtaaggagcggtggggtagttgagatggattgttatttagtggtaggtttttacgtgggcgggacggagttagcgtagattttgtgttgaaggtgtgtatttgtggttatatttgatttttataattattttttaattaggaatgatggtttataatttattgatgaggaaatagagatttagagaagttttataatttgttttaaagttatataatatgattaggtgggaattagaatttaagtcggtttgattttatgagttttttgttttataggagatttattggtttaggtaagttttggtggttagtagttagtgggtatggaggttatttggttaattagtatgggtgaggggaggtatgtttatcgttggttttgggtatagggaatttagtagaacgtgagtgtttatagagtgtggtttgaattggtttaggtttgaagttttgtggattttgtttttttttgtgttgggtattgataatatgaggagtataagagagatatagcgttagttttttgggagtttagatattaaataaatattttgttatataaagataattatgatgagggttagaaggaaaaatattgggtcgagatttttttagattttagtagaggtttaaaggaagtgagtcgatggcgaggtgaattattaaaggtgggttggagaaaagtatattttaagtagaggtaatagtatgtataaaggttttgaggttaggaagaggttgttgaatttagggttataaagttagagttttttgattgaggaggggatagggagtgatgagattaggaaggtagacgggggttgaatggggtttttttttggttgtttgattttgttttgtataggaggtatttttttaagtgttgtagtttttattgagtttattgtgttgatttcggtagtttgtgggttttgatgtattttttatattcgtttttttatttttttgggagttttttaatatgtagggtaaggtttttttgtttttatttttgtttttgggtttggatttttaggggtttaagaaatttttgttaataagagtttgagtttttagttcgttgttaggtttgtaattagggaataggatttatttttttttgggatttttgggttagtattttaggttttaggtgtttttttttattaaaggaggtgtaggaaaaatagggtatgtagagggtgtggtttgtgtgggttttttttagtttagtatatatatgggtgcgtgggtgtgaatggtaatacgtgtagttgcgttgtttgggaggagtagtttagtatttatataagtatacgtttgtgacgttatttatgttagttttgtttaggtttatttttgtgaatatgtatgttttagtatgttttggtttatattgtatttgtgtttatgtttagagtttggggagagttttagtttaattgtttttcgggatttgtgggtttggttttatagttgtttattaaatgattatttagaatagtggttgatatatagtaaatattatggaattgttttatttatattgttttattttttttttattatagttttataagtgtttttattatttttattttttagatgaaaaaattgaggtatagagttaaaaggtaggatttaaatttaggtagtttggttttagagttagtgttgttttgttttttatgtatgtatgaatattttattgtatatttttttttttttgtaaaatatttttatttgatatgttttttttttttttttttttttttttttgagatagagtttttttttcgtcgtttaggttggcgtgtaatggtataattttggtttattgtaattttcgtttttcgagtttaagtagttttgttttagttttttgagttttttttgatttggtgttgttataggttgggttttttggatgtggattttgtgataggttagtgtgtagtatgtttattggggagtggttttgggattaatattttgggaggtattggaaagaaataggagtgggtatagggaaaattaaattgagatgtaggtttgatgatagttttagttaatttttaggatttttgttgtttggtattagtttggaaaggagttgtaatgttttgggaagagtttagtttgggttagatggtattttgtagttaagatgattttcgaggggttgatagttgaagattttttgttgatagtttttttaatagttgggttaataagtttttttttgaaggggatttgggtggtacgttgttatgtttattataagtgtatttttttttagttttttaaaaatgttttgagtatttaaaaatagagaataaaatatagaaataggagatgagattataaggaggaggacgataatatggtttatgggttaatgtagttgatgtgattgagaattaaatatggttgagttttttgatagttaaaataataatattttttattttgttaattggttttttggagtaaaaaaaatttttggggttaaattataaaagaagttttttatttggatatttatttagttgaaatagtggagaatgtttttaattggttaatagtaaatgttgatgtcgtttttatttgttttttgtaatggttttgagtgaatatcgagggtataatatataagtatagtttagtgaagttttttttatattagaagggtgtagatttatagttttgtagtgtttaatttgatttatgtgtaaaatattgttttttttttttaaattatttttttttttttttttttttatttttgtcgttttggttgaagtgtagtggcgtaatttcggtttattgtaatttttgtttttcgggtttaagtaagt

SEQ ID NO: 1471 - DNA, 6102 bp, Artificial Sequence
  chemically treated genomic DNA (Homo sapiens)
agatttgggagttagatgtgtttgatattattagggtgttgtcgtttttaggttttttttattaatatagtaaggaaatatatgtgtgaaagtgtttttttttgagtaagtgggtatatgtttatatttttatatatttttaaattatttttatatgaatttgtgtatttgttgaaaggggattatttagtatgtgggtttagtttttttttttgaattgaagtttattgggtattaattagatattttttaataggtttaagtgaattagataatttaatgttttttttttgttgggagaaagttttttatgggttttttgtgtataggtataatttgtaagtagaggtattttattttatggatgtttgtatagtgaataatagttttgaaggtagaggttgtttttttttagagtaaagggtagatttatttattgtttagtaaaataaaaataaggtttgtttttgagataaagtttgggttggtttgtttgtagtttattataaaagatttatgttttttaagttttgggtttttaattgtgatgcgaatttttagtatgtgtagtatttatttaggtcgttttattttgtttttggtagatttagggttaaaaagtattaagattaatatggagttaattttgtttattgtgttgtgagtagtaaagttttttgttttatttaaaattttagaagttttgagttttttgtgagtatttttgaaataggtaggttgatttgttaatttataagtagggtaatattttagattttttttataggttttgatattttttatttaatttatatttagtattagaggtagtttgatattttttagttaaatttaatgttttttttgaattattaatgttaaagaataattttgaaaaagataaaacgatgatttttatatataatagaatgaaaatatgttaaaattttatttaatttatgaattaaaggggaaattagttagaggttattattagtttaaaggtaaggttaaagattaatttatatagagtaaagtaacgttgaaatttatttattaatggatataaaattgattttttttatgggaggcggggtggagtgcgggtgtggggtaaggtggagtttattgaatttttattaggtagaatttatttgtatgtttatagataagaattatttgtatttatttataatttatcgagttttagaataattttaagataagaaaaaaatatagattttatagaaataaataatttagaaaagtgtgttgtaaagaatgtatagttttttattggagatgtttagtaattatttttgtttatttagaagttttaatttgtttttatagtaataaaatgtgttataagaataatgtttttaaggttattgattaaatgtgtatagaaagagatgttaaaaagttattttaggttgggtgcggtggtttatatttgtaattttagaattttgggaggttaaggtaggtagattatcggaggttaggagtttaagattagtttggttagtatggtgaaattttgtttttattaaaaatataaaaatagtcgggcgtggtggcgtgtttttgtaattttagttatttgggaggttgaggtgggaggattatttgaatttgggaggtggaggttgtagtgagttaagattaggttattgtattttagtttgggcgatagagtaagattttgttttaaaaaaaagttattttagatatatatatataagatattggaggaggttttaatgatttgatttgggagagggatttgatatagtagaagaaaatttggttaaattttgttgagagaagttttgaaaggcgttattgatttagatagttttttttattgattattaggtgtcgttaagtaggcgcgatgatacgtggtaggagggggaggggtaaaggcggtagtatttagtttattaatggcgatgtttagtagatttataaatgtcggaggttttttggtgttaagatatttttatttttgtatttatttaggcgtttggtatatattaaatatttaatattatgttttttgaaatgaattattcggaacgtagggggtgtttttatatcggaggtatttaaaaataatatgaggtttttgagtgagggttttttaaagttttttgattatgttaggataaatagtgaagatattttaaattagaagttatttggttagttaaataaaaggagatatatttaattatgaaattagatttggtaaatttaagagtggtttttattgattatatagatatagtaaatatttgtttgagtgtagatatagaagatttattttttatttgtttttgttttgtttaggtgatattaaacgttgatttttttatttttagtttttaatattttataataatttttaattaattttggtgtaatgagaaattgaaaagaaattattaacgatttagagtaatggatattagtataaaatgaaaagtgagaaatataggggtagtgattgttagttagaaatatagttggagggaagaggagagggaattaggaagtttttagaaaattttaagaatagaatttttttttttttttaatttttttggttttttagatgttttcgtggacgtttgttagttttgtttttttcggagttatcgtttatttattgttaatagtattttgattttattttaggggatatttttttttttttattgagtatggttttgttggggttgtcggtttatatgttttttttttagatatcggagagagaagtattaggttaagttaggttaattagaggtttgatttttggagattattgtagagtttgaaaattattggtatttttttattttggtgttttgttttttggaattttataattgttttgatttttgtttttttaaagattttagtttttattttttttgtagtttgtgggttattttatttttttttagtaaatttttatttgtttttattagttagagttgttatttgttgattgtagtgaaagaatattgacgggtgtaatgaggaaaatttagttttacgattgtttttattatttttgttgaatttattattgaaaaggattagttttaggataacggagatttgttttgaagatgaagaataattaatatttatggatattagttatgttttagatatttttttaaatatttttatgtttattttatttaatttttagaatgattttattggataggtgttattattttcgtattatagatgagaaaattgaggtataaagtaataataaatttgtttatttttatatggttagattaacgggtttttaagtttattttatggaatattcgttttttaggattatattggttttttggggttgttataataaagtattataaattggtggtttaaaataatggaaatttattgttttatagttttggaggtcgtaagtttgaaattaaggtgtcgttagtattatgttttttatagtaattttaggagagaattgttgcgtgttttttttagtttttgggggttgttggttatttttggcgttttttggtttgtaaatgtattattttgttgttatatggttgttttttgtgtgttttttttttataaggatattagttatattggattaagggtttatttgttttagtatgattttattttaattaattatatttataatgattttatttttaaataaggatgtattttgaagtgttaagggttaggattttttttttgggagatttaatttaatttatgataaaaaaagttaatataaattgtttaaaaaagaatgttatggcgaagtaagtttggaaaatattattataggattttttattgtagtattttggcggggcgaaggtttttaatttgtttattatttagaggagttgttaatttgggattattttgtaaagttttttaaaaatttgtttgatgatggatttttttttataggttgattgtgagattagtatttaacgtggaatatttgtttttatgtttgatgtgaggtagtggtattttagtatatttttttttggtttttttgtttttttttgtgatttgtagcgttaatttgagataattttttttttttgagtttgagtttttttattttaagataaggaaaataatatattttttttatgggtttgatgtgtggatttatttttgttgttgtttgttttgagatgaagtttttttttggtcgtttaggttggagtgtagtggattaatttcggtttattgtaattttcgttttttaggtttaagtgattttgttgttttagtttttcgagtagttgggattataggtatacgttattatgttcggtaaatttttgtatttttagtagagataaggttttattatgttggttaggttggttttgaatttttgattttaggtgatttatttgttttggttttttaaagtgttgggagtataggcgtgagttattatgtttggtcgatgtgtagattaatttagtttaaaataagtaggttgagaaatatttgatatagggtttggtatagagagaagtaggtatttatttagtagttaattttgttatgttaattagatggttttgaattttttggtatttttattgggtatttttaggattttaagaataatttttatttaggataatttttattaataagttttttttgtttattttttttttttttttattatttttttttttttttaaaagagggattttttgtatggtagtaagaattttttttaggtaaatatttaatttaattgtggttttaataagtttttagtattagtaaggaatgggtggtttattttgtagttttttattttgattttttaatttagtgaggggaagaggatgtgattatgcgatcgttagtagaagggaaattgtgaaagcgatttgttgtagaaaaggcggtttatagttattttagtatgtagaggaggtttagttgttgagaggagttgtttgagagtgatttttgtatttgtttgtttagttagtatggaattaaagcggattagagagggttattttgtgaagaaggtgagcgaaggtgttatttattagggtgttagtggatatgggttggggagatttgggtttagttttatcggttatttgtttattttaggaatgttttttgtttaattagttgggttgaaataggggagcgtggtagtatatagaatgttggagtggggttaggggagtggggatatttatttagtttcggtttttttatagtttgatattacgggtttgagaattttagatggtagggtttggaaggtggggatttaagttaattttttttagatttagaatattttttttaagaggtatatagatgtgttttgttagaagatatattttttttttatggaggttttttggagggattatttattttttatttaaattttatttttttttagttttttttttgggaggtaaggggaaaaaagtgattaaagagttgatataatgatagagtaattacggtttattttttgggttatttttttggaattgatacgtttaaaaaaaattttatttttttttaattgggttgaaatttttttatttataatttttagtaaatttgtataatgtggtatcgaggtggtagatgtattattttaaagattagggtattgaaaaaggtttagtttttttggtgtgtattatgaaaattgaatttttttagtgttgtttgttttttttcggatgttgagtgtgtgttgtgtggttgtgaaagtttttcgggatgtgaatttatatataggatttggtgttttgtgggtaatatttatatatatagatatgtttatattaattttagtgagtggattgttttagaaatgagttgaacgtagtgtttttttttaggtgtttagttttttagttgaatgaatagtgaatgtgagtttgttttaggttatttatttgttttacgttttaatttataatgttttatttgtaaggggggttaaatagtatatattgttgtttgtttttattttgattttaggttggagggatt

SEQ ID NO: 1472 - DNA, 6102 bp, Artificial Sequence
  chemically treated genomic DNA (Homo sapiens)
ggtttttttagtttgaagttaaaatggaagtaggtagtaatgtgtgttatttaattttttttataggtagaatattgtaggttaaaacgtgaaataaatgagtagtttaaaatagatttatatttattgtttatttaattaaaaagttaagtatttgaaggaaggtattacgtttagtttatttttgaaataatttatttattaaggttagtgtgagtatatttgtgtatataggtgttgtttataggatattaagttttatgtgtgaatttatatttcggggagtttttataattatatagtatatatttagtattcgaagaaagataaatagtattaagaaaatttaatttttatgatgtatattagggaggttaagttttttttagtattttaatttttaaaatggtgtatttattatttcgatgttatattatgtaaatttattaagaattgtgagtgaagagattttagtttaattaaaaaaagataaggttttttttaaacgtgttaattttaagaagatggtttaagaaataagtcgtaattattttattattatattaattttttaattatttttttttttttgttttttaaaaaaagaattgaggggaagtggaatttaaataaaaaatgaatagtttttttaagaaatttttatagaagaggagtatattttttgatagaatatatttgtgtgttttttaaaaaggatattttaaatttggagggagttagtttagatttttattttttaggttttgttatttggaatttttagattcgtaatattaaattgtaaggaagtcggggttggatgagtatttttatttttttaattttattttaatattttatgtgttattacgtttttttattttaatttaattggttgaataggaaatatttttaagatgagtaggtagtcggtggagttgaatttaagtttttttagtttatgtttattgatattttggtaagtggtattttcgtttattttttttataaggtagttttttttgattcgttttggttttatgttggttggataggtagatgtaaaggttatttttaggtaattttttttagtagttgggttttttttgtatgttgaggtggttgtgggtcgttttttttatagtaggtcgtttttataattttttttttgttggcggtcgtatgattatatttttttttttttattgggttggaagattagaataaggaattgtagagtaaattatttattttttgttaatgttggagatttattaaaattatagttgggttgaatatttatttaagggaaatttttattattatatagaaaattttttttttaaagagaaaaagaagtgatgaaaggaagaggaagatgaataagaaaaatttgttggtgaaaattgttttgagtaaggattatttttgagattttggaaatgtttaataaaaatgttaagaaatttagaattatttggttagtataataaagttaattattaaatgaatgtttatttttttttatgttaagttttgtattaagtgttttttagtttatttattttaaattaaattagtttgtatatcggttaggtatggtagtttacgtttgtatttttagtattttgggaggttaaggtagatggattatttggggttaggagtttaagattagtttggttaatatggtgaaattttgtttttattaaaaatataaaaatttgtcgggtatggtggcgtgtgtttgtagttttagttattcgggaggttgaggtagtagaattatttgaatttgggaggcggaggttgtagtgagtcgagattggtttattgtattttagtttgggcgattagagaaagattttattttaaaataaataataataaaaatgagtttatatattaaatttatagggaaagtatattattttttttattttagagtaaggaaatttaggtttagagaagaaaagttgttttaagttgacgttgtaggttataggggaaagtagaagaattagggagggatgtgttagggtgttattgttttatattaggtatgagaataggtgttttacgttgagtgttgattttatagttagtttgtaaaaagaagtttattattaaataggtttttgagaaattttataaaataattttaggttggtaatttttttaaatgatgaataaattaaagattttcgtttcgttagagtattatagtaaagagttttataatggtgttttttaaatttatttcgttatagtatttttttttgaataatttatgttaattttttttgttataaattgaattagattttttaaaaaagaagttttaatttttagtattttagaatgtatttttatttggaaatagggttattgtagatataattagttaagatgaggttatattgaaataagtgggtttttaatttaatgtgattggtgtttttataagaaaagggtatatagaaaatagttatgtgataatagagtgatgtatttataagttaaggaacgttaaggatggttagtaatttttagaagttggaagaggtacgtaataatttttttttagagttgttatagagaatatggtgttgacgatattttgattttagatttacggtttttagaattgtaagataataaatttttattgttttaagttattagtttgtggtattttgttatggtagttttaggaaattaatataattttgaaaaacgaatattttatagaataaatttagagattcgttaatttgattatgtgaaaatgagtaagtttgttattattttgtgttttagtttttttatttgtaatacggggataataatatttatttaatgaggttattttgaagattaaatgagatagatatggaagtatttagaagagtgtttgaaatataattagtatttataaatattagttgttttttatttttaaggtaaattttcgttattttagagttgattttttttaatgataagtttaatagagatgatgaaagtaatcgtaggattagattttttttattatattcgttagtgtttttttattgtaattaatagataataattttggttaatagaggtaaataggaatttattggaagagaatggagtggtttatagattgtaggaaaaatgaagattggggtttttgaaaggataggaattagggtagttgtggggttttaggaagtaagatattaagatgaaagaatgttagtggtttttagattttgtagtagtttttagggattaggtttttgattggtttaatttggtttagtgttttttttttcggtatttgaagggggaatatgtgaatcgatagttttagtaggattatgtttaatgggagaagggaggtgttttttaaagtaaaattaagatgttattaataatagatgagcgatggtttcgagaaaggtaaaattgatagacgtttacgagggtatttgaggagttaggaaagttaggggaaagaagaagttttgtttttggggttttttgagagttttttgattttttttttttttttttttagttgtgtttttagttaatagttattgtttttgtattttttattttttattttatgttaatatttattattttaaatcgttgatggtttttttttagttttttattgtattaaaattaattagaaattgttataaagtgttgggggttgagagtagagggattaacgtttgatgttatttgagtaaaataggaataaataaaaggtaaattttttgtatttgtatttaaataagtatttgttatgtttgtatagttaatggaaattatttttagatttattaggtttgattttatagttaaatatatttttttttgtttaattgattaagtgatttttaatttggaatgtttttattgtttgttttagtatgattagaaggttttaaagaatttttatttagaaattttatattatttttggatgttttcggtgtaaaagtattttttgcgtttcgaataatttattttaagaaatatggtattaagtgtttagtatgtattaggcgtttgaataggtgtaggggtaaaaatgttttgatattaaggaattttcggtatttgtgaatttgttgaatatcgttattgatggattggatgttgtcgtttttgttttttttttttttgttacgtgttatcgcgtttatttagcgatatttagtggttagtaaagagaattatttgaattaatgacgttttttaggattttttttaatagagtttgattaagtttttttttgttgtgttagattttttttttagattagattattagaattttttttagtattttatgtatatgtgtttagaatgatttttttttgagatagagttttgttttgtcgtttaggttggagtgtaatggtttgattttggtttattgtaatttttattttttaggtttaagtgatttttttattttagttttttaagtagttgggattatagggatacgttattacgttcggttatttttgtatttttagtagagataaggttttattatgttggttaggttggttttgaatttttgattttcggtgatttgtttgttttggttttttaaagttttgggattataggtgtaagttatcgtatttagtttagaatgattttttaatatttttttttgtatatatttgattaataattttggaaatattatttttgtagtatattttattgttgtaagggtaagttaagatttttgaataagtaaaaatgattattgagtatttttaatggaaaattatgtattttttatagtatatttttttaagttatttgtttttatggaatttgtgttttttttttgttttggagttattttagagttcggtagattgtggataaatataaataatttttgtttataaatatgtaaataaattttgtttgatggaagtttagtagattttattttattttatattcgtattttatttcgttttttatggaaaaagttaattttgtgtttattggtaaatgaattttaacgttgttttattttatataaattggtttttgattttgtttttgaattggtggtgatttttggttagttttttttttaatttatgagttaaataaaattttgatatgtttttattttattatatgtaagagttatcgttttattttttttaaagttattttttagtattggtaatttaaaagagatattaaatttagttgagaaatattagattatttttagtgttaaatataaattaagtaaaaggtgttaaaatttgtgagaagagtttgagatgttattttatttgtaagttaataggttagtttgtttgttttagggatgtttatagaagatttaagatttttggagttttgagtgagataaaggattttgttatttatagtatagtaaatagaattagttttatattggttttgatgttttttggttttaagtttattaaggataaagtggagcggtttagatggatgttgtatatattgagggttcgtattataattgaggatttagagtttagggaatatgaattttttgtaatgggttgtaagtaaattagtttaaattttgttttagaggtagattttatttttattttattggatagtaagtgaatttgttttttgttttggaaggagataatttttatttttaaagttgttgtttattgtataagtatttataaaatagagtatttttgtttgtaagttgtatttatatataaaaaatttatggagaatttttttttaataaaaagaaagtattaagttgtttaatttatttaaatttattagagaatatttagttggtgtttaatgggttttagtttaaaagagggaattgagtttatatattgagtaatttttttttaatagatatataaatttatatggaaatgatttaagaatatataaaagtgtgaatatatatttatttgtttaaaagaaagtatttttatatatatatttttttgttgtgttagtggagaaggtttagaagcgataatattttggtagtgttaagtatatttagtttttagattt

SEQ ID NO: 1473 - DNA, 9157 bp, Artificial Sequence
  chemically treated genomic DNA (Homo sapiens)
aataagtttagagaataatgaatgtgagaggtgggaaggatgatttggtgtatttttgttttatttatggtgagtttggattttagagtagaaggattttcgttttttttttggggagttttggtgttaatttagtgtaggttgttaagttattcgggtttgattgtttttttttttgttaaaatttgttttaagtatgtaatatagttatgtttattaatgatgaggagatagttaatgaaaattaatttttttaaagatgaatagatatttagatttttttaagtataatttatttaagaaaatattattttattgagttttaaatgagttaggttttatttagaaagtgttttttagtgttaggtaaagtgttttatatttgtaattttagtatttttggagacggagataggaggattttatgagtttaggagtttaagattagtttgggtaatatggtaaaattttgtttttatagaaaatataaaaaaaaaaaaaatagttgggcgtggtggcgtgtatttgtggttttagttattttggagtttgaggtgggagaatcgtttgaatttaggaggttaaggttatagtgagttgtgtttgtattatcgtattttagtttgggtgatagagttagtttttgtttttaaaaaaaaaaaagaaagaaaggaaaagaaaatgttttcgagttgattatattttaattattgtgttaatttgagagatagtttgttatttttttataggatatgagggttgataattattttattgtatggttttggggattgatgaataaaggttaatatgtggaaaagggtaattaaagaaagaagagttatttttaggttaattagtataagttttttcgttggtatgttttaatatattaaaatagtagtaaaaataatttgtatattggtatcgaaggtatagataaatttgtcgaggatttttattacggtagagggatgttttatatgagtttttagtagattaattaagtttttgttagttttatttggaaatgatgttgtttttttggggttatgtagagaagtttatgttgatgaaatgagttgttttagaatggtagttttcgggtagtagagtttgggtttaaggaaggttgaaagaaggggtggcgtggagttgttaggtgtaaatgttaggttagtaatgtagtttagtttgtatggacgtgtttcgtttaggaagttgtgatttggttgtattttttattttaggtgagatggaaggttgaattttattttattttttggtgaggttgatgttttttggtgtttataattttttttgtaaatatttgaaaggaatttattattttaatgttggaagagacgtttatttttttttaagaggatttgagtggattttgattgtaggttttatgttgggtagagttaaggagaatttaatttgtttttaattttatttgaatgttttttttttttttttttttttttttttttttgagatagagttttgtttttttatttaggttggagtgtaatggtacgatttcggtttattgtaatttttgtttgttgggtttaagtaatttttttattttagtttttttagtatttgggacgataggagtatgttattatgttttgttaatttttggtatttttagtagagatggggttttattatgttggttaggttggttttaaatttttgatttcgtgatttatttgttttggttttttaaagtattgggattataggtatgagttatcgcgtttagtttatttgaacgtttttatgtttgttataagtgtagtagtagaatttttatatattttgcgtgcgaaagttttttgtagtttttttagtatagagaggttggggaaggttagagattgatttgtattttttagatatatagttgattattgaataatatacgtttgaattgttatatatagattttttttaataaatgtgttagaaaatgttttggagttttgtaataatttgaaaaaatttaaagataaattatttagttagaaatattaataaaaatagaaaaagttaagtatgttatgaatgtataaaatatatgtagatatttagtttattttattttttattattataaaatataataaaattattgtaaaagttaaaatttagtaaaaattgtgtatatatttatagatcgtatatggtgttatttttagttgagagaagtgtatataaatattaagatgtagtattaaattgtaattgtataaatttaatcgtagtgtatattatattatggtaataattttatattttttttttgttgttgttgtaatgagtaaaggtgttgcgagtatttatttaaaacgttttgtgatatttaatattttattatgagtagtttatttttagtgaattgcgtattatagtaaaaagtgttttttttttgttcgtatgtatttttcgttttgtttcgtgttgtattgtaaattttgaataatattatgggatttaatatgaagtggtattagtgatgttggaagtgtttttaagaagtagagaaaagttatgatatttgatattataagaaaaattggatttgtttgatatgtaatagagattgaggtttgtagttggggttgtttttattttagatagatgatttattttgtaaataggtggtgtaaatttattgtatggaaaaatatataatagtattatagatgtattttttttttacgaatatttttttttttttagtttattttattgtaagaatatagtatattatatatataatatataaaatatatgttattaattgttgttggttaatagtaggttgttagtagttaagtttttgagagttagagttatatttggattttttattgtgtatggttagtgtgttaatttttgaaattgattaagggttaattgtaattttaaaagaatttaatataatattgtaaatagtaagtggttaataaataaggaattgaattaataagaatatataaattttagaatatgtgtaatttgattatagtatatagagatttttttatatatttttttttttagtttatgttgtttttttaggtagaaagcgttttattttgaattagttgtttttagagtaaaaatttttttaagagtgttgtgtggttttttatgtataatttggaatagtttattgttttatgtttattttggatatgaagggttatgtcgtagcggaagtttttatgtatttattttcgtttatatttgagtaatatatttttttttgttgtttttttataggttatagagtgcggtggcgttagtatagagttttgtttaacgtttttttgtgtttttacgatgttgatggattatgaaggtagggaagaatgtatagttaggaggttattaggagggtaattaatttataaaattatatttgtagaatttaatgtatttaataattattaggggaaaggtgggtaaaagttatattaatattatttaagttaaaattaaaataataggaaaagaaaattatgtggatgtagaatttttgataatattatttttaaggtgttttatttaagaggaattgttataataatattttaagtggaaataaatatatgttggaagtattatatattagtagagtattttttttttttagagtatttttttaagtatattaatatgagttttttaagagatattttatattaaaaataaaatgtttgtttattgttggttttttaatttgtttttattttttgttttttttaatgaattgggttatgaggtgagttagagaggataaagggagtggtaagaatttgaggagagaagagagtgaggttaaaataggaaattaggaaaagcgattcggtttttttgttttttatatggggttatttttttgttgtttagtgtggtttttttttgagggttttgtatggttttttaattttagggaatttcgtaggatattttatttaagattattgggtttttatttttatttttttgttagttaatgaataggtaggaattttattgtttggaaagaggaataatgttttttggtttttattttatatttaaaatagagaggttaattgatttatttttaaatatttttgaatattaaaatagaagttttatagtatatatattatttggttgttttagatttaagttagggaaaagtatagatttaatatttaaaattgagatagacgttttttatttaatgttattagttttgttttattttatgagaatgagaatataataatatggtatacgtttatttgggggaaagattgatgttttataatataatttataattatagaaaatatgtgagtttattgggaataaataaattttgaagataataagatatttttatttatgtcgtaatttttatgttatttggtgtaggatgtagagatattaacgtttatatttaatttaagtttgttatttaagatttgaaggggttttgtttattagttgtatttttgggtagagatataattttggggaaggttttagttttatttttcgtatagtaggaatgagaatagttttgtttgttgggaagtttgagggaggttatggacgtgtagcgtttggtagagggtttcgttatggaaggttttagtaaatgtgagatatttttatgattttattttttttaaaagaaagggaataagagaagaggggaggaaataagattaattgcgagagataaagtataagggtgagggaaggaataaggagatatgacggtagcgtggagtagtcgaggggggagattgtttttattattttttagtatttattgtagattttatttttaaatatgttgtaaggattttttatttaaggtaatgtttgaattttgttgagttagtggtatgggtttttgagagaattattaatttaatttgattatttggtttgtggatgcgtttatttttatgtaagttaataatattttgggattgggatttattttttgggtattgttggttagttttaaaatggaatataaggaagtggtttttttattttttttatttttgaaattaggtaagatatagtttttttaaattataagaattatttttttttttataatgtagtaaaaatatatatgttatggttttatgtgtaatttatttaatttttgatttatgaaatttttagttgaaaattttgtataagattgaggaattttttaagaaataagtttaagttttttgtgaagattgttagggtgttggaatgaatgggtagagaaaataatgggtgattttttaaatttaaatgagtgtatttatataatggttagtttaattgaaaaagagttaatgtagttaattatgtaaaggacggttaagttttttgtttggtttttagtttgattaatttatattatttttgttacggtgttatgttttttttatttgtaagttaaaatagtgaaatatttttttgaatatatttcgtttttttattagtttatggtggcggtagggtcggggatttagtatttttttttttgttatggtttgaggaaggttttttattagtatacgtttgttttttattttcggaaaaattatacgtatttatttgttagatgttgtgtgtagatagtgattaataaatatttagttgtttgggttaggtttttatatttttatatatatatatatatttgtgtgtgaatgtgagtgtgagtgtgtattttttataaatattagtttatttagttcgtggtataggtagggtagtatatttatttttattttataaataaagaaattagatttaggaatattatgttatttgtttagtgattaaatttttagatttgggaaataaagaaaattggatttaagttaggttttttagaaggaatttagggttttttttattttttagttttgtttaagtttttgaaagaatattttaaatatgttttagtatttttttttttttaaaaaaaaaaaagttttattgagatataattaatatatagaatttatttatttaggtatataatttaatggattttaagatattgagagttgtgtagttattattagaataaattttaaaattatttatatttttaaaaacgtattttattttttttagttgttatttttaatttgtagtttttggtaattattaatttattttttgtatttatatttttgttattttgaatattttatataaacggaattatacgatttgttagtagttttttatgtaaataatgtacgtttgaaatttaatttataaattattagataaaattttataagttgtattttagagttaaatatatttgaatttagtggaagttatttaaggagttattaaagaaaatatagagtaggagaaaattaaagaaatttttgtaagaaattggtgtatgttggggggtatgaatattatattttaatgtatggaaattaggatatagattattatgaatttatttagtgggttatatttaaaggttagattaaatttttttgttataggattaatatatgttttaatttatttggtgggtatatttttttataagtttttttggaaagttaggttttttgtggatgtattatttttttagtgtgttgtaatgttcggggagagggaaaagttttttttatagttatgtttagtgggaagtggagaaatattttttattttataaattaagttttttatatatgtaaatatgtatatatatttatatattatagtgaggaagaaatttttatattattaataaaatatatttgtattagtagtaatatatatttgtattttgtttataatataaatgtatttttttattaaaagatttgtttgatgtttttttgttagtaaataagttttattaaattttattgttatatgagttttagaggtgaataagagaagaaaaaatgggggaaaattattttaaattgaaaagagaaaagtttgattttgttttgggatattttttagggatatgagttggggaggggattttagtagcgatgcgttatgaagtatagtaatataatatagagaatttaattgaagggggaaataaatggaagttttttttttttgaatattagttgtagtttgttttgttatattttaaaaaaattttttagaaagtttaattgaatttattgtaggatatattttgtggatttattgtgtgttttgaagttatattgtgagttatatagaattaattaaaatataattttttttgaaaatgagagtttaagttggtagaaagtgcggggtaaagatatggatatgggtttaaagtatttatttttttgtgattttttgatatattttttaagtgttttttagtggattagttttagaatgtattagttaatttttgtttaataatttatttttttagttcggaatgttttaaattgaggaaggataaagttttagaggtggggagtagggggattttggtcgaggattttgtatgaatcgatgagtatgtatttatttttttgttttgttttttgtgttttgtgtatttttaggaggttaggataggtttttttgagaatgaaaatttgtttatttgtttttttattggatatttgttattagtatataaattaatgcgttttgtagtgtgttattttttagaattttttttgatcgtatgttttttggagggttcgttgtttttagagttaggtttgttttttgttgtagtttttattgtttttttagttattttgtaatttattttttttgtttgcggtttttattacgttttttaaagtggttaaggttgttttgttgtttaattttatggagtttgtttgtttttattttattagttttttttggttttttatttttgtgtaaattattagtattttgtgttaaggacggagttggtatttttaggtttggaatagagttattaaagtttagttagatgtttggaagagttttaggataaggggatattttgtagttttgtggtgggagtatagttgaggtttttttggttattttttgttacgattaggtagaaagtagttttcggatagattcgttgttttagatttgattttaaagaaaaattaagattagtatttgttttaggttttgtttttttataatttttttcgaaatttagatatttgttaatattttggaaaaattgatttttttttaattagtagtgttgtgtgattgttataagtttagtataaaaatggttttttttgttggggagttttttattttttagtgttttgtttaatttttgtttaaggtggtaatataatttagtttagtttttgtttatttttattattatttatgtattaaaatttatgttttttaaggagggattatttagaggatgttttttatcggtttaagtgatagtgttagaattaaagcgtatattgtaggaaattaaataatggtttttaagttttatttttatttagggatgaataaattaatattaattttggtaatataattgttattgatggtgttttattttttttttatgatatggtataattaatagtaaatataaaatttgtttttgtttaaggatttatatttattaatatggtaatatagtagtggttttatagttttaatttgtttgttaatttagttaattttttattattttgtaatttgttaatgaaattgtttttttttgttttataattttaatttttagagttaggggtatatgtgtaggtgtgttatataattaaattgcgtgatattgagttttggggtataaatgattttattatttaggtagtgagttaaatatttattaaataggtagttttttagtttttgttttgtttttttttttttttttttggtagtttttagtgtttttagttgttatttttatttatgtttaaatgttcgattgtgtgtttttaattaaatattttgatttatagttatttattttatttttagtaaatagaaagttttatttggttaatgttaattaaatagattaaaaggaagttatgataattagatattgatattgatttattgattatttattttatttggattttttatttttagg

SEQ ID NO: 1474 - DNA, 9157 bp, Artificial Sequence
  chemically treated genomic DNA (Homo sapiens)
tttagaggtgggagatttaagtggaataaatggttagtaaattaatgttaatgtttaattgttatgatttttttttaatttatttggttagtattaattaaataaaattttttgtttattggaagtagaatgggtagttatgaattaaaatgtttagttaagaatatatagtcgggtatttggatataaataaagatggtaattaaagatattggggattattagagaagggagagagggagtaaggtaagggttgaaaaattatttatttagtaggtatttagtttattatttgggtgatgggattatttgtattttaaagtttagtgttacgtaatttagttatgtaatatatttgtatatgtatttttgattttaaaagttgaaattataaaataaagaaaaatagttttattagtagattgtaagatagtaaaagattaattggattgataaataggttagaattatggaattattattatgttattatattagtggatataaatttttaaataagaataaattttatgtttgttattgattgtgttatgttatgagagaagagtaaggtattattagtggtagttgtgttattaagattgatgttgatttgtttatttttgggtagaaatggaatttggaggttattgtttgattttttataatatgcgttttggttttggtattgttatttgaatcggtgggaagtattttttgaatggtttttttttgagaaatataaattttggtgtatagatgatggtggaaataaataagaattgaattaaattatgttgttattttggataaaaattgggtaaaatattggagggtaagaagttttttaataaagaaggttatttttgtattgggtttatgatagttatataatattattaattggggagaagttagtttttttaaggtgttgataggtatttggatttcggaggaaattgtaaaaaagtaggatttgggataaatattggttttggtttttttttgagattaaatttgagataacgaatttgttcgaaagttgttttttgtttggtcgtggtagagggtggttaagggggttttagttgtgtttttattataaggttatagggtgtttttttgttttgaggtttttttagatatttggttgagttttggtagttttattttaagtttggagatgttagtttcgtttttggtatagaatgttagtgatttgtataagggtgagaggttaaaagaggttaataaaatgaagataggtaagttttatggaattagataataggataattttgattattttgaggggcgtggtgggggtcgtaggtagagggggtgggttatagagtgattaggagagtagtggaggttgtagtaggagataagtttggttttgaagatagcgagttttttagggaatatgcggttaggggaggttttgaaagatgatatattgtagagcgtattggtttgtatgttgatgataagtatttagtaggaaagtaaatgaatagatttttatttttagaaaggtttgttttgattttttgagggtatatagagtataaggggtaggatagggaggtggatgtatgtttatcgatttatgtaaagttttcggttaaagtttttttgttttttatttttgggattttgtttttttttaatttaagatatttcgggttggaaaaatggattattgagtaggagttggttgatgtattttaaagttaatttattaaaaagtatttgagagatatattaaaagattataaagaaatagatgttttaggtttatatttatgtttttatttcgtattttttgttaatttgaatttttatttttaagaagagttgtgttttggttaattttatatagtttatagtgtgattttaaaatatataataaatttataaagtgtgttttatagtgagtttagttaaattttttgaagagtttttttgaagtatagtagagtaggttataattgatatttaaaaaaagaaaatttttatttatttttttttttaattaagttttttgtgttatgttattatgttttatagcgtatcgttgttgagattttttttttagtttatgtttttaggaaatattttaaaatagaattaaatttttttttttttagtttgaaataatttttttttattttttttttttttatttatttttaggatttatatggtaataggatttgatagggtttatttgttggtaaggaaatattaaataaattttttagtggaaaaatatatttatattataggtaaaatgtagatgtatattgttattgatgtaaatgtattttattaatggtgtgagaattttttttttattgtggtgtgtgaatgtgtatgtatatttgtatgtgtaaaagatttaatttgtgaaatggaagatgtttttttattttttattaagtatggttgtaaaagaaattttttttttttttcgggtattgtagtatattggaaagatgatatatttatagaaaatttggttttttaaaagagtttatgagagaatgtgtttattaggtgggttaaaatatatgttaattttgtggtagagaagtttgatttagtttttgggtgtagtttattgaataagtttatagtgatttatgttttagtttttatgtattgaaatataatatttatattttttaatatatattaattttttataaaaatttttttaatttttttttgttttgtattttttttgatagttttttgaatggtttttattaaatttaaatgtatttgattttaaagtgtaatttgtaaaattttatttggtaatttatagattgaattttaagcgtatattatttatatgaagaattattagtaaatcgtatgatttcgtttgtatgaaatgtttaaaatggtaaagatataaatatagaaagtagattagtggttgttagaagttgtagattgggggtaatagttaaggagagtggagtgcgtttttgggggtatgaatagttttaaaatttattttgatggtggttgtataatttttaatattttgaaatttattggattgtatgtttaaatgggtgaattttatatgttaattatattttaataaagtttttttttttttaaagaaaaagaagtattaggatatgtttagaatatttttttaaaggtttaaataaagttgaaaagtgagaagagttttagattttttttgggaaatttggtttaaatttagttttttttattttttagatttgagaatttggttattgagtaaataatatgatatttttaagtttgatttttttgtttataaaatgaggatgaatatgttattttatttatattacgagttaaataagttagtatttgtaaaggatatatatttatatttatatttatatataggtatgtatgtatgtgtaaaaatgtagggatttaatttaagtaattgagtatttgttgattattatttgtatatagtatttggtaaatggatgcgtgtgattttttcggggataagaggtaaacgtatattgatggaaagttttttttaggttataataaagggagaaatgttgagttttcgattttgtcgttattatgaattggtgagagaacggaatatatttaaagagatattttattgttttaatttgtaagtgaggggagtatgatatcgtaatagagatgatataaattagttaaattgagaattaggtaaagagtttagtcgttttttgtataattagttatattggtttttttttaattagattggttattatgtgggtgtatttatttagatttgaaaaattatttattattttttttgtttatttattttagtattttgataatttttataggaaatttaaatttattttttgaagaattttttaattttatataagatttttaattggaagttttatgaattaaaaattaaatgaattgtatataaagttatggtatatgtatttttattatattgtgggagaaaaaataatttttataatttaaaaaaattatgttttatttgattttagaaataaaagaagtagaagaattatttttttatgttttattttgggattggttagtagtgtttagaaagtgggttttaattttaggatgttgttgatttatatgagagtaaacgtatttataaattagatagttaaattaagttaatgatttttttagagatttatgttattggtttagtagggtttaaatattattttgaataaagagtttttataatatgtttgagggtggaatttgtaatagatgttgggaagtggtgaaagtaattttttttttcggttgttttacgttgtcgttatgtttttttatttttttttttatttttgtattttatttttcgtaattagttttatttttttttttttttttttatttttttttttttggagaaaatgaaattataaaagtattttatatttgttggaattttttatgacgagattttttgttaagcgttgtacgtttatagttttttttaagttttttaataggtagggttgtttttatttttgttgtacgagggatggggttgaggttttttttaaggttgtgtttttatttaggggtgtagttgatagataaaatttttttaggttttagatgataaatttaagttaggtgtaaacgttaatatttttatattttatattaaatgatatagaaattacgatataagtgaaagtattttattatttttaaaatttatttatttttagtgaatttatatgttttttgtaattataaattatgttataagatattaattttttttttaaatgaacgtatgttatattattatatttttatttttatgaaataaagtaagattggtagtattaagtggaaagcgtttattttaattttaaatgttgaatttgtatttttttttggtttaagtttagagtaattaggtagtatatatgttgtaaaatttttattttagtgtttaaagatatttaggaataaattaattgatttttttattttagatgtgaaataaggattagaaagtattgtttttttttttaggtagtgaaatttttgtttatttattaattggtaaaagagtagaggtgggagtttaatggttttgggtggaatgttttgcggaattttttgggattgaggaattatgtagaatttttaagaagaagttatattgggtaataagagggtggttttatgtgagggatagggggatcgaatcgttttttttgattttttattttagttttatttttttttttttttaaatttttattattttttttattttttttgatttattttatggtttagtttattaaaggggatagaaggtggaggtagattgagaaattagtagtgggtagatattttatttttaatgtgaaatgttttttagggggtttatgttgatgtgtttgagaaagtattttgggaaaaaaaaatattttattaatatataatgtttttagtatgtatttatttttatttaaaatattattgtagtagttttttttggataaggtattttgggaatgatgttattagaaattttatatttatataattttttttttttgttgttttggttttgatttgggtggtgttggtatagtttttgtttattttttttttggtagttgttggatgtattaaattttataaatgtgattttataaattagttgtttttttaatggttttttggttgtatatttttttttatttttataatttattagtatcgtgaaagtatagagggacgttgagtagagttttgtgttggcgttatcgtattttgtagtttgtaagagagtagtaaagaggaatgtgttgtttaggtatagacgggggtgggtgtatagagattttcgttgcggtatggttttttatgtttagggtaggtatgaagtaatggattattttaggttgtgtataggaaattatatagtatttttggagggatttttgttttaaagataattaatttaaaataaggcgttttttatttgaaagaatagtatgaattaagaaaagagatatatagagagatttttgtgtattatgattaggttgtatatattttgggatttatgtatttttattagtttaattttttatttattgattatttattgtttataatattgtattagatttttttaggattatagttgatttttgattaattttaggggttggtatattgattatatatagtagaaaatttaggtataattttgatttttaaaaatttaattattaatagtttgttgttgattagtaatagttaataatatgtattttgtatgttatatgtatgatatattgtatttttataataaagtaagttagagaaaaggaaatgttcgtaaggagaaaatatatttgtggtattgttatgtatttttttatatagtaagtttatattatttgtttataagatgaattatttgtttgaaatggaagtaattttagttatagattttagtttttgttatatattaagtaaatttagttttttttgtaatgttaaatgttatgatttttttttgttttttgggagtatttttagtattattagtgttattttatattggattttatggtgttatttaaggtttatagtatagtacgaaataggacgaaaaatatatgcgaatagggagagagtattttttattgtgatgcgtaatttattggggatgaattgtttatgatggaatgttgagtattatagaacgttttaagtggatattcgtaatatttttgtttattgtaatagtaataggaggaggatatgaaattattattatagtgtggtatgtattacggttaaatttatgtagttataatttaatattgtattttgatgtttgtatatattttttttaattgagaatagtattatatacgatttgtgagtgtgtatataatttttattaaattttaatttttgtaatagttttgttatattttatggtagtaaagaataaaatagattaggtatttatatatattttatgtatttatgatatatttaattttttttatttttgttgatatttttagttggatggtttgtttttgagtttttttaaattgttgtaaaattttaaaatattttttaatatatttattgaaaaaaatttgtgtgtaatagtttagacgtgtgttgtttaatgattaattatatgtttaaagagtataagttagtttttaattttttttagtttttttatgttaaaggaattataggaaattttcgtacgtaagatgtgtggagattttgttgttgtatttgtagtaggtataggaacgtttaaataggttgggcgcggtggtttatgtttgtaattttagtattttgggaggttaaggtaggtggattacgaggttaggagtttgagattagtttggttagtatggtgaaattttatttttattaaaaatattaaaaattagtagggtatggtggtatgtttttgtcgttttagatattggggaggttgaggtgggagaattgtttgaatttagtaggtagaggttgtagtgagtcgagatcgtgttattgtattttagtttgggtgagagagtaagattttgttttaaaaaaaaaaaaaaaaaaaaaaaaaaaaagaatatttaaataagattggagataaattgaattttttttagttttgtttagtataaggtttgtaattaagatttatttaggtttttttaagaaggaatagacgttttttttagtattaaaatggtaaattttttttaagtatttataaagaaagttataaatattaggaaatattaattttattaggaggtgaggtagagtttaattttttattttatttgaagtggaaaatgtagttaagttataattttttaggcgaagtacgtttatgtaagttggattgtattgttggtttgatatttgtatttggtagttttacgttatttttttttttaattttttttgagtttaggttttgttgttcgggaattgttattttaggatagtttattttattaatatgaatttttttgtatagttttaagaggatagtattatttttaaatggaattagtaagaatttaattaatttattaaggatttatataaagtatttttttgtcgtggtaagggttttcggtaagtttatttgtgttttcgatgttaatgtgtagattgtttttattgttgttttagtgtattagggtatattagcgaggagatttgtattaattaatttggaggtggtttttttttttttagttgtttttttttatatgttagtttttgtttattagtttttaggattatgtaatgaggtgattattagtttttatgttttgtaaagagatagtagattattttttaagttagtatagtggttaaaatgtaattaattcgggggtatttttttttttttttttttttttttttttttggaaatagaggttggttttgttatttaggttggagtgcggtggtgtaaatatagtttattgtagttttaattttttggatttaagcgatttttttattttagattttagagtagttgggattataggtgtacgttattacgtttagttattttttttttttttgtattttttgtagagatagggttttgttatgttatttaggttggttttgaatttttgggtttatgagatttttttattttcgtttttagaagtgttgggattgtaaatatgaggtattttatttggtattaggggatattttttaagtgagatttaatttatttggggtttagtgaggtgatatttttttaaatgagttgtgtttgaaaaaatttagatatttatttatttttgaaaaaattaatttttattggttgtttttttattattaataagtatggttgtgttatatgtttaagataaattttagtagagaagaagatagttagattcggataatttagtagtttgtattgagttggtattaggattttttagaggagagacgagggtttttttgttttgaggtttagatttattatggataaaatagagatgtattaaattattttttttattttttatatttattgttttttaagtttatt

SEQ ID NO: 1475 - DNA, 8333 bp, Artificial Sequence
  chemically treated genomic DNA (Homo sapiens)
ttggattttttagagaagtagtgatgtttaaattgagaaatgaaggtttagagaggtaaagaaatttgtttaaggttatatggtatttgtttttgtggtagttttagaattaggatataaggttatttaaggatttttttgtagattatattaaatttagaggttttttagagagggattgttgtttatggttatataaagggtaaggtttttttgggtttttatttttttttagtttttacgtgcgatgttgaattatagttttatggtttattttttttttattgtattattttttatggaaaatgaggtttgaatttttattatgtattattagttgggttaagttgggtgtttttatttttaatttattttaatttaaagagaagataatttggtaaagatatttgcgtgtattttaaagttagtgtttagattttaggatttaggagtttgggatttgtttttattttttattggtttttagtatgattttagataagtttaagttttagtttttttttttgattaatgtgaatgaatggtttttgtttagtttattatataaaggggtaataatatttagggaaaggggatagaggataggtaaatttatttattaatgttaaagtttttagtgtggtttaattattttgggggttgatttagttagttttatttttagggtaaattagttagaaatggggaaggtgattaatagtagtaagaattttaggaaattgatgaggttatgatagaggtaggagggttagttttggggtatatttgtaggtgagagtagaggtggttaattggatttgtacgatagttgttaagcggagtgaatttgggtaagtgtattttacgtttatttttttttcgagaggtttttttttttttagggtttttaatttggttttttgtttaatattttcgtatttttgggtagttgtaagttagggtttgttttttttttttatatattaatatttatttgttttaagtttaataatttttataaggttttattttttgttaggtaatagttatttaattttagaatttagttcgcgtgatgatgttttttttattggattgagtaggggttaattttttcgtttaatttatattgtttatttatatttggtatggagttaggagtatttgggtatttgtaaatatgtattgaatattgttggtaaaatatattttttttatattattagttttagaagtgtgttttttaggagtttttatgaagatgatgttttagtttatagggataaattataaatagtttattaacgggagttatagatgaggaattagattattattttttattttatatttaattttaatgttttaatgattattaaaaaatgtttattttacgagatggcgttattgtattttagtttgggggatagagcgagattttattttaaaaaaataataaataataaaaaataaaaataaaaaaaaattttgtttattttaatttaagaaaattgttaggggtcggggttaggggtagggttagaaagatgaggtttatttaagttaaatgttttggtttttggagatttaggagtttaagttgggagtaaagtcgagatagttttagaatttgggatgaggttatttgtcgttttttttttaattttggataggaagtagtcgggagttttgttttatttttttaggaagttttgttttttgggttaagttttagagtattgaggttttattttgtgtttggttttgatttattaggttttttaagagatttttggatagggagagtttttaggataggaaggttagggagggattaaatttaaggttaggcggttaggttgaatagcgtgggatttggtttgtaggttaaaggagttatagaagattttgagggtaagatagaagtagggtagatttaataggtagttgaggatttgttattttggtttgtatatttaggagatgtttagttttcgggtttttagaggtgttttttagggcgaaaatttttttatttttttgtagtaggtgtttttagggtgttggtggttttttttgtttagatttcggttttttttatgcgaaatagaaatttgaaacgtttttttaggtttaaagggttgataagagtcgaggataaatgtggtgaggtgaggttttggaagataggagtaacgttggttggttttggggttaaagttttatgattttagggagggcggatcggcgttagtattaggcgtcgggtttagttttttttttatatcgtattttttttttagttttttttcgtagggtgcgacggtatcgggtcggtcgatttttcggaggtagagattcgggtttgggggttgtcggtcggtttttttcggtttcgtcgtgttaggcggttatttatcggtttttgtttttacgtcgtttcgtttcggggataagtagtttttttgcgagtttagaaagtcgaagttcgattgttggaagcggttaaaattatttaggggtagcgttcggtatttagatttgtcgagtatggtttttgataggagatacgtttcgcgttttcgcgcggcgttttttttggttagtgggttttacgcggtttcgtttttttggttgttgttttcggttttattcgcgcggttattcgcggcggcgcgggcgtaggaagaggaggtcggtcggggttcgttttcgtcgtcgtatggttttttttgcgttgggaggatcgaattgtagtttagggttattgggtgtgatcggcgtttttcggatttcgttggggttatcgtttttttttttttttttttatttagttttagaaaagttggaggggaagttgggtacggtggtttatttttataatttattaatttgggagatttaggtaggaggatcgtttgaggttaggaatttaggattattttgagtaatatagtgagagtttatttttataaaaaatttttaaaaattagtttggcgtgggatgtttgtttgtggttttagttatttgggaggttgaggcgggaggattttttgagtttaggagtttgaggttgtagtgagttatgatcgtgttattgtattgtagtcggagcgagagagtaagattttattagggtttataggaagttaattttttttaggattaaggatatgttatattagtttttttagtatttttttttttatattggaggtaggatatgttatatttggattttgggtttttttgggatatagtttgtaaattatttttttttgtgaatttatagtttagtaagtagggattggtatagggtaggttttaatatttatttgttaagtaatggtttggttaggttatcgtgattaaggtggagtaggaaggtttgaattttggtataaaaagaaagaagttttatatgtagatttcggggagtatgggagtgtaaggaagaaggggatagtatagagttatatgagggtaggggttttagagtattatagaggtgaggtttttagttttgtaggtttagaaagagtatgttttttgatttaggtatttggaattaatttgtttttttagggtttgagaaaatttgaatgtaattcgtgaattttttttgagaagtgttaatttttaataggattttggggtagtttgggagtaggttattttttaaagtaagtaaagaaatgaataaagtttttttagttttgtttttttagttaatcgtttttggttttcgaagttttattttgttatagtttatttttaggttttttgtgtagatggttgtttattatatttggtttttatggattgattttttaaaggtttgggagtattgattaggttggagggaagggtaggtttttgaggttttatagtttttaggaagttgcgtatttgtttaatttttgttttttattttgtagattgtaaggtttataagagttaggttttattattattttttttagtttgtttttaagttggaatagagtacggaatgggtatataggagttagtatagtggttgcgatggtttaagtttgaagtcggggcgttgatttagtgaggttatttggaattgtgtttttttttttttattagttgggagtttgatatgtttttttattggcgaagatttagttggttttttttttattttttttatattcgttttttagtttttttttttttttttgtttttattattttagatttattagtttttttagttgttatttaaggtattattttgtttttttatttttagttattggttttttaggatttttgaattaagttttttttttgtattttatagttattgttttagattagggtatttgtttttaggttgttagagtgattgttttattatgtatagttgatcgtgttgttttttggttttaaattttttagtaattttttattatttatagaattggtttaatttttttagttaggattttgttttagtatattttttgggtattattttttatgaatttttttttaaatttgaaaatggttaaaattagtttttaaataggtttttgtaagagttattttttttgttttaagtgtttttcgtattttattatttataattttaaatttttggtgaatttttattgtttttgtaggttttagttgtgggtttttttttttagaatgttttcgtttgtaggtttgtttttttattatatttacggtttttagaaagtaggggttgcgtgtggtttatttttgtacgtttagttttcggtaggacgtggtacgaagtagtgttagtgtgaacggatgaatggattaaagtcgggagtagggttgtttttttgtagttttgttttatttttttcgttttatcgtaagttagcggtaggtttgtagtttttcgtttttatttttttttcgttttgggcgtgtttttaaaatttatagtcggtttttttgttttttagaatcgtttttagtttttgttttattttttttttagaggcgggttttgagtcggtattttttttttcggatagtttaagggatttagttaattggtttacgttttttttttagtttttttttacgtattttaagatttaaatcgagaatcgaaattaagttggggtttatggagtttgtattcgttcgattttcgaggttttagtaggatttcgttcggttttaggagtttattatgttttttttcgagattttttttgaaggtcgttagtttagttttagttttagttttatagaggtattattgggttaggggatgatggggttaagttttgttggtttgttgtggtggggagaggcgggaagagagggtttaacggaggatttggttaagtattttagagagtgatataaagcgggaagtttagatattagggttttgatcgtttcgggtggggtagggaagggagggtaggatagagtagaaaagaggatacggaggagttggggcggtttcgttgggttgcggtttttttattgagtagttgggtaaggtgagaagggttagtggttttcgggtttgggttttttcgtttattttcgagttttgttttaattttgttttagatgtaggattttagattagggaggatggaggtagtatttttgttgcgttggtttggagttaggggtatgttttaggtacggtaaaattaaaattaattttttagattcgaggtgagaaattggtttagattgaagaggtatttttgttaaggttttttagtttatgtggtttttgtttaaggaagtttttttaacgaattttttttttgttatattttttttgtttattttttatttttttcgataaaggaattatttgggttttttgttttgttgttttttaggtttttttatttttttttatgaaagtatagaggatatcgtattatagtaatttttataaatattattataattaagaataatattatttaataatattaggtaatatttatgagtattttaaatgtgttaggtattgtattaagtattttggtttttttttgttgttgtttgtttgttttgttttgttttttgtttgtttgtttatttgtttgtttttgagacggagttttatattgtcgtttaggttggagtgtaatggtgcgatttcggtttattgtaatttttttttttcgggtttacgttatttttttgttttagtttttcgagtagttgggattataggttacgttattatatttggttattttttatatttttagtagagatggggttttattatgttggttagattggtttttaatttttgatttcgtgatttatttatttcggttttttaaagtgttgggattataggtatgagttattatgttcggtttgtttttgtattttataaaatgtggtaaaatatatttaatggataagtttttatgttaattatttataagtgtattatttagtggtattaagtagatttataatattgtgtaattattattattatttatttttagaatttttttattattttagaaattttgtattttttaaattataggggagggaaagatggtttgtttttatttttttagtttttttggttgggttatgaattaaatagtttatgaattaaatagttataaaatagattattagcggaaaatttatatttaattatatatgtatatttaggagttttataatatatgagatttaaagaaaggttagatgattgaagtttgtataatattttgagttacggaaaagagtttggagtttttgggtgatggtgataatataagttatgggagggtgaggagaggagttgtttggtgaatagaggttgttttgttatgtagattaaaagtttttagataataaaagttgtttggagtagtttttttttaatatagattattttattaatgtagatttttttttaagatataaatgttttttttttttataaaaggagagttttttagagttatttttgtattagtagttttttagaataattagtttaaaatatgttaaagaagtatattttaagagttttttgtagttatattttgaagtggtgtgttttgagttttagtaatgtaatagttttttatttttttttttttttagtttttggtaatttttaatttattttttgtttttatgaatttatttattttagatattttatgtaagtggaattgttattagtagaggattttgattgtaaattgtttaggtttttggtattttgaataaagaattggataaaatgtatagtaaagtaaggaaagagtgaagtaatgaaagtagagatttattgaaaatgaaagtatattttatagggtgggagcggttagagtagggtttaaggattttagttatagaattttttgggttttaaatattttttagaggttttttattggttatttggtgtttattttattggttgtagaaagtaattaattagacgtatttttaattttttatttgttttgtaggaaatggggtgatttgtaaagagagtagttttttttttttttgttattgaggtatggagagttgcggtttttttttcgatttagttttaggaagttagagggaatcggttttaggttttttgtttttagattttatttttttgttttagaattatatagtgtttgattttttgtgattggtttattttatttagtataatgttattgaggtttatttatgttgtagtatgtattagaattttatttttttttaacgttgagtaatattttattatatgtgtagattatattttgtttatttatttatttgttgatggatatttggattgtttttatattttgtttattgtgaatagtgttgttgtggatattgttgtataagtatttgtttgggttttgtttttatattttttggttatatatttaagagtggaatttttgggttatattgttgttttatgtttatttttttaatgaatttttaaattgtgtattaagtattttatatgaggttggtatttagtgtatttattttttaaattgagttttttgaaggtagaatgtattttatattttttatattttagagtttattattgtgggtgatgagaagtagatgtttaataaatggtgtagtgagagttggagggtttgaataaatgggggtattggggtgttgataagttagggttttgtattatttaatgattggttggaatggaatatgaggttttattttagggtttagttgtaagggtggttggtcggtaggtgggggtttttgggatttttttaggttttatttgtttttttggttttttagt

SEQ ID NO: 1476 - DNA, 8333 bp, Artificial Sequence
  chemically treated genomic DNA (Homo sapiens)
gttgggggattagagaggtaggtgaggtttggagaagttttaaaagtttttatttatcggttaattatttttatagttggattttggagtaggattttatattttattttagttagttattggatgatgtaaaattttggtttattagtattttaatatttttatttatttaggttttttagtttttattgtattatttattgagtatttattttttattatttatagtaataggttttgagatataagaggtgtaggatatattttgtttttaaggaatttagtttggaaggtagatatattaagtattaattttatataaagtgtttaatgtatagtttgggggtttattaaagaggtaagtatggaataataatatgatttagaaattttatttttagatatataattaaaagatgtaaaaataaggtttaaatagatatttgtataataatgtttatagtaatattatttataatagataaaatgtagaaataatttaagtatttattaatagatgaatagataaataaaatgtggtttatatatataatggaatattatttagcgttagaaagaaatgaaattttgatatatgttataatatagatagattttaatgatattatgttaagtgaaataagttagttataaaaggttaaatattgtatgattttgaggtaggagaatagggtttggaggtagggaatttaaggtcgattttttttgattttttagaattaaatcgaaaggaaaatcgtaattttttatgttttagtaataaaaggaagagaggttattttttttgtaaattattttattttttgtagggtagatggaaaattgaaagtacgtttggttggttgttttttgtaattaatggggtgaatattaagtggttaatgggaaatttttagggggtatttggaatttagaagattttgtaattggggtttttgagttttgttttagtcgtttttattttgtggggtgtatttttatttttaataaatttttgtttttattgttttattttttttttgttttgttgtatattttgtttaattttttgtttaaaatgttaagaatttgaataatttgtagttaagattttttattggtaataattttatttatatgaaatatttagaataagtaagtttatagggatagaaggtagattagaagttattaagggttaggggaaggagaaaatgaggagttattgtattattggggtttaggatatattattttaaagtatgattgtaggaggtttttgaaatatatttttttggtatattttaagttggttattttgagaaattgttgatataggaatagttttgaaaagttttttttttgtaaaaaagaaaggtatttatattttaaaagaaaatttatattagtaaaatgatttatattaaaagagggttgttttagataatttttattatttaagaatttttaatttatatagtaagataatttttatttattaaatagtttttttttttatttttttataatttgtgttattattattatttagaagttttaagttttttttcgtagtttaggatgttatataggttttaattatttgatttttttttgagttttatatattgtgggatttttgagtatatatatgtaattaaatatgggtttttcgttggtaatttattttatgattatttaatttataggttatttaatttatagtttagttaaggaaattagaagggtggaggtaagttattttttttttttttatggtttaaagagtatagagtttttggagtaatgaaaaagttttggaaatagatggtggtgatggttatataatattgtgaatttatttaatgttattgaatggtatatttataaatggttaatataggaatttatttattaggtatattttattatattttgtaaaatataaaaataggtcgggtatggtggtttatgtttgtaattttagtattttgggaggtcgaggtgggtggattacgaggttaggagttagagattaatttggttaatatagtgaaattttatttttattaaaaatataaaaaatagttaggtatggtggcgtggtttgtaattttagttattcgggaggttgaggtaggagaatggcgtgaattcggaaggaggaggttgtagtgagtcgagatcgtattattgtattttagtttgggcgatagtgtgagatttcgttttaaaaataaatagataaataaataaataaaaaataaagtaaaataaataaataataataaaaaaaaattaaagtgtttaatatagtatttggtatatttgaagtgtttataaatgttatttagtattgttaagtaatgttatttttagttgtaataatgtttataaaagttattgtaatacggtgttttttgtatttttatgaaggggagtaaaagggtttgaaaggtagtagagtaagaaatttaagtagtttttttgtcgggggaggtgggaggtgggtaggaaaggtgtggtaagagaagggttcgttggggaggtttttttaagtagaaattatatgagttgggaggttttggtaaagatatttttttagtttgagttagttttttatttcggatttgggaagttggttttagttttgtcgtgtttgggatatgtttttggttttaggttagcgtaataggggtattatttttattttttttaatttgaagttttgtatttgaggtaaagttgaggtagggttcgagggtgggcggaagggtttaggttcggaggttattgattttttttattttgtttaattgtttagtggagaaatcgtagtttagcgaggtcgttttaattttttcgtgtttttttttttattttattttatttttttttttttgttttattcgagacggttaggattttggtgtttggatttttcgttttgtgttattttttagggtatttgattaaatttttcgttagatttttttttttcgtttttttttattatagtaaattaataaagtttaattttattattttttaatttaatagtatttttgtagggttggggttggggttgggttggcggtttttagagggggtttcggggggaggtatggtgggtttttggggtcgggcggggttttgttggggtttcggagatcgggcgggtgtaggttttatggattttagtttagtttcgattttcggtttagattttggagtgcgtgaagagaagttgaaggggaggcgtgagttagttggttgagttttttgagttgttcgaaaggggaggtgtcggtttagggttcgtttttggagaggaagtgagatagaagttgggggcggttttagggggtagagaggtcgattgtgggttttaaagatacgtttagagcggggaggaggtagaggcggagagttgtagatttatcgttgatttacggtaaagcgggagaggtagggtagagttgtaggggggtagttttgttttcggttttgatttatttattcgtttatattggtattgtttcgtgttacgttttgtcgggagttgggcgtataaagatgagttatacgtagtttttgttttttaagagtcgtagatgtaatggaagagtaagtttgtaaacggagatattttggaaaggagagtttatagttgggatttgtaaaagtagtggaaatttattagggatttagggttgtaggtggtggggtacgggggatatttgaaatagaaaagatagtttttgtaaaagtttgtttgggaattaattttggttatttttagatttaagagggaatttatgagaaatgatatttaaggagtgtgttaggataagattttagttgaggagattgaattagttttgtgagtgatgggaagttgttgaaggatttggaattagggaataatacgattagttgtgtatgatgggatagttattttgataatttaggagtaggtgttttggtttaggatagtggttgtgggatgtagaggagggatttgatttagagattttgggaagttagtgattggaggtgagggagtaggatgatgttttgagtgatagttggaaaggttggtggatttgaggtggtgggggtaggagggagggggagagttggagagcgggtatgaagagggtgaggggagagttagttaggttttcgttaatggaaaagtatgttagatttttagttggtaaggggaaaggggtatagttttaggtgattttattgggttagcgtttcggttttaaatttaaattatcgtaattattgtgttggtttttgtgtatttatttcgtattttgttttaatttagaaatagattagaaaggatgatgatagggtttggtttttgtaaattttatagtttgtagggtggagagtaggggttgggtagatacgtaattttttagggattgtaaggttttaggagtttgtttttttttttagtttggttagtatttttaggtttttagagaattagtttatgaaagttaaatatggtgggtagttatttgtataagggatttggaagtgggttatggtaggatggggtttcggaggttagaggcgattggttgaggaggtagagttggggaagttttatttatttttttgtttgttttggaagatagtttgtttttagattattttaaagttttgttggaagttaatattttttaaaggaaatttacgagttgtatttaggtttttttaagttttggagaggtaagttaattttaggtatttggattaaggggtatgttttttttggatttgtaggattgagggttttatttttgtggtgttttggggtttttgtttttatgtagttttgtgttattttttttttttttatatttttatgtttttcgaagtttgtatgtgaaatttttttttttttgtgttaaagtttaggtttttttattttattttgattacggtgatttggttaggttattatttaataaataagtattgagatttgttttatgttagtttttgtttgttgggttgtgggtttataaagaggaataatttgtagattatgttttagagaaatttaaagtttagatatggtatgttttgtttttagtgtgagagaaagagtgttgagaaggttgatatagtatgtttttgattttggagaagattggttttttgtaaattttgatgagattttgttttttcgtttcgattgtagtgtagtggtacgattatagtttattgtagttttaaatttttggatttaagagattttttcgttttagttttttaagtggttgggattataggtaggtattttacgttaggttaatttttaaaaattttttgtagagatgggtttttattatgttgtttaggatggttttgaatttttggttttaagcgatttttttgtttgagttttttaaattgatggattataggagtgagttatcgtgtttagttttttttttagtttttttagggttgagtaggagaagaggggaggaggcgatgattttagcggggttcgaggaacgtcgattatatttagtagttttgggttgtagttcggtttttttagcgtagggggagttatgcgacggcggaagcgggtttcggtcggttttttttttttgcgttcgcgtcgtcgcgggtggtcgcgcgggtgaagtcggaagtagtagttaggagggcggggtcgcgtagggtttattggttagggagggcgtcgcgcggaggcgcggggcgtgttttttgttaaaagttatgttcggtaggtttgggtatcgggcgttgtttttgggtgattttgatcgtttttagtagtcgagtttcggttttttgggttcgtagaagggttgtttgttttcggagcggggcggcgtggggataggggtcggtgagtggtcgtttggtacggcggagtcgggggggatcggtcggtaatttttaggttcgaatttttgttttcgaggagtcggtcggttcggtgtcgtcgtattttacgaggggggattgagaaagggatacgatgtggagagggggttggattcggcgtttggtgttagcgtcgattcgttttttttagggttatggggttttggttttagagttagttagcgttgtttttattttttaaaattttattttattatatttgttttcggtttttattagttttttaggtttgggaagacgttttaggtttttatttcgtatagaagaaatcgaggtttaggtagaggaggttattagtattttaaaggtatttgttgtagggaaatggaagaattttcgttttagggggtatttttagaagttcgggaattaggtattttttggatgtgtaggttaaaatgataggtttttagttgtttgttggatttgttttgtttttgttttgtttttaaagttttttgtggtttttttggtttataggttagattttacgttgtttagtttaatcgtttaattttggatttgatttttttttggtttttttgttttgaaagttttttttatttagaagttttttgagaggtttggtggattagagttaggtataaagtggagttttagtgttttggggtttagtttagagggtagggttttttggaagaatggagtagggttttcgattgttttttgtttagggttgggaggaaagcggtaaataattttattttagattttggagttgtttcggttttgtttttaatttgggtttttgaatttttaggggttaggatatttggtttggataagttttatttttttagttttgtttttgatttcgatttttaataatttttttgaattgaaataggtagggtttttttttgtttttgttttttgttgtttgttgtttttttgagatggagtttcgttttgttttttaggttggagtgtagtggcgttatttcgtgaaataggtattttttaatggttattaaggtattaaagttgggtgtggaatagaaaataataatttaattttttatttgtggttttcgttgataagttatttatgatttatttttgtaggttaaggtattatttttataaggatttttggaaagtatatttttggggttgatggtataggaggaatgtgttttgttagtagtatttagtgtatgtttatagatgtttaggtgtttttggttttatgttaggtatgggtaggtaatataaattaaacgagaggattgatttttatttagtttagtgaggagagtattattacgcggattggattttgagattgaatggttgttgtttagtagagaataaggttttgtgagggttgttggatttgggataaatgagtgttgatgtatgggaggagggaatagattttaatttgtagttgtttaaagatacgggaatattaggtaaggagttagattgagagttttgagaaggaaggagtttttcgaggggaaggtgggcgtaaggtatatttgtttaagtttatttcgtttggtagttgtcgtgtaggtttagttgattatttttgtttttatttgtagatgtattttagagttggtttttttgtttttgttatggttttattagttttttggggtttttgttgttgttggttattttttttatttttggttggtttgttttgaaggtaaggttggttgggttagtttttagggtggttgggttatattgagagttttggtattgatgaataaatttgtttattttttgttttttttttttaaatattattatttttttgtgtaatgggttaggtaagaattatttatttatattggttaggggaggaaattaaggtttgggtttgtttaaagttatattgggagttagtagggggtagaagtaagttttaaatttttaagttttgggatttggatattggttttaaggtatacgtagatgtttttgttaaattattttttttttgggttagaataaattagaaatgaaaatatttaatttagtttagttggtagtgtataataggaatttaggttttattttttataaggggtggtatagtgggaaaaggatgaattatggagttatagtttagtatcgtacgtgaaagttgggggaaggtggaagtttaaggaggttttgttttttgtgtagttataggtaatagtttttttttagaaaatttttgggtttggtgtggtttgtaagggggtttttaaatggttttatattttagttttaaaattgttatagaaataaatgttatgtgattttgaataggtttttttgtttttttgggtttttattttttaatttggatattattatttttttaggaggtttag

SEQ ID NO: 1477 - DNA, 9547 bp, Artificial Sequence
  chemically treated genomic DNA (Homo sapiens)
ttttttaatatttatataatattttattttatgattgtattaaaagttatttaattatttttttagtttttgagatttaggatgtttatatttttttttgttataaaatatattatttttatttggttatgaatattattatagttaaatttttgtatatttatgattttttaaagatatatttttagaattttaatttttgagtttaaaatttaaagtaaaataattatatgaggtttaggtttattattgaaattttttagattagatattttttagtttaataatgaagagtaaatatttttgaagttttgttcggtttttttttgaacgtttcgaaaggatttgatttttgtttgtgaatttttttggattagttgaggttttatatttgataagtggtgtaggaatttagagatgaagaaaatatttggtttttagtttattttaagtataattggtgttttttaggtttagaagtgtatatagaatgatgtattgtggggattatgatgcgtcgtggggtttgtttttttagggttttatttaggatcgtttgcgtttatttcgtttttgttggagattaatgttttattttttggtgtggtttcgattgtttgaagtaggtatttttttgggttatatgggtttttttgtgtattttttttaataaggataattttttatattaagttaaggttgtttttttcgatatttttatgtttggtttgtagtggtttagaaaatttttgtatttttttttatttcgtttattttcgtgtggtaagattgttttgtttttttattttatttgaatttatgttttattggagtagaagtatttttatttaggagtaaatagttttagaaaagttttagagtttgtaattttaagtatatatttatttttgatttttgtttaaattgttttttaattttttagttgttaatttatgagatgttagagaaaagattgtttttttttttttatttgtatttgtggaatttggtttttttaagtaataatgtatttgtgaatagagaattttttgtatttggtttggttttattgttataatataataattttgtgattttttttttttataggtgaaggagttaatatataatttattttaagatatttttttatattttaaagatgttatttagggaatagttttgtgttaatgtgagtttttttttgtgtgtgtttttatgttgttttttgattgcgtttgtgttgtttataaagaatattttttagggattgggatttgttataattttaaatttgtttatttgtagaagattttgttatagaagttaaattggttttttttgttttttttttttttttttttttttttttttttttttttttttttatttatatttttttttttttttttttttttttatttttttttttttttttttttttttttttttttttttttttttttttttttttttttttttttttttgttttttttttttgttttgtttgtttttttaataagttgtttttattcgatattaaaatagtttagttgagtttagatgaggtaggattgatttttgaggatttttttaggttagttgtgtttagggttggttaagaatttttatataggttgttggttatgaggatataggaaagattttatttttagtgtaaatattttttagatattgattgagtatttggtgggatagatgttgtaataataattttattatttggataaatattaaatttagatttgtttttggttttttttttggggagtttgtatagtgaaaaaattataggtttgggagttagaggaatggatttttttaagttttagttttggtatttattagttagtttttggaggaaatattgtaaattttttaagttttagtttttttatatagaaaatgattataatgattttttttaaataagatattgttatatgttaatagtattttattagttataaagtgcggaagggttttttttttttttaagagtttgttgggattttattgttatggataatattttatttttatgaaattaaaattttatttataggtaggattttgttagtgtttatgttatatagatatatggaatgtaaatgttttcggaggagtatatagttttgttggtaggatgagataggatttttgaaagttgtattaaatgtgattggtgttgaaaaaaaaatggatgttttaggatatgtttttgttttttaatggaaaaagaaacgtgaatgtataaatatgtataatgtgagaatattttttatataaataggatattaaatgatagtgtttatggaagtatgatgagaagatatgttaggaacgtgttgggtataattaggggtacggtagaatgtgagatagtttaggttgtgagtacgggatttgtagttagaatgtttggttggaatttagtttttgttatttttttgtagtgtgttttgagaaagtgattgaatatttcgttgtgttttagttttttttttttttaaaagaggatgatggggtgtttattttatacggttgtgaggattaagtgatttgatgtatataaaatatttaagatggtgtttggtatatgttaaatacgaagtaaatataatttattattattattattaaggatttgcggataattgatgttattgagtcgatggagcgtggtgtagtagaatagtttaggtgttagaaatagttagttttattgatttaattgtgtttttttagagaatttcgatttttattttttttatttgtaaatggaagggaggatagtaaataataataaatgttatttggtgattattttatgtgtttattttgtaagaggtttagtgggatatagtttatagttttgtagagatattgtttaatatagatgtatgggataggggttttatttggttgagaaaaggttattggaaatgggagacgaggaaggagttttttttatttgattttgggaagggaagagagtttggtttagatgggtaaagataagtgtgttggtatttggtagatagggttagtggtatataatagtgaatagttttattgttgatagttaatagggatttcggggtttggttgttggagatggaggatttgggtaaaagagacgtgaggttaagagagtaggttttagaatgtggagtttatggaaggagagagggagggttaattagattgtttttatttggttagaagttatgttttatatttattaggttttatttttttttttttgaatttttagtttttagattagaaataattttacgtgtttttaggtttgattttggtttgacggatagtagtttttgtcgtgtagtttttggagttgattatggtagtatttaggaaaagattgtttggagaggttgtaaaaattatgtttattgtttttagttttcgtatagattatgttagaggaggattgagggaggtttttttttttttttttttgttatatatacgtatacgcgtatatatatatatatagatatacgcgtatatatatatatcgttttgtttggtagaatagatttataatttgtataatattgtagtagtttatattgtattttatttttatttgggttttataatagaagggagttggaaggaaattagcgataatttaattttatatgataatttggttggataacgaaatatttagcggggagaaagatattggaaattatttatatttgagttttattttaaaatatttgagttagtttttttgattatggtttaggttaggttatttgtaaagtttttgagtgattttaaagaattattgttgtgaaaaataaaaatgattttagtaaagagagaaaggtgaaattattttattggtattggttgtgatgttggttgtgagtagatgttggttgtgggtagaataggggagagggttattgagaggtttttgtgattggagagtttaattaaacgtaaagtgtgtgatagggagggatttttttaaattttgtaggtttttttagattggggatttttaatataagaggaagttttatgttttaagtgttagaattttaggaaatttatgtaatgaaattagtttttttgtgttagagtttgtagttagaagcggtttaagggatggaggattttttgggagttggagtggtacgttgtaaagaatttaaatatgttataattttttttatttttttttttaagaatttttaattgtttttttagtttattttgtttgataggttagaaagtttttaatagtttttaatagaggttcgtttatttgtattgaattattttatgaaggttagtttgattcgggtatattaaagatagagtcggaagaatatatttttttaagttttattttaatgtataatatatgtgattatttgcgatggggtttaggtagataaggtaggtaatagggagtttttttaattaggggttggaataaaggaggtttgatttggtgatttttgagatatttggtttattgttgtgatgttgtgagagattagttgtgtaatgtttgggttttttaaaaggaagtttatttaaaataaaatttatttgtacgtatgtaatattgtagatatagattttttttatagtatatttaatttttgtagaatttattgggaggggaggggagttagtgggattttttggttattatataggttggtatttttagagagaatagttttggtattataggttttaggtatatttaaagttttttttttttttgattttagtttttttatgttttgtagggttttttgggattattgtattttggaaagtaaataaagttggatattgtttttttaaataatagaggttgagaattttttaggttattatgatatattttagtattggattagtttttgaataaattggaaagacgtttggtttggttttagttatagggagtattattagggaatatttcggggagtttggttggaagttgtaggtttagtttgtcggttgcgggtttttgattgttttgtggggagggttttgttttaatattttttgtatttggttgtaaagaaatttgtttggaagaaggggttacgttgtttggtcgggtgagttttattggtaaattgtgtttttgggtgatgtgtgtttatgttttataagaattgtttaattttttattttttgtaagtcgtaaatgaaaaggattgtaggagagatggtgtatttgtgttggaattgattggagatttagagggttttttatatttttggttaaaaggtggatatatattttggttggggaggtggggggttatttgagagtatttagaaattttaatgtatttagattgaaaggaagaaaggaatttagatgtttttttttttatggaaaatagttgtgtatatatagttggtaggtggttttggtaagtaggttagggagaagttgttatttgtggtagagttttggttagtcgggttttgggtgtggtaagtttggttagtaggtattgagtagtattttttttgttattattgagaattaggtaggaggttagaggtagtgagggatagatgggttgggtttatttgtttggtagtatatggtgtggttgtgatttgggtggttattgattaaattattgggtttaaaagaaaggaagaagcgagttgtagtatttaatatatgtatttttttgtatgtgtattagattttattaaaaagtttatttgaaaattataaaggaagggaaagaaaattttgagttagatatgtttatatttttaaagtgtttatttagaatagttttgagtatgttgtgattatataagtgttggttaaataaataaatgtttaaatggtataaaataaagtaataatttttagagtaaatttaatttataaaatgatttgtggaggaaagaaaatattgttatgtttttagatttttttttttatttgtatatgtatttttatttataaatttttatttatttatttatatttatttatttatttatttatttatttatttatttatttatttattagagttataagttattttagtgtagaggtggttaggttttttttgaaaggttgatgtgagagttaaatgtgatataataatagtggtggtaatttgggtattgggtttttattatgttgtagatacgatgttaattgttttgtatatattgttttttttaattattattataaatttttaaagtaggtattattatttttttttgtatttgagaaaattgaagtttagtgaatttgagaaattgtttaaatttataataaaagtaagtagggtgattaggtttgttggagtttagagttagagtgtttaattattgtattatattgttttttatagattatgtatataaagtttaggtaaagtgtttggtatataacgggtattgtaaatgtagtgtttataagtatattttattttaatttgataatacgatagttttaaaaagattattgtttgaagattttttttaaatttatttttatttatcgtaagaatatataattagttaaaatagtagttttttttaaatcgtaaaataatatagaattatttgaattattgagagtgatgagtttttatgatatagtatattagaggtagggaagtgtgtgtgtgtgtgtgtgtgcgcgcgcgtgcgtgaattgttgtatttttaggtagaaatttttaatatttatatttttgttttttgtttcgtgttttaaggttggtttgcgtacgggagttttagttgggcgcgtttttgttaagtcgagattgaagggggttagtttttttttttgtaacgttgggcgggttacgttaggaggttatgaattagttgatttttttggttgttttaattttattttaaatggttatttcgtattcgttcgttaaattttatggttaggattttagttaaggttgatagttaagttcgattgttgtaggaatattttgtttagagtttattcggtggtagtttggttttgtttaggttaggaggagtttaattttagattatgttatttagtagtcggtcggatttttttttttttaattcgtatttaagaggagttcgttagattaattttcgttaattttaggaagttggtatgtttcgtaggtgtagatagtaatagcggggatcggcgcggggtaggtgtgttcggttaagacgttaggatagggtaggggttttaggattcgagaggagagggattttttttagcgtttaagcgttcgttgttttttattagtgggaaaggaatttagttttagtttcgcgcgggcgcggtcggcgtcggcgggtttagaagtttagttttgggtattcgttgagttatatttggttgggtttttttagagtgggttgaggagttagtttttcggttaatattaggtttttacggggttaggggagaagggaggtgggaggtgagaaagtttagtcgtttttggtttcgagtaaaagtcgtcgcggttttgtagggatcgatttttttttgaggcgtatttaaggttaagtgattgttttttgtttttttttttttttgtttttttttttttttgagtttcgttttttcgtatacgttgatttagggatatattttattgtagcgacgtaaatagggcgttgttttcgttaaaggggaacgttaggagttttttattgtttttttgtttcgcgcgcgcgtagtttcgtagcgtagttttggcggcgttagtagcggagttaacgtattcgagtttgtgtttgaggttattttgaggatcgggatagttgtttttttgggttgtaagtgatttggtggggagagtgaaggagatggaggagaaatgtgggtattttttagtgagggtgttagaaagcgtagcgtaggcgcggggttttggttagttttttggggtttttgtttaggggtatagggttttttgtgtgttttgtttttttttaatgggttttggagtaatataacgaggagagtttttatggtttataagattttatagggtaagggtgatggtgttggtgtttggatagcggataagggcggtttagttttcgttttgttgaagaggcgttgattttgggatatattggtaaaatagtttttgtggcggatatttcgagagtgttggatttttgtggttttttagtttttagttttttgttatcggtttaatttaaattttttgggagttattagaaatttttgtttattttttttagtgtattttagagtttttttgaatgtgatgtttgtggagaggaatagaggggtttgggattgggtattttttaaattgggttattgaaacgttgtttttttggtttaagattttgtttaaaatggtttttagagttttagttagattttttatagttatgtatgttttttaataggttattttagtttttagtttttttaaagtttaaaatgaggggcgaggatcgtattatttgggataaatgttttgtcggttttgatcggttgaaattttcggatttagttttttattttttgtttttttttttcgttcgttggatatttatttttttcggtttaggtttttgggtttttgttttatcgtatttagatcggagtttaggtttgttggggttcgtgttttggttttgagtgtttggggtgtagattggatttttaggcgagtacgtgggtttagcgtaagagtagaatgttttttgattttaggggttgtttggggaagcgcgcggtggacgggaagcgtagggttcgggtaattttttcgagttatttttttttttttatattattttggttttgtattattttttcggagtcgttagagtttgcgcgaggttgagttggggttaggatcgtttttttacgttggtagagttgggtggaaatttggagataaacggaatgcggagagtattggggtttgggaaattagttttttcgtcgttgttttttttatcgtatgttacggttgtttttaggttttagacggaaatttgggtatttattttttttatttttatttttattttataggggaatttattatttgaatcggggtttcggagaacgtgattttttattttttagggaggtcgtcgggaggtgtttggggtgggtggaagcgtgtagtggtttttgtttatattttttggaaattttttcgttttttgggtggttttagacgtgcgaatcgtttgttttgtttttaaaagtaaaagatgtttcgttgtaggcgggttcggttgggcgttgggtattgggcgttggttttgtaggcggttgttgttttttttcggcggtaggcggcgcgaaggtttttgattcgcgcgggcggtcgggttgcgggcgttgggttaggtcgggtttttcgttagtgcgcgggattttttttttgcgcgcgttttcgtcgttcggtttagtgcgttcggttttacgtttagcgtttttttcgtagg

SEQ ID NO: 1478 - DNA, 9547 bp, Artificial Sequence
  chemically treated genomic DNA (Homo sapiens)
tttgcgaggagagcgttgggcgtgaggtcgaacgtattgggtcgagcgacggaggcgcgcgtagagggagggtttcgcgtattagcggaaggttcggtttggtttagcgttcgtagttcgatcgttcgcgcgggttaggagttttcgcgtcgtttgtcgtcgagagggggtagtagtcgtttgtaggattagcgtttagtgtttagcgtttagtcgggttcgtttgtaacggaatattttttgtttttggaaataaaataagcggttcgtacgtttaaaattatttagggaacggaggggtttttagaaaatatgagtagaggttattgtacgtttttatttattttaagtatttttcggcgatttttttggaaggtgagaggttacgtttttcgagatttcggtttagatggtgaatttttttatggggtggaggtaggggtgaggggagtaggtgtttagattttcgtttgagatttggagatagtcgtggtatgcggtgggggagatagcggcgaggaggttggttttttagattttagtgtttttcgtatttcgtttgtttttaagtttttatttaattttgttagcgtagaggaacggttttggttttagtttagtttcgcgtagattttggcggtttcggagaggtggtgtagagttagagtagtgtggaaagaaaagaatggttcgagagggttgttcggattttgcgtttttcgtttatcgcgcgtttttttaggtagtttttggggttagggggtattttgtttttgcgttagatttacgtgttcgtttaggggtttagtttgtattttaggtatttaaagttaggatacgaattttaataagtttgagtttcggtttgggtgcggtgggataggagtttaggagtttggatcgaagggagtagatgtttagcggacgggagagagagatagagggtaaaaggttgagttcgagaattttagtcggttagagtcggtaggatatttattttaagtaatgcggttttcgttttttattttaaattttgggggaattgaaggttgggatgatttgttagaggatatgtatggttgtgaaagatttggttgagattttggggattattttaggtagagttttgggttagggagataacgttttaataatttagtttggaaagtatttaattttaggtttttttgtttttttttataagtattatatttaaagaaattttggaatgtattggaagaaataaataaggatttttgatgatttttagagggtttgaattaagtcgatggtaggaggttgggaattggggaattataggagtttaatattttcgggatgttcgttatagggattgttttgttagtgtgttttagagttaacgtttttttagtaaggcgagaattgggtcgtttttattcgttatttagatattagtattattatttttgttttgtaaggttttatagattataaaggtttttttcgttgtattattttaagatttattggagggaaataggatatataggggattttgtgtttttaaatagaagttttagggagttggttaaagtttcgcgtttgcgttgcgttttttggtatttttattggaagatgtttatattttttttttattttttttattttttttattaaattatttatagtttaaaggaatagttgtttcgatttttagggtggttttaaatataaattcgggtgcgttggtttcgttgttggcgtcgttaaagttgcgttgcggggttgcgcgcgcgcgaagtaagggggtagtgggaggtttttggcgtttttttttaacgggaataacgttttgtttgcgtcgttgtagtagggtgtgtttttgggttagcgtgtgcgggagggcgggatttagggaggagagggggtaggagagagggagggtaggagatagttatttggttttaaatgcgttttaagaaaaagtcggtttttgtaaaatcgcggcgatttttattcgaaattagaggcggttgagtttttttattttttatttttttttttttttggtttcgtggagatttagtgttgatcgagaaattggttttttagtttattttgggaagatttagttaaatgtagtttagcggatgtttagggttgggtttttgggttcgtcgacgtcgatcgcgttcgcgcggggttgaggttggattttttttttattaatagagggtagcgggcgtttgagcgttggaagaagttttttttttttcgggttttggagtttttgttttgttttggcgttttagtcggatatatttgtttcgcgtcggttttcgttattattgtttgtatttacgaagtatgttagttttttaggattggcggggattgatttagcgggttttttttgggtgcgaattaggggaagaaaagttcggtcgattattggatagtatggtttgggattgggttttttttagtttaggtaaaattagattattatcgaataagttttaggtaaagtgtttttgtagtagtcgggtttggttgttagttttggttggagttttggttatggggtttggcgggcgggtgcgaggtggttatttgaggtggggttggagtagttaaggaaattagttgatttatagttttttaacgtggttcgtttagcgttatagggagagaggttagttttttttagtttcggtttggtagaggcgcgtttaattgagattttcgtgcgtaggttagttttgaggtacgggatagggagtaggaatgtggatgttaaaggtttttgtttgaaaatgtagtagtttacgtacgcgcgcgtatatatatatatatatatatttttttatttttagtgtattgtgttatagaagtttattatttttaatgatttaaataattttatattattttacgatttgaaaggagttgttattttagttaattgtatatttttacggtaagtaaaaataaatttgaaaaagatttttaaataatgatttttttaaaattatcgtgttattagattaaaatgaagtgtatttgtaaatattgtatttatagtgttcgttatatgttaagtattttgtttggattttatatgtatggtttgtgagaggtagtatggtgtagtggttaggtattttggttttgggttttaataaatttaattattttgtttatttttgttgtgaatttgggtaattttttaagtttattgagttttagtttttttaggtgtaaaaggaaatagtaatgtttgttttaaaggtttatggtggtgattgaaggagataatatgtataaagtagttaatatcgtgtttgtaatataataagggtttagtgtttaaattgttattattattattatattatatttaatttttatattaattttttagggaagatttgattatttttgtattaaagtagtttgtaattttgataggtaggtaggtaggtaggtagatagatagatagatagatagatatagatagatagataaagatttataaatgaaagtgtatatgtaagtagaaaaaaaagtttaaagatatggtagtgtttttttttttttataggttattttataagttagatttgttttagaaattattattttgttttatgttatttggatatttatttatttaattaatatttatgtgattataatatatttaggattgttttaagtaagtattttagaaatatgagtatatttaatttagggttttttttttttttttttgtgatttttaaataaattttttaataaagtttaatatatatatagaaaagtgtatatattgggtgttatagttcgttttttttttttttttgaatttaatagtttaattaataattatttaggttatagttatattatatattgttagataggtaaatttaatttatttgttttttattgtttttggttttttgtttggtttttaatggtggtagaggaagtgttatttagtgtttgttgattaggtttgttatatttagagttcggttggttaaggttttgttataggtggtagtttttttttaatttgtttattaaggttatttgttagttgtgtgtgtatagttattttttatgggggaaaaagtatttagattttttttttttttttaatttggatgtattagggtttttagatgtttttagatggttttttatttttttagttagagtatatatttattttttaattaaggatataaaaagttttttgaatttttagttaattttaatataaatgtattattttttttgtaattttttttatttgcggtttgtagggggtgggaaattaggtaatttttgtaaagtataggtatatattatttagaggtatagtttgttaataaaatttattcggttaaatagcgtaatttttttttttaagtagatttttttgtagttaaatgtaagggatgttaaggtaagattttttttatagggtagttagagattcgtagtcgatagattaagtttgtagtttttaattaggtttttcgagatgttttttggtggtgttttttgtaattgaagttagattaggcgtttttttagtttatttaggggttggtttaatgttgggatatgttatggtggtttgagaggtttttagtttttattatttaaagagatagtgtttaattttgtttgttttttagaatataataattttaagaggttttgtagggtatggagaaattggaattagaagggagaagagttttgagtatgtttgaagtttgtgatgttaagattgttttttttggaagtgttaatttgtgtaatagttaagaggttttattggtttttttttttttttagtgaattttgtagagattaaatatattgtgggaaggatttgtgtttatagtgttatatacgtgtaggtaagttttattttaaataaatttttttttaaggagtttaaatattgtatagttaattttttatagtattatagtagtgagttaaatgttttaagagttattaaattaagttttttttgttttaatttttggttggaaggattttttgttatttgttttgtttgtttagattttatcgtaaatgattatatgtgttgtatattagaataaaatttagggaaatgtgttttttcgattttgtttttaatgtgttcgaattaagttgatttttatgagataatttaatgtaagtaaacgaatttttattgaaaattattgaaaattttttaatttgttaggtagaataggttggaagagtaattggaaatttttggagagggaagtaaaggaagttatggtatatttaggttttttgtagcgtattattttagtttttagagagttttttattttttgaatcgtttttagttgtaaattttgatataagaggattggttttattgtatgagttttttggaattttggtatttggggtataagatttttttttgtgttagggatttttagtttggagagatttgtagaatttggaggagtttttttttgttatatattttacgtttgattggattttttagttataagggttttttaatggtttttttttttgttttgtttatagttagtatttgtttatagttagtattatagttagtgttaataaaatagttttatttttttttttttgttgaaattatttttattttttatagtagtggttttttagaattatttaagagttttgtaaatgatttagtttgggttatggttagagaagttgatttaggtgttttgggatggggtttaggtatgggtaatttttagtgttttttttttcgttggatgtttcgttgtttagttaggttgttatgtggagttagattgtcgttgatttttttttagtttttttttgttgtggaatttaaatggagatgaggtatagtgtgggttgttgtagtattatgtaagttataagtttgttttgttaggtaaaacggtgtgtgtgtgtgcgcgtgtatttgtgtgtgtgtgtgtgcgcgtgtgcgtgtgtgtgatagagagagagagagaggagttttttttagtttttttttgatatggtttgtacggggattgggaatagtgagtatggtttttgtagtttttttagatagtttttttttgggtattgttatgattagttttaaaggttatacgatagaggttgttgttcgttaggttaggattaagtttgaagatacgtaagattatttttgatttaagagttaaagatttagaggaaaaggggtagggtttggtgagtgtggggtatggtttttggttagataggagtagtttgattagttttttttttttttttttatgagttttatattttgagatttgtttttttggttttacgttttttttgtttaggttttttatttttagtagttaaatttcgaagtttttgttggttgttagtagtagagttgtttattgttgtgtgttattggttttgtttattagatgttaatatatttgtttttatttatttgggttagatttttttttttttttagagttaggtgaggaaaatttttttttcgttttttatttttaataatttttttttagttaaatgggatttttattttatgtatttgtgttgagtaatgtttttgtaaagttgtaggttatattttattgagttttttgtaaaataaatatatagaatagttattaaataatatttattattatttgttatttttttttttatttatagataggaaaaatgagaatcgggattttttgaggaaatatagttgagttaatgagattggttatttttagtatttgagttgttttgttatattacgttttatcggtttagtagtattagttattcgtaagtttttgataatgatgataataggttatatttatttcgtgtttagtatatgttaggtattattttgaatattttatatgtattaaattatttaatttttataatcgtatgaaataggtattttattatttttttttagaagagggagaaattgaggtatagcgagatgtttagttatttttttaagatatattgtaaagaaatgatagaggttggattttaattaggtattttggttatagatttcgtatttatagtttggattattttatattttatcgtgtttttaattgtgtttagtacgtttttagtatatttttttattatgtttttatagatattattatttaatgttttatttgtatgaaagatatttttatattatatatatttatgtatttacgtttttttttttattaaaaagtaagaatatattttaagatatttattttttttttagtattagttatatttagtatagtttttaagaattttgttttattttgttaataaggttgtgtgttttttcgaggatatttgtattttatatgtttgtatagtataagtattggtagaattttgtttgtaggtgagattttaattttataagaatgaaatgttgtttatgatagtggaattttagtagatttttgaagagggaggaaattttttcgtattttatagttaataaaatgttgttaatatatggtagtattttatttaagaggaattattataattattttttatgtgaagaaattgaggtttggaaaatttatagtgttttttttagggattagttagtgaatgttagggttggggtttaaaaaagtttatttttttgatttttaaatttgtaatttttttattgtgtaggttttttagagagaaaattagaggtaagtttgaatttggtgtttgtttaggtgatgaagttgttgttgtagtatttattttattaggtgtttagttaatatttgaaaagtgtttatattaagaatgaagttttttttgtgtttttatagttagtagtttgtgtgggagtttttggttagttttggatatagttggtttggaagggtttttaaaagttagttttgttttatttagatttagttagattgttttgatgtcgagtgagagtagtttgttgaaagaataagtaaggtagggaaagaaggtagaggggaaggaaggaaggaaggaaggaaagagggagggagggaggaaggaaggaaggaaggaaagatggaaggagagagggagggagggagatatagataggaagaggggagggaagagaaggagaagggagaagaaaaggaatagaaggagttagtttgatttttgtgatagaattttttataaataagtaagtttgaaattatgataggttttaatttttagaagatattttttatgaataatatagacgtagttagaaagtaatataaagatatatataaaaaaaaatttatattggtataggattgttttttaaatgatatttttaaaatatagaaaggtattttggagtaaattgtatattaatttttttatttgtgggagagagaagttatagaattattatgttgtggtagtgggattagattaagtataaaggattttttgtttataaatgtattgttgtttaggaaagttagattttatagatgtaagtggaggggggaaagtagttttttttttgatattttatgagttagtagttagaggattggggagtaatttaagtaagagttagaaatggatgtgtatttgggattgtaaattttaaaatttttttaagattgtttatttttaagtgaaaatgtttttgttttagtagggtataggtttaaataaaatggggaagtagagtaattttgttatacgggaatggacggaatggggaggaatgtagggattttttaggttattgtagattaggtatagaaatgtcgagaaaagtagttttggtttgatgtgagagattgtttttattgagagaggtgtataggaaggtttatgtaatttaaggaaatgtttgttttaggtagtcgaagttatattaagaaatggagtattaatttttagtaaggacgaggtgaacgtaaacggttttggatgggattttgggaggataagttttacgacgtattatagtttttataatgtattattttgtgtgtatttttgagtttagggagtattagttgtatttaaaatgaattggagattagatgttttttttatttttgagtttttgtattatttattaagtgtgaaattttagttaatttagggaagtttatagataaaggttaaattttttcgagacgtttaagggaaagtcgggtaaaattttaagaatgtttattttttattgttagattaggaaatatttaatttagagggttttagtggtaagtttgggttttatataattgttttattttaaattttgggtttagaaattaaaattttagaaatgtatttttagaaagttatggatatgtaaaaatttggttataatggtatttatagttaaataaaggtgatatgttttataataaagaaaagtgtgaatattttaaattttaaagattagaggaatgattgagtaatttttggtatagttataagatgaaatattatgtaagtattaaaaaa

SEQ ID NO: 1479 - DNA, 8013 bp, Artificial Sequence
  chemically treated genomic DNA (Homo sapiens)
ggttgaaatattttattttagtttggaagtacgtttatggggttaagtaattaattttataaattatttttttgtttttttttttttgttttggagatagggttttattttattgtttaggttggagtgtaggggtgtgattatggtttattgtagttttgattttttgggtttaagtgatttttttgttttagttttttgagtgtttgggattataagtgtgtgttattaagtttggttaatttttaaatttttttgtagagataaagaattgcgttatgttgtttaggttggttttaaatttttgtttttaagttatttttttattttaggttttaaagtgttgggaagatagtcgtgagttattatacgtggttaggttattattttttatttagtttattttatttcgtatttattttagtttatttttgtaaattattttttaagatggtagttggaaagatttaaaaagaaatttaaggttgggcgcgttgattgatgtttataattttagtattttgggaggtcgagaggggtagattatttgaggttaggagttcgagattagtttggttaatatggtgaaatttcgtttttattaaaagtataaaaattagttaggtgtggtgtgggtgtttgtaatattagttatttaggaggttgaggtaggagaatcgtttgaattcgggaggcggaggttgtagtgagtagagattatattattgtattttagtttaggcggtagagtgagattgtttttaaaaaaaaaaaaaaaaaaaaaaaaattagatattgttaatgttttttttttgttaatttgttaggtgtttaggataaaatgttaaatatttaatatggttttatagatattttgtattatttggtttttggttattttattttatttaatttcgttttttgtttgtgttttagttatattgttcgaggagtttttaaattattattttggttttgattatagatttttatatgtgttgttttttttatttgtattatttttttttttttttttgtttgtttaatttttatttattttcgggtttaattagtatttttttattttttttagtttgttgtttttatttaagattaaacgttagagaaatgtgaagtttattgattttcgggtggaatagagtttagtatgttaattaaattattgagtgttggttaggtatagtggttgatatttgtaattttagtattttggaagggcgaggcgggtggattatttgaggttaggagttcgagaggataatatgatgaaattttatttttattgaaatataaaaattagttgggtttggtggggggtatttgtaattttagttattggagaggttaaggtaggagaaaattgtttgaattcgggagatagtggttgtagtgagttgagattgcgatattgtattttagattgggtgatagagtgagattttgttttaaaaataaaaaaaatttcggttaggaatgaagaatgtttgaagtattgtatgtgtaacgtggtttgtgatttttaagttttgagtgtagcgtgatttagtttttcgtgatttgagtaataataaaatgtttaagatttgttttatgttattcgtgttttttaatgttggtttgttgttttttttgttgagattagattgtgatgtggtatattgtttttttttattagttttaatttatatgtatttataaatagtttattttttatgttgtttttatttattttggagatatttgattgtttttttttttttttttttttttgagatagggttttattttgttgtttatgttggagtttagtggtaggattatagtttaatgtagttttgattttttgggtttaagtgatttttttattttagttttttgagtagttggaattataggtatatgttattatatttggttaagttttgtattttttgtaataatggggttttattatgttgtttagattggttttgaatttttaggtttaagtgatttttttgttttggttttttaaagtgttgggattatagacgtgggttattgcgtttggttaagatgttttatggttaattatttgttcgtattgttattattttttagagaaattgttagaagagtgagattatgtgttttttaagtttataaaaatttaaaagaagttaggtagtagatttaaaaataaataaaatagattttgtaaaatttggttttaaatgaaaggtgatattttttaatttggattgtttttttggttttatgggattgtgtagttggagggtgattgggttttgtttttacggtattttttaggtgtagggattattgaattatgtttgttatttttgttttagttttgtattgaaataatagttgtgttattgggttttaaaagaaagtttgttttttttgatttaggtagaaagttattaaagaaaatagaaggataataagtagtgggaaaatagattagaaaagttatcgatttatttattttgtgttagaaatggataggtttgttttttttgttggaaatttaggatgtacgtttgtaatgagaaaagagtgaaagatttgagtaggtatattataaaagtataattatagcggttagtgaatatgaaaaggtttttaagttagagaagtttggagaaatttaaattaaaattattttaggatattacgttatatttattagttttgggtagggtgtaaatattaggaatttttttattttgttggtgagcggtgagcgagcgtataaattagtataattttggaaaataatttaatagagtggaaagttaggcgggtcgttgagttagtagttttatttattagtatatattttatgtttgtttttttgtataagagtatttattgtaggattgtttatagtaagttaaaatggaaaataatttagtgtttttgagtaagtaggatggataagtatatggtggagagttatgtaatagaacggtatagtatagagatgatgaatatttttgatattataataaaatgatttttaaaataatatttacgaaaaagaagttagggttgggatttagtggtttatgtttgtaattttagtattttgggaggttggggttagaggatcgtttgtggttaggagattgagattattttgggtttttataattattttttatgtagagatgtggtaagattttatttttatattaaaaaaaaaaaaatatttagatatattagattatacgttgtatgtttatttatatgaagattattgtttaggggtcgggtacggtggtttatatttgtaattttaatattttgggaggtcgaggcgggtggattttttgaggttaggagttcgagattagtttggttaatatggtgaaatttcgtttttattaaaaatagaaaaattagtcgggtttagtggatagcgtttgtaattttagttatttaggaggttgaggtagagaattgttttaatttgggaggtagaggttgtagtgagttaaaattatattattgtattttagtttgggtgatagagtgagattttatttgaaaaaaataaaaaaaaaaataaaaaattagattatattgtttagggataaatagttgataaaataatagagataagtaagatataattattataaaaattaggatttggggttgggggtggagagggaaggtttaagtggaaagaatggagtggtgataatgtgtgttaatttgggttatggtgattttggggttcgttttgtaattttttaaaatgagtatttatgtgttatttattttttagagggtagaatttttgaattaaaatgtttaagtaattatatattaaaaaaagaaaaaatatggatagatttgtattttaattaaaatatttaaaaaatagagataagggtttcgttatgttgttgagagtggttttaaatttttgggatttaattgattttttcgttttagttttttaaagcgttgagattttaggcgtgaattatcgcgttcgatttggaaagatatatatatatatatatatatatattttttttttttttttttttttttttgagatagagtttagtttttgttgtttaggttcgagtgtaatggttcgattttagtttattgtaaatttcgtttttagggtttaaacgatttttttgttttagtttttcgagtagttgggattataggcgttttattatattcggttaatttttgtatttttagtagagacgaggttttattatgttggttaggttagtttcgaatttttgattttaggtgattcgttcgtttcggttttttaaagtgttgggattataggcgtgagttacggcgttcggtttggataaattttttaaaatataaaagtttgagtgagtttttggtcggtcggtatagatgtcggggtggggtcgtgaatcggttgggacgcgttcgtttcggtttggggggattcgggttagtagtcggtcgtcgcgcgtgcgtattgggcggggggtttcgcgtttttatttgtacgtggttagcgttcggcgttgggtcgtagtttttgtcgtgtacgttggggagtcggtatatgtaggtgggaagttttatacggagaggcgcgtcgttttcgtgatagggttttatttggtatatcggtatggtagaattaaagtaaaagggggtagcgcgtgttaaaggttaacgtttagaaatcgttagaggttacgacggagatcggttattttttttttgattttgttgcgggcgttcgggaaaacgtagttcggtgtgttttgattggtttaggttttttgacgttacgaagtcgatttttgatagagttaataggcgaaaaggagagacgggaagtatttttgtcgtttcgttcggaaagggtggagtataacgtcgaaagtagttaatgggagtttaggaggcggagcgtttgtgggagttttggagggaatttttttagttttcgaggcggatcgggtgttgtatttatggagcgagttgagagttcgaggtgagcggggttcgtagtttttcggtgttttttttcgcgcgttttttttgagatttacggtattttaatttttttggaaatggggggaatatggtcgaggcgcgtggcgaggtagttttttggaggtttcggagtggcgattttagtgttgtagcgatttcgtgttttttgggtgcgttttgaggtcgaggtaagttttttcggggttttgggttgcgggtaaaggattcggttttgtgaggagttgggttcggtttgttttagataggttttgtttatattttattatagggtcgtggatttgaagcgggagcgtgaaatttttatagattgaatgtattttttttttatttgttttttttttttttttatttttatttttatagtattttatttttaatttttttttgtagagacggggatttcgttgcgttgtttaggttggtttcgaacgtttgagtttaagtaattcgttcgttttggttttttaaagtgttggaattaaaggtatgatgtatcgtgtttggtttttttaaaaaattaaggttattttggggacggtagagcgtttagatatatttttatttgtatagttgcgtagtttttaaaaatgtaatacgtttttatttgttaggatgtgtgatttttggttggtaagttatatcgaattttggttagtatatttgtattttatgttagatttgtaaacgtaaatttgttttttgtatttaaatatattagatatatttaggtaattatatttaaatgtattgagatatttaaataaatttggggtttgtgtttaaatgcgttttttttttaaaataaatatttgaagtgggtcgagagcggtgatttacgtttataattttagtattttgggaggttaaggcgggtggattatgaagttaggagtttatgattagtttggttaatatggtgaaattcgtttttattaaaaatataaaaattaattgggtatgatggcgggagtttgtaattttagttattttggaggttgaggtaggagaatcgttggaatttaggaggcggaggttgtagtgagttgagatcgtgttattgtagttcggtttgggtaacgtagtaagattcggttttaaaaaaaaaaaaaaaaaaaaattagaagtggatttgtagtttatagtgtgttgttaaataaatttatttttagagatatttttttttattttttgtgaggttatttgtagttttatatggtagatagatttaggtgagatttttagtaaggtggaatgaagagtaaagaggtttgtttattttagaagggtttattaaaggtttacgatgtgttaaatgttgtaggaaatatttagtgattttttttttatggaggttttttgtttttttttaataagttattaattaaattgtttgttggaaattgttaagttaatgaatatacgggatatattttttgagtagatattgtttgggtagaggaggaagaggagagcggtttagatagagatttgtttatatattgtagtgttttaaagagtttgtgatgtttaggatagttgtttattgtgttataatataggggatggttggttgcggttttttgtaattttagtattttgggaggtcgaggtaggcggattatttgaggttaggagttcgagattagtttggttaatatggtgaaattttattttttttaaaaatataaaaattagttgggtgtgatggtgggcgtttgtaattttagttatttgggaggttgagataggagaatcgtttgaatttgggaggcggaggttgtagtgagttgagtttatgttattgttttttagtataggtaacggggtgagattttgttttaaataataataataataataataataataataataataataataatgtaggggatttgatgaagggaaaggattagagagattttgaaaagaaggtagttttggttttaatgatgattaaattttaatttttatatagtaggaagtggggtattagtaaatttttaagtagaaaaattatttgattagatttgtgattttaaaaatagttttggtgatagagtggaggatgtattggagtagggaataaggggagataaaatttttataaaatttttaaagttagtatagtaagagttttgagggtttttgttaagatagtagttggtagttttagtttggagtggggtattaaaggtaattgtgtataaggaatagttatataattggtatttaatttttgagatgattttgatttaaatattgtgtattttttagtatattgttggtttttttaattatgttgggaaattatgttatttttatttttttttttgttcgttgtttaggttggagtgtaatgtcgtaattttagtttattgtaattttcgttttttggatttaagcgatttttttgttttagttttttgagtagttaggattataggtgtttattattatgtttggttaattttttgtatttttagtaaagacggggttttatcgtgttggttaggttggtgtcgaatttttgattttaagttatttatttatttttgttttttaaagtgttgggattataggtatgagttattatagttagttatgtttttattttttaagaaagaagatattattgttgttaaagattttggtaatttgagagatataatgtatgttttttttatgtggattttagtataattagatagtaaggatttgttgaatttgaagtatttatttagaagtattttgggtatatgtttaaggattgtaaaatagtgtttttatttttggatataataaatgtatttgttaatataataaatgaatagattagatttataaattatttatagtgttgagttattttttatagttaaaattaggatgaaaatatatagttgaatatttgatttgttttttgtaattgatttttttagt

SEQ ID NO: 1480 - DNA, 8013 bp, Artificial Sequence
  chemically treated genomic DNA (Homo sapiens)
attagagaaattagttataagaaataaattaagtatttagttatatatttttattttgattttaattgtgggaaatgatttaatattgtaaataatttatgggtttaatttatttatttattatattagtaaatatatttattatatttagaaatagaaatattgttttataatttttaaatatgtatttaaaatatttttggatagatattttaaatttaatagatttttattatttaattatattaagatttatatggagaaaatatatattgtattttttaaattattaaaatttttggtaataatggtgtttttttttttgaaaagtgaaagtatggttggttgtggtggtttatgtttgtaattttagtattttgggaagtagagatgggtggataatttgaggttaggagttcgatattagtttggttaatacggtgaaatttcgtttttattaaaaatataaaaaattagttaggtatggtggtgggtatttgtaattttagttatttaggaggttgaggtaggagaatcgtttaaatttaggaggcggaggttgtagtgagttgagattgcggtattgtattttagtttgggtaacgagtaaaaaaaaaaatgaaagtaatataattttttaatataattagaaaaattaatagtatgttgggaaatatataatgtttaagttaaaattattttagaaattgggtattagttatataattattttttatatatagttgtttttgatattttattttaaattgaagttgttagttgttgttttagtaaagatttttaaagtttttgttgtattagttttaagagttttataaaggttttatttttttttattttttgttttaatatattttttattttattattagagttatttttgaaattataaatttggttaaataatttttttgtttaaaaatttattagtgttttattttttattatatgaaagttaaaatttagttattattggggttaaaattattttttttttagaatttttttaattttttttttttattaagttttttatattattattattattattattattattgttattattgttattatttgagatagagttttatttcgttgtttatgttagagggtaatggtatgagtttagtttattgtaattttcgttttttaggtttaagcgatttttttattttagttttttaagtagttgggattataggcgtttattattatatttagttaatttttgtgtttttagaagagatagggttttattatgttggttaggttggtttcgaatttttgattttaggtgattcgtttgtttcggttttttaaagtgttaggattataggggatcgtaattagttattttttatattgtagtatagtgaataattgttttgaatattataagttttttgagatattatagtgtataagtaggtttttgtttaaatcgttttttttttttttttttgtttaaataatgtttgtttaaagaatgtatttcgtgtgtttattaatttagtaatttttagtaaatagtttaattgataatttgttaagagaaggtaggaaatttttatgaaagagaaattattgggtattttttatagtatttaatatatcgtaggtttttaataaatttttttgaaataaataaatttttttattttttattttattttgttaagaattttatttaagtttgtttattatgtgaaattgtagatgattttatagaaaatggaaagaagtatttttaaaaataagtttatttggtagtatattataggttataggtttatttttgatttttttttttttttttttttgagatcgagttttgttgcgttgtttaggtcggattgtagtggtacgattttagtttattgtaattttcgttttttgggttttagcgatttttttgttttagtttttaaagtagttaggattataggttttcgttattatgtttagttaatttttgtatttttagtagaaacggattttattatgttggttaggttggttatgaatttttgattttatgatttattcgttttggttttttaaagtgttgggattataggcgtgagttatcgttttcggtttattttagatatttattttgaggagggagcgtatttagatatagattttaaatttatttaaatgttttaatatatttaaatgtagttatttaaatatatttaatatatttaaatgtagagagtaaatttgcgtttataaatttgatatggaatgtaaatgtgttagttaagattcggtgtagtttattagttagaaattatatattttaataggtagaaacgtattgtatttttaaaaattgcgtagttatgtaaataaggatgtgtttggacgttttatcgtttttaaaataattttaattttttaaaaaggttaggtacggtgtattatgtttttaattttagtattttgaggggttaaggcgggcggattgtttgagtttaggcgttcgagattagtttgggtaacgtagcgaaattttcgtttttataaaaaaaaattaaaaataaaatattataaaaataaaaataaaaggggagagagaataggtagaaaggaaatgtatttagtttatggggattttacgttttcgttttaagtttacggttttgtgatgggatgtgggtaaggtttgtttgggataggtcgaatttaattttttatagggtcgaattttttgttcgtagtttaggatttcgaaggagtttgtttcggttttaaggcgtatttaaggggtacgagatcgttgtaatattgaggtcgttatttcggggtttttagggggttgtttcgttacgcgtttcggttatgttttttttatttttagggaggttggaatgtcgtgggttttaaagagggcgcgcgagaggggatatcggaagattgcgagtttcgtttatttcgagtttttagttcgttttatggatgtaatattcgattcgtttcggggattgggaaagttttttttagggtttttataggcgtttcgttttttgaatttttattggttgttttcgacgttgtgttttatttttttcgggcggggcggtaaaaatatttttcgtttttttttttcgtttattggttttgttaaaggtcgatttcgtgacgttaaagagtttgggttaattagagtatatcggattgcgttttttcgaacgttcgtagtagggttagaagggaggtggtcggttttcgtcgtgatttttgacggtttttgagcgttggtttttggtacgcgttatttttttttgttttggttttgttatgtcgatgtattaggtaaagttttattacgggggcggcgcgttttttcgtgtggagttttttatttgtatgtatcggttttttaacgtgtacggtaggagttacggtttagcgtcgggcgttggttacgtgtaggtaggagcgcggggtttttcgtttagtgcgtacgcgcggcgatcggttgttggttcgggtttttttaggtcggagcgagcgcgttttaatcggtttacggttttatttcggtatttgtgtcggtcggttagggatttatttagatttttatgttttaaaagatttatttaggtcgggcgtcgtggtttacgtttgtaattttagtattttgggaggtcgaggcgggcggattatttgaggttaggagttcgagattagtttggttaatatggtaaaatttcgtttttattaaaaatatagaaattggtcgggtgtggtgaggcgtttgtaattttagttattcgggaggttgaggtaggagaatcgtttgaattttggaggcggagtttgtagtgagttgagatcgagttattgtattcgagtttgggtaataagagttaaattttattttaaaaaaaaaaaaaaaaaaaaaaaaaatatatatatatatatatgtatgtatttttttaggtcgggcgcggtggtttacgtttggagttttagcgttttgggagattgaggcgggaggattaattgaattttaagagtttgagattatttttagtaatatagcgagatttttgtttttattttttaaatgttttaattaaaatataaatttgtttatattttttttttttttaatatatggttgtttaaatattttggtttagagattttattttttgaaaagtgaatagtatataaatgtttattttgaggaattataaagcgaattttagggttattatggtttaggttgatatatattgttattattttattttttttatttaaattttttttttttatttttaattttaggttttgatttttatggtaattatgttttgtttgtttttattattttgttaattatttatttttaaataatatagtttggttttttgtttttttttttgttttttttagatggagttttattttattatttaggttggagtgtagtggtgtgattttagtttattgtaatttttgttttttaggttgaagtaattttttgttttagttttttgagtagttgagattataggcgttgtttattggattcggttaatttttttatttttggtagagacggggttttattatgttggttaggttgatttcgaatttttgattttaagagatttattcgtttcgattttttaaagtgttgggattataggtgtgagttatcgtgttcggtttttaaataatagtttttatataggtaagtatatagcgtatagtttgatgtgtttgggtgtttttttttttttaatgtagagatgaggttttattatatttttatataaaaggtggttatggagatttaaggtggttttaattttttggttataggcgattttttaattttagttttttaaagtgttgggattataaatatgagttattgggttttagttttggtttttttttcgtagatattattttaggagttattttattgtaatattagaagtatttattatttttgtattatatcgttttattgtatgattttttattatatatttatttattttgtttgtttagggatattggattgttttttattttaatttgttatgaatagttttgtagtgaatatttttatatagaggagtaggtatggggtatgtattaatgaatgggattgttggtttagcggttcgtttggttttttattttattaaattgttttttaaagttatattggtttatgcgttcgtttatcgtttattagtagggtagaagaatttttgatgtttgtattttgtttaaagttggtgggtgtagcgtggtattttaaggtagttttagtttggatttttttagatttttttaatttgaggatttttttatatttattggtcgttgtgattgtgtttttgtaatgtatttgtttaagttttttattttttttttattgtaaacgtatattttaggtttttagtaggagaaataggtttgtttatttttgatataagatgggtgaatcggtaatttttttggtttgtttttttattgtttgttatttttttgttttttttaatggttttttgtttagattaggagggatagatttttttttgaaatttaataatataattgttattttagtatagagttaagatagaaatagtagatatagtttaatggtttttgtatttagagagtgtcgtggaaatagggtttagttattttttaattgtatagttttatgaagttaaaaagataatttaggttggagaatgttattttttatttaaggttaagttttgtagagtttgttttatttgtttttaagtttgttgtttaattttttttgggtttttgtgaatttagaggatatataattttatttttttagtagtttttttaggaggtgataataatgcggataaataattagttataaaatattttggttaggcgtagtggtttacgtttgtaattttagtattttgggagattaaggtaggaggattatttgaatttaggagtttaaaattaatttgggtaatatggtgaaattttattgttataaaaagtataaaatttagttaggtgtggtagtatgtgtttgtagttttagttatttaggaggttgaggtgggaggattatttgagtttaggaggttagggttgtattgagttgtgattttgttattggattttagtatgggtaatagagtaaaattttgttttaaaaaaaaaaaaaagaaaaaaagtaattaagtatttttagggtaaatgaaagtaatatgaagaataagttgtttataaatatatataaattaaaattaatggagaaaaatagtatattatattatagtttagttttagtaaggaaaataataggttaatattagaagatacgaatgatataaaatagattttgaatattttgttattatttagattacgaaggattagattacgttgtatttagggtttaaaaattataagttacgttatatatatagtattttagatattttttatttttgatcgaggttttttttgtttttgagatagagttttattttgttatttagtttggagtgtaatgtcgtaattttagtttattgtagttattgtttttcgggtttaagtaatttttttttgttttagtttttttagtagttgggattataggtgttttttattaagtttagttaatttttgtgttttagtagaaatggagttttattatgttgttttttcgaatttttgattttaagtgatttattcgtttcgtttttttaaagtgttgagattataggtattagttattgtgtttagttagtatttaataatttaattggtatattgaattttgttttattcggaagttagtggattttatatttttttgacgtttgattttaaataagagtagtagattaggagaggtgagaaagtgttgattaagttcgaaggtaaataggagttaagtaaataagagaagaaggaagagtgatgtagatggagggaatagtatatgtgaagatttgtggttagagttagggtggtggtttaggaatttttcggatagtgtggttagagtataggtaaaggacgaaattgggtgaggtaaggtagttagaggttaaatgatataaaatgtttgtgaagttatgttaaatgtttgatattttattttaagtatttagtaggttagtaagggggagatattgataatatttgatttttttttttttttttttttttttggaaatagttttattttgtcgtttaggttggagtgtagtggtgtgatttttgtttattgtaattttcgtttttcgggtttaagcgatttttttgttttagttttttgaatagttggtattataggtatttatattatatttggttaatttttgtatttttagtagagacggggttttattatgttggttaggttggtttcgaatttttgattttaggtgatttgtttttttcggttttttaaagtgttaggattataggtattagttagcgcgtttagttttgagtttttttttaagtttttttagttgttattttaaaggatggtttgtaggggtggattagaatgggtgcgaggtggaataggttaggtgaagaatggtggtttggttacgtgtggtggtttacggttgtttttttagtattttgggatttgaggtgggaggatggtttgaggataggagtttgagattagtttgagtaatatagcgtagttttttgtttttataaaaaaatttaaaaattagttaggtttggtggtatatatttgtagttttaggtatttaggagattaaggtaggaggattatttgagtttaggaagttaaggttgtagtgggttatgattatatttttgtattttagtttgggtaatagagtgagattttgtttttaggataaaaaaaaaaagataagaaaatgatttgtggaattgattatttggttttatggacgtgtttttaagttaaaataaagtgttttaatt

SEQ ID NO: 1481 - DNA, 6174 bp, Artificial Sequence
  chemically treated genomic DNA (Homo sapiens)
  unsure 5062: n is a or g or c or t
agttaattaaaaatatgaatttaaaaaaaaaaaaaaattttagttttttttattgttttgttttttgagggaagagaaaggtaggtagtagtttggatgaagagggaagattttttatatagttttttttgggtttataggagggcggagttcggggagttagtttatgaaatatgttttttatttttttttcgtttattttttatttttcgtttttttgattagtttaattgagtagatgattggttagaaaaaaatgtttcgttttttgttaggttttagcggggtaagtttaaagtttttagtttaggaatggaggtgggggtatgggtatttggtagtgtttatagtaagttttgattgtgtggtttggagatggggtttgagttttagggttagtgaggtatttatgggatttaggttatttggagtttcggattttttagattttatttatttatttttttttttcgtacggtatttatattaggggcggtttggagttcggatcgtagggcggggttaggttattgtttgttttttttttttttttcggatggtttgtttttttgtttgtttgtatgtaggtttttagtagagttagtttttttagagttaggtggattttgtttcggttttgtttaggtgtgtgattttgggcgaatttattttttttagtttttgttttttattttatgaaaatgggattgatgttatagggttgttatgagattaaaagatatgaagaatcggggatagtgtttagtaattaatagtttgtagttttgtatttacgtgtttttgggtattttgtcgtttttatagggtttttagtttagtttttgttattgttttttttgttattttttgtttattcggtagtgtttttattttttatttttttatatttattatttgtttgttagttttttgtattatgagttgttatttttggggtgttggattgtttttatagttatttgttttttttgttttttatgaagaagagttagtttttttttaggtagtatattagagcgggtaggttttagagtttttttggtttttttgtagtggttagaaagtggggaaaggggtttagagaggggtagggattgatttatggttatatagtttatttatggttgatttggagttaggttttttgattattatttattagagtttttggatttttattttatttaatataggtgttggggtagaattgggggttttttatttttattagtttgattgttttttgagatttgttttttaagattatttatttgattattggttatggggaaggaaaatatttggttaaggtttatgttttaggtttttaggtatgaagttgattgttttcgtttttgttggtgtggtgagggtgattggggattaggtattaggtttttggtgtaggcgtttgaggacgtggttgtatttttttttttggggatatgtttttgagtttaggtagaggagagtatagttagggtaggatttggtagttttggtatagagtttagagggggtattagtttttgttggttttgttttgtttatagataagttgttgttttttttgtaaaggggagtgggtggggtagagggtaagtgttaggggggtataaggttgggtatgtggttggtatgagacggtgtttgagtaatgttaggtatttggaggtattgattttaggattttggattttagatttttgatcggggggtagttagcgtttaggtattttaatttttgttttgggttcggcgtttttttattagtgagttttggttttatttatagtatttgatattagaggggtcgaaaatagtttttggagaagggggaggagggggttatttaaagggtttgggaggggagagagaatgaggagtgattatggttattttagagttgagttgcgaggtgtcggaggagaattgtgagcgtcgggaggttttttgggtagaatggaaggatttgatattgtttatacggttcgaggaggggtgagtgtgggtttgttagagttttgtttttgtttttttagagtatttttattgagttatgaggttagagtatgaagttttggagaaatttttgggggtgggggtaggaagaatgttttatggggagagtaaaggggaattattttttttgtttttaggttttagtagtttaggggagttttttatttagtttgtgtttagagagtaatagtttttaggagtttattgttttttttttttttttagttgttttttgtatgaggaggatatttagagatatgagatttattattagtaggggtagtgttaggtgttggtgtagcgttcgttttggttgatgatgcggatgggtattttcggtcgtgggttgtaggagtattagttgttttattagcgggtattgtcgttgtttatttttatttttgttaagatgggcgttattaaggaggagcgtgaggatatttttatttagttttaggagttgttggcgttggagatagttttgggtggttagtgtgtggatcgttaggaggtggttgagattataaagtagttgttttttgtggtgtttgttagtaagttcggtgtatttcgtcgttttttgtttcgttttatgttttaggaagtatagagaggttgagagggattgtgatttgggtttcgttgtgttcgttttgggttgggttttttttggttaggattgtggaggggagttgttggttatggttgttttgtagtttgtttagagttgggggttaggggaggggggagttagaggttaggatgtttgagttttttgagtttttaaagggagggtggtagagatagtgggtattaagggtggagagttgggggttagtatagttgaggatttttagttttaggagaagggataaaaggtattggtgagggtaagaggtgtttgggaggagtggttttgatttaggaaaatgtgaggggaatttggaacgttttaggtagaagaagttgggagggagggggaggtgaaaagggtagaggtaaggatggtggggtttttagtattttttgttagtgtcgtaataaatgtttaattatgtgttagagttgtatttttttttttgtggttgggggggttggtttatgggtgtttttttaatgtttatttttgggattaggtttcgtatttgagttaaatatggtagagttaatgggtatattttatatttggggtgggggtgggggtaggatagagttgtaaatagggtgttgtttttagtttttttttcgtattttgatcgttgtttagttttggtttttgtgtttagttttttggtattgggtggtaattagtaagttagttggtattcgtatttagggtttgttttaatgatgtttcgtggagaatatggaggggttggtgttaggattgtttttggttttgtttcggggtgtgaacggggttagtgatttttaaaattaatttgttttttagttttgaatttagatagaattaatttttagttgtgtttcgttttatattttttgttttggaagttagggaaggttggaggtgttagggggttaggtttttttttgtgatttttgtagttgttgtggtgatttatgttttaatttagttgttttttttaaggagatttttttttggggataagggggagggaatggtatggaggaggtttatattaagcggggttaggaatttacggtggtaggagttgggttggtgatttatttagggtagaagggttcgggatttatttagaggggaaggaaggggtttttaggaagattacggagatgttataggtagaattggttttttatttgggagataggtggggagattttggtattttgatagttagaatttggggtgttgagtagaatttttatgtttggtttggtcgttttttcggagggaagttggagggtgggttgcgagaggagtggggttagagtttttatattcgtagattttaaatcggttgggttttaaggtcggattgcgtttttcggtggtttcggcggtttttcgcgaatgcgttttgttttttttttgtttaagttttttgtttttattcgggttcggcgtcgttttcgaagtggcgggaataattcgaattcgaattttttgttttcgggagtttttagataagcggttgggaattcgcggggttcgtagggaaggttcggttgtttcgttcgttaagtgtattagtatagtttattttttttatcgcgtttgttatcggacgggtagtgtcgcgttttgttttggggttttcggagcgattatagcggaggtcggaacggattgttttttttggggcggggtggggagggggtgtcgttggagggttcggtggtatagtaacggacgagagaggtttggaggaggggcggggagggggagttgtgtggtagttttaagggaagggtgggtgttgggacgggtgttcgggagggaggggagtttggcggggtttggggtttcgtcgcggagggcgttgcgagggggaaattggggaaagggtttaattttttagtttttatttcgaattaggaaagagaaggggcgggttgttgggtaaaagaggtgaatggttgcggggggttggagaagagagatgggaggggtcggtcggcgggggtgagggggtttaaagattgtgggggtgaggaattgagggtggggggttttagaggcgggattcggggcggggtaggcgaggcggagggcgagggttgcgggagtaagtacggagtcgggggtgtgggggacgattgtcgttgtagtcgtcgttttatttattttcggtgtgtttgtagttcggatattaagggagatggatgaatgggtggggaggatgcggcgtatatggtttcgggcggttcggcggttacgtgtcgtttttatagcggatcggtcggggcgggggtcgggcggtagaaaaaagggtcgcgacgagcggggtattgggcggatcgcggcggtacgatgagcggcgtagatcgtagttttaatgcgggcgtattntgattcggtttcgggttaggcggcggtggtttcggtttattagcgtttcgagtcgcgcgtttattttcgtaataattacgcgttttttcgcgggaatttgtgtaattcgaacggcgtcgggtcgtggaagttgcgttgtttggcgtagattttcgttatcggtgagcgggggaaattgaggtacgagggataagaggtcgtcggggagtgaaagtaggcgtagggaaataaaaagaaggaaagggagatagattaggcgtttaatagatggggataagaaataagagatagttgagaggtgtaaatagaagagaaaaaagagtaatattttttaggagaggggtagaggagagagaggtggagagagggggcggagagtgtttagaattgagagttaaggtgggggatgtaggatagattgaggtggagatgtataggaggaaatggaggtagatgtgggataggggtgagaaattgttaggattttttcgttgagtttggttggtaggtatagttgttttttttttttttttttattttatttttatttatttatttatttttattttttatttgttttgagacggagtttcgtttttgttgtttaggttggagtataatggcgttatttcggtttattgtaattttcgttttttcggtttaagcgatttttttgttttagtttttttagtagttgggattataggtatgcgtttttatgtttggttaatttatttgtatttttagtagagacgggatttttttatgttggttaggttggtttcgaatttttaattttaggatttatttatttcggttttttaaagtgttgggattataggtgtgagttattgcgttcggttagtaggtatagttttttagatgtgaaatttgagttttagagcggtgaagttttttttcgaagggtagtttatgttggagttgggtttagtttaattttggggttaatgttttttttagatggagatatatttgtagaggagaaggaagaattagagagaggtagggagatgtaggggagggaagggtaaggaggtaggggttgtttgggttggttggtattaggattttttttttttgttttgtttagg

SEQ ID NO: 1482 - DNA, 6174 bp, Artificial Sequence
  chemically treated genomic DNA (Homo sapiens)
  unsure 1113: n is a or g or c or t
tttgggtagggtagaggaagagggttttggtgttagttagtttaggtagtttttgtttttttattttttttttttttgtatttttttgtttttttttagttttttttttttttttgtaaatgtgtttttatttggaaaaagtattggttttagagttagattgaatttagttttaatatgggttgtttttcggaagggaattttatcgttttgagatttaggttttatatttagaagattatatttattggtcgggcgtagtggtttatatttgtaattttagtattttgggaggtcggggtgggtggattttaaggttgggagttcgagattagtttgattaatatggagaagtttcgtttttattaaaaatataaataaattagttaggtatgggggcgtatgtttgtaattttagttattagggaagttgaggtaagagaatcgtttgaatcggggaggcggaggttgtagtgagtcgagatggcgttattgtattttagtttgggtaataagagcgaaatttcgttttaaaataaataaaaaataaaaataagtaaataaatgaaaataaaataaagaaaaagaaagaaaataattatatttattagttaggtttagcgaggaaattttggtagttttttatttttgttttatatttgtttttatttttttttatgtatttttattttagtttgttttgtattttttattttagtttttaattttgagtatttttcgttttttttttttattttttttttttttgttttttttttaagggatgttgttttttttttttttttgtttgtattttttagttattttttgttttttgtttttatttgttaggcgtttggtttgtttttttttttttttttttatttttttgcgtttgtttttatttttcgacgattttttgtttttcgtgttttagtttttttcgtttatcggtggcgaaggtttgcgttaagtagcgtagtttttacggttcgacgtcgttcgggttgtataggttttcgcgagggggcgcgtagttgttgcggaggtaggcgcgcggttcgaagcgttggtaggtcgaagttatcgtcgtttggttcggggtcgagttanggtgcgttcgtattggggttacggtttgcgtcgtttatcgtgtcgtcgcggttcgtttagtgtttcgttcgtcgcggtttttttttttatcgttcgattttcgtttcgatcggttcgttgtgggggcggtacgtgatcgtcgagtcgttcggggttatgtgcgtcgtattttttttatttatttatttattttttttagtgttcgggttgtagatatatcggaggtgagtggggcggcggttgtagcggtaatcgttttttatattttcggtttcgtatttgttttcgtagttttcgtttttcgtttcgtttgtttcgtttcgagtttcgtttttggggttttttatttttagttttttatttttataatttttagatttttttattttcgtcggtcggttttttttattttttttttttagtttttcgtagttatttattttttttgtttagtagttcgtttttttttttttttgattcgaggtggagattggggaattaggttttttttttagtttttttttcgtagcgtttttcgcgacgaggttttagatttcgttaggtttttttttttttcggatattcgttttagtatttattttttttttagaattgttatataatttttttttttcgttttttttttaggtttttttcgttcgttgttatgttatcgggttttttagcgatattttttttttatttcgttttagaaaggatagttcgtttcggttttcgttgtggtcgtttcgggggttttagagtagggcgcggtattgttcgttcgatggtaggcgcgataggggaggtgagttgtgttaatgtatttagcgggcggaatagtcgggttttttttgcgggtttcgcgggtttttagtcgtttatttgggggttttcgaggatagaaggttcgggttcgggttgttttcgttatttcgggggcggcgtcggattcgggtgagggtagagggtttgggtaggggaggggtaggacgtattcgcggagggtcgtcggggttatcggggagcgtagttcggttttggggtttagtcgatttggggtttgcggatgtaggggttttgattttatttttttcgtagtttattttttagttttttttcgaaggagcggttaggttaggtatgaagattttgtttagtattttaggttttggttgttaaaatgttagggtttttttatttattttttagatgggaagttaattttgtttgtggtattttcgtggtttttttgaagatttttttttttttttttggatgagtttcgggtttttttgttttgggtaggttattagtttagtttttgttatcgtgggtttttggtttcgtttgatgtgggttttttttatgttatttttttttttttgtttttaggggaaagtttttttgggagaggtagttaggttgggatatgagttattataatagttgtaggggttatagaggggagtttgattttttagtatttttaattttttttggtttttagggtagggggtgtggagcgagatatagttgaggattgattttgtttggatttagaattgagaggtaggttagttttagaggttattgatttcgtttatatttcgaggtaaagttaaggatagttttggtattagtttttttatattttttacgagatattattgaaataaattttggatgcggatgttagttggtttgttggttattatttagtgttagggggttggatatagaagttaggattgggtagcggttagggtacgggaaggagattggagatagtattttgtttatagttttgttttgtttttatttttattttaagtatggggtgtatttattagttttgttatatttagtttagatgcggagtttggttttagaagtgggtattgaggggatatttatgggttagtttttttaattataaggaaagagatgtaattttggtatatgattgagtatttattgcggtattaatagagggtgttgggggttttattatttttgtttttgttttttttattttttttttttttttagttttttttgtttagagcgttttagattttttttatatttttttggattagggttattttttttaggtattttttgtttttattagtattttttgtttttttttttggggttgagggtttttagttgtgttggtttttaattttttatttttagtgtttattgtttttgttattttttttttgggaatttagggggtttaggtattttggtttttggttttttttttttttagtttttaattttgggtaaattataaagtagttatggttagtagtttttttttatagttttagttaggaagggtttagtttagggcgggtatagcggagtttaagttatagttttttttagtttttttgtgttttttgggatatggagcgggatagggagcgacgaagtgtatcgggtttgttgataggtattatagggggtagttgttttgtgattttagttattttttggcggtttatatattggttatttagggttgtttttagcgttagtagtttttgaagttggatgggggtgtttttacgtttttttttggtggcgtttattttggtaggggtgaagatgggtagcggtagtattcgttggtagggtagttggtatttttgtagtttacggtcgaggatgtttattcgtattattagttagggcgagcgttgtattagtatttggtattgtttttgttggtggtaggttttatgtttttgggtgttttttttatgtagggagtagttggggagaggggaggggtagtgagtttttgggagttgttgttttttgggtataggttgggtggggggtttttttgggttgttgggatttgggggtaggaagggtggtttttttttgttttttttatggggtattttttttgtttttatttttagaaatttttttagggttttatgttttggttttatggtttagtgagggtgttttgggggagtagaggtagggttttagtagatttatatttattttttttcgggtcgtgtggatagtgttagatttttttattttgtttagaaggtttttcggcgtttatagttttttttcgatatttcgtagtttagttttgaggtagttatgattattttttattttttttttttttttaggttttttaaatagttttttttttttttttttttaggggttattttcggtttttttggtgttagatgttataagtagagttaagatttattaatggggggacgtcggatttagggtaggggttggggtatttggacgttggttgtttttcggttagaggtttggggtttaaggttttggggttaatgtttttaggtgtttgatattatttagatatcgttttatgttagttatatgtttagttttgtgtttttttggtatttgttttttgttttatttatttttttttgtagggaggatagtagtttgtttgtaaatagagtaggattagtaggaattgatgttttttttgggttttgtattagggttgttaggttttgttttggttgtgtttttttttgtttgggtttaagggtatatttttagaagggagagtgtaattacgtttttaggcgtttgtattaaaggtttagtgtttagtttttagttatttttattatattagtaggggcggagatagttaattttatgtttgggaatttggggtatgagttttggttaggtgttttttttttttatggttagtggttaggtaagtggttttaggagataggttttaggagatagttaggttagtaggggtggagggtttttagttttattttaatatttgtgttgggtgaaatgggaatttaggggttttgatgggtgatagttagaaggtttggttttagattagttataaataggttgtgtgattatgggttagtttttgtttttttttgggtttttttttttattttttggttattgtaagaggattagaagagttttggagtttgttcgttttgatgtgttatttgggaggggattggtttttttttatggggagtaggggagatagatggttgtggggatagtttagtattttaggagtagtaatttatggtgtaagaggttggtagataggtggtgggtgtggggggatgaggagtgagaatattgtcgagtggataaagggtggtaggagaggtagtgataggggttgagttgaggattttgtggggacggtagagtatttaggagtacgtgggtgtagaattgtagattattgattattgagtattgttttcggttttttatattttttaattttataataattttgtgatattagttttatttttataaagtgggaagtagaagttgagagaggtagattcgtttagggttatatatttaggtaggatcgaaataggatttatttggttttgaagaagttggttttgttggaagtttgtatgtaggtaggtaagggggtaggttattcgggagggaggaggaaggtaggtagtggtttggtttcgttttgcgattcgggttttaggtcgtttttggtgtgagtgtcgtgcggggagagggaatgggtgagtggagtttgggaggttcggggttttaggtggtttggattttataggtgttttattgattttgaagtttaggttttatttttaggttatatagttaaggtttgttgtgggtattgttaggtgtttatatttttatttttatttttggattagagattttaaatttgtttcgttgaagtttggtagggggcggggtatttttttttgattagttatttgtttagttgaattggttaggaaagcggggagtggggggtgggcggggggggaatggggggtatgttttatgaattggtttttcgggtttcgtttttttgtgagtttaggagaggttgtgtgaggggttttttttttttatttaagttgttgtttgtttttttttttttttaagaggtaaggtagtgggaggggttggaatttttttttttttttaaatttatgtttttaattggtt

SEQ ID NO: 1483 - DNA, 8693 bp, Artificial Sequence
  chemically treated genomic DNA (Homo sapiens)
agtttggataagatagcgagatttcgttttaaaaaaaaaaaaaaaaaaaagtataggaatgaggtattggagttagtagttgtagttttttaagagttaagttttttgtattggaggatatttagtgtatatgtgttattgatggttatggtttgagtaggtagtttgagttttttaggttgttttgagggtttttgttgatgcgagtttttattgaaaagtttagttgaggatattgtgttgaggaggttgtgggagggaggaagtatcgagtcgggtatgggagttttttcgttgtttgtgagttttttttttttgttgaattagtttttatttgattttttttaatcgttaggtgatagagattaggaagaaagaggttttatatatgtttttcgaggatgtgtttgtggagaggtttaggtgaggagaggacgggggacgtggttagggatttttagggtagttgagtaagtaggtgggtggtttgaggttaggaggggttaatgttaggaggtttagatttttgtggatttaagggtagaaggtgggttttgttgtggtttaggagttttgggtaaagtttaattttattatattattgtagtttatgtttcgagtatgtaatgttgagttatgtttgtagatgagatatagttttcgggggttttggttaagtttatgttaaatgtattttggaggagttatttttgataagatattattgtaaatttaagtaatgttttcggattatagtgggtgttgtgggttagtgttattttaatattagaggaatttaagggaaagatgttttgtaaaattaaaatgtttaatagtaggggatggttttataaattatggtttatttatatagtagataattatgataatgttttagaagaatatttaatgtaaaatatttattatataaataggttaataaaatagattatagaatagcgggtggggaaggggatatttgtgtatatttaaaaatacgggattaagttgggtgcggtggtttacgtttgtaggtttagcgatttagaagattgagtaggaggattttttgagtttatgagttcgagataattatgggtcgtaaagtaagaatttatttttataaaaaatgtttaaaaattttgttcgggttggtatagtgatttacgtttgtaattttagtattttgggaggttaaggtgggcggattatttgaggttagaagttcgagattattttggttaatatggtgaaattttatttttattaaaaatataaaaattagttaggtatggtggcgtatatttgtagttttagttattttattcgggaggttgaggtaggagaatttgtttgaatttaggaggtaaaggttgtagtgagtcgagattatgttattgtattttagtttgggtaatagagtaagattttgtttaaaaaaaaaaaaaaaaaattaggtcggttatagtggtttatgtttatgtaattttagtattagtattttgggtggttgaggcgggtagattatttgagattaggagttggagattagtttggttaatatagtaaaattttgtttttattaaaaatataaaaattagttaggtgtggtggcgtgcgtatgtaattttagttatttgggaggttgaggtaggagaatcgtttgaatttgggaggtagaggttgtagtgagttgagattatgttattgtattttagtttgggtaatagggagagatttggtttaagaaataattataataataaataaataaataaataaaattagttaggtatggtggagcgtatttgttgggaggtagagtaggaagattattttagtttggtaggttaaggttgtagtgtgttatgatggtgtttgtgaatagttattgtattttagtttgggaaatatagtgaggattttgtttttaaaaaataaaaagggggagggaagatggatttttaatttgttttatgagaatagtataattttttgatatttaaattagataagaattttataagaaaggaaaattataggtttattttatgaatattaatgtaaatgttttaaataaaatattagtaaattgagtttagtgttttttgtataaggataatatattataattaaattgggtttaatttaagaagttatggtaggtttaatattaaaaaattaataatgtaataatttattatattattagaataaaggtgaaaaattatgttatgttagataattaaaggtatttgttttaggtttttaaagaggagttagtggtataaggatgtaagggtagtggtgatttttttttagtggtattagttgaagtgagaatggtagcgttttattttggggatagaagtgacgtttatgttagacgtttgtggttttgatatgttttttgtggttttttgtggtttgttttttttttttttattggatgtgattttggttatggttttagttatattgtgtttttgtttatttttagattttggttttttaatttgtttagtgatttttttttttttttagatggagttttgttgtgtcgttaggttggagtgtagtggcgcgatttcggtttatcgtaattttcgttttttaggtttaagcgatttttttgttttagttattcgagtagttgggattataggtgtgcgttattacgttcggttaatttttgtatttttagtagagacggggtttcgttattttggttaggaatgtttttattttttgatttcgtgatttgtttaatttagttttttagagtgttgggattataggcgtgagttattgtgtttcgtttatttagtgattttaaatgtagtttaatggttttttagtttatggaggttaaagtaggttttgttgtattaaattaagaaattgggttgggtgtggtggttaatatttgtaattttagtattttaggatattgatgtggattatttgagtttaggagtttgagattagtttaggtaatatagtgaaattttgtttttattaaaaataaaaataaaaataaaataaaaaattaaaatttaaaattagttgggtatggtggtatgtatttgtggttttaggtatttaggaggttgaagtatgaggattatttgagtttaggaggtggaggttgtagtgagtagtgtttatattgttgtattttagtttgggtaatagagtgagattttaatttaaaaataaataaatagaatgagagagagagagaagaaaagaaagaaggaatttagttaaagaagttgggtttatttggattttttttggtttgttttatttgttgttattagtagttttttgaagttataaaaataatataaagtaaaataaggtaaaattattatttgtttgaaagagtttataaatttgatggtggtcgtggggtggatggaagattaaaaaaatggggatagaagtgaattagtgtaagttatttgtattgataagatggggatggatttttgtggaaggtagaggaggttatgttttatgtttttggtaggaaaagtggttaaagagggttttagagaataggggttgatggatgggttatattttgatgtgagttaagtttttggatggttggagagaggaaggatgttttagttgggggaatagtttggataatggagatttaagaaagttatgttttagtagtgtgaatgttgtggatgttgaagtgttaggatgtaaggtggagaattgggaaatggttttggaaaggggcgaaagtcgggtgatgaagtattttgtttattgtgacggagtttggattttttttgtggtttaaagggaaaggattgttgaatgtaaagttaatgttattagaaaagttgaatttataagagagttttggagtttaaaagagtattttatggggaattaggaaagttttggtatttggtagattaagtaagtgttttgatttgaagtttagtttagttttaatatttttttttatatttattatatcgtataatttggttttgtttatttattttaggttaaggtagagttttttagtttggtttgagtgttgtatttttttttttggtttgatatttggaattaaagttaagttagaattttagggttaagggggatgttgaaaattgtttgagtttttagattattttgttagtttatggtaaagggagggattagaggttatagggaaagtattttagttgttttttatagtattattttttttttatttaatggtttaggttaataggattttttttttgaggtttgggatacggaagggagttttttttaaattaggtttttggagagtaggttttaggggagtagtgtaatttatttttatatttataagacggtttttgatttttgttttttttttttttttttaaagtggaatagagagaatatgattttttacgatttttatattatagtttttaaataatggggaaatcggaggttttttcgtgtgtagacggtgatatttatcgttaaatgcgaattaggtagatgttagttttagtacgtacgtaggtaattttattttcgttttaacgattttagaggttgttcggtttgttttatacgggggtgttaagtttttcgttcgttttaagcggagatttaacgttatttataattaagttttttttgagggcgagcggttaggtgcgttttcggtaggatagtgttaattttagtttttttttagcgcgttttttcgcgttcgtttttcgtttggaagttttttttttacgtttcgcggtttttttttttttggttcggggagttgttttttgtgttgtcgggaaggttaaagtttcgcgtttattaggagagttcggtaagtatataaggatagaggagcgcgggattaagcggcggcgaaggaggggaagaagagtcgcgatcgagagaggtcgtcgagcgttttcgtttttagagagtagtttttcgagataggtaagggcgtagcgtgggggattcgtgtttttttttcgggattttttgttttcgttttcgcgatgtagtcggtcggtttcggtttcgaaggcggatttgggcgtttttggtttttcgcggtttcgagttttcgataaattttttgcgtcgattgcggtatgagaagtcgttagtagttgagttggagggtttacgttcggtttttgggcggacggtcgcgaagttgtaggcgttgtttttagggagtcggcggtttttttttttttaggggttcgcggcggttcggaggtttcgagagtttgttaggaggttttgggataattcggtttttttttttttttttgagacggagtttcgtttttgttgtttatgttggagagtaaaggggtgatttttgtttatcgtaattttcgtttttcgggtttaagcgatttttttgttttagtttttcgagtagttgggattataggtatgcgttattacgttcggttaatttttgtatttttagtagagacggagtttttttatgttggttaggttggttttaaattttcgataataggtgattcgttcgttttggttttttaaagttttggtattataggcgcgagttatcgttttcggttagttcggttttttagtattttttgtttttagtttttaggataggtgttatattttgaaagttaaattttatatacgttatcgtaaattaatgttggaaacggggtagtagagaaaaggataaaagttataatgaacgttttgtttttcggattttttcggatttagatttttgaatttttgtttttttgtttattttagcgtattcgaggtggtcgcgttatgataattatatgataattgggttaattataatgtagaatagttgggttttttttttttaagatttagttggggttaaaaataggtggtcggggcgggatttgttttagattttgaaacgtattgtttagtttcggatgttttaatagaatcggggtggacggtttatggcgtagattttgggttgagggtacgggtagttatttaggaatgattaaggtttaggtaagggggcgtttttagcgaaggagagatagtttatttggtatttggattttttaaattttttatgtttaaatggggtagggagggtttttatagaatggttggaaggagttaaggaaaataaaagtgtgtgtggattttttttgtgtgtgtgttagtttataaattttgtatagattatggttattttaatgatttattgtttttttgatgtttttgttataggattcgatgtatgtatgttatggtgtaaggataaaattcggtttttgtgtttttttaatttttataaaaggttatggttagcgtgtagttttatagtaataagtaaaatgatttgttgagtttatagagagttttttatatttatgaagttttaataagtgtagttttattataaagttaattttaggatgagtaaattttaagtttttatttttttagagttttttatttttggattataatattttttttatttaaaaaagtataatatttgatatttttttaataatttgttgttttaaaaatgatataaaaggtattatttgtttattgtagagaattgaaaatatatataagtaaatatatatatatataagtaaaatatataatataaatataagattattttttagggaagaatttgaagttttagtaatagtagttatttaattagtttagtaatagaatataagttttgagagggtgggagtgaatatgttattatattgtataatatagtatatagggtataaggaggggaaatgttttttggggttttttaggaaggtttgaagttattgtttttagtaaatggaaattattttagagtagttatttttgataagaattgaaatataattgagggaattattagatttgtaagattttgtttttttttttattaatatgttattttatatttgtatttggtgatatacgtaattattatttttttgtgattgtaatatttgggtattttttagagttaaatgtgttatggttaatttggagttttaatttaattgtttggtttattaagttttggttgtgtatttgaatagattattggtagggtataatgggaatagtttgttttttggagttaggagaggatattaaggttgattaaagttcgtttagttgtttttttagtcgaagcgtatttgggttagttattggttgttagtgttatttaatggttgttttgaaaatgtttagttttgttcggtaattttttagaagttagtatcgtgtaggtttagcgtttggggaatagggcgagggtggggtagagagaaggaagtggttttttgaagtagaaattagcgttttagaggatttttatttttaaagttttttttatataaaaaagatttggtttacgtttttttaaatgagagatttattttaggtaaatttattttaaaatgttagcgtttattaggagtgataagatatttagttatttacgttttaatgtgaattattttttttatttaattatatttttttttagtagttggttgagaagattttttgaaatttaaaatgattgtagggttggcggtgagttgattttcggtttcgaggtggttttagggggtttatttggttaagggaaatttggtagtgcgagggtagtgttggagagaggggtgggtatagggggttaggggtattatggatgttttttttttattgttttttggtgttttgattttagtttttgtttataggtatttgttggattttttaaaagtatttgtagtggttgttttattaggaggtaatttttttttggttttttttttttttatatttgtattttttttaaattttgttattttagattatatttgagagttttagagaataagatatttgatacgtgacgtgtttagaagatgagttagattttaaagaattgagatttgttttaaaaacgaagttttttaaagttattggagtttgggtaatagtgattattagagtaatttgtgtgtaggatattaaattaggttgttcgaaatgttgtttaaattggttagtggttttatttgtttttttgttaatttaatatttataggaaatagagttttagaggaatgataggattttggtggaataaaaagggaaaagattattttgagtaggagttttagggtttttcgttttttttaagttatttttatttttgagattttgtatgttagaattatagtttaatgtagtgaaataggaaagttttttgttaggagtttagttttattttgttatggatattaaagtaattgtttttttttgggttttaatttttttattttttatgggaagggttgaattaagtaatttttaaaatagtttttagttttaatttttttaggggtttcgtttaaatagaagataatagggaaatggttatagtttatttattatttttttttttttattataatttatattatcgttgtattgtatatttttttttttagtattgttgttgtttttaaaatgtttttaattttataagagagtgtgttgttaatgttggtttaaggttttttttggtgagtggttaatattgttttgttttttgtaggggttttattaattttgtttgtttttgtaga

SEQ ID NO: 1484 - DNA, 8693 bp, Artificial Sequence
  chemically treated genomic DNA (Homo sapiens)
tttgtagaagtaaataagattggtgggatttttgtaaggagtaaaataatgttggttatttattaggaaggattttgagttaatattaataatatatttttttgtggagttaaaggtattttaaggatagtagtaatgttgagaaaggaggtgtgtagtatagcggtggtataagttgtgataaggaggagggaatggtgggtaaattgtgattatttttttgttattttttatttaaacgagatttttaaaaaggttaaggttggaagttattttggggattgtttggtttagttttttttatgagagatgggaaaattgaagtttaaagagagataattattttaatgtttatgataaggtaaggttaagtttttaatagagaatttttttattttattatattaagttgtagttttaatatgtaagattttaggagtgaaagtaatttgggaaaaacggaggattttgaaatttttgtttaagatggttttttttttttttattttattaggattttattatttttttgaaattttattttttatgaatattaggttgatagaaaagtaaataaaattattggttaatttaggtagtatttcgagtagtttgatttgatgttttgtatataaattattttggtgattattattatttagattttagtaattttggagagtttcgtttttaaagtagattttagttttttgaaatttggtttattttttggatacgttacgtgttagatgttttgttttttagagtttttaaatgtggtttgaaatggtaggatttgaagaggatgtagatgtggaggggaaagagattagaagggaattattttttggtggaatagttattgtagatatttttggagaatttagtaagtgtttgtgggtagaagttgaggttaagatattaggggatagtaaggagggggtatttatggtgtttttagttttttgtatttatttttttttttagtattattttcgtattgttaaattttttttaattaggtgggttttttgaagttatttcgaggtcggagattagtttatcgttaattttataattattttggattttagaagatttttttagttagttgttagaaagaaatgtaattagatgagaaaagtaatttatattaaagcgtggatgattaagtgttttgttatttttaatgaacgttggtattttaaaataagtttgtttaaaataaattttttatttggggaggcgtgggttaaattttttttatataggggaggttttggaagtgaaagttttttgaagcgttgatttttattttaggaggttatttttttttttttattttattttcgttttattttttaggcgttgggtttgtacggtgttagtttttgaagggttgtcgggtaaggttgagtatttttagagtagttattagatggtattggtagttagtgattggtttaggtgcgtttcggttaaaggggtaattgaacgagttttggttaattttggtgtttttttttggttttaagggataggttgtttttattgtattttgttagtgatttatttaagtatatagttagaatttggtggattaggtaattagattaaagttttaagttgattatagtatatttagttttgaaaaatgtttagatgttatagttatagaaaaatggtagttacgtatgttattaaatgtaaatgtaaagtaatatattagtaaaggaaaaaataaaattttataggtttgatagtttttttaattatattttaatttttgttaaagataattattttggagtgatttttatttgttagaagtaatgattttaggtttttttggaaagttttagagagtattttttttttttatgttttatgtgttgtgttgtataatgtggtaatatatttatttttatttttttagagtttatattttgttgttaaattggttagatggttgttattgttaaaattttagatttttttttgaaagatggttttgtgtttgtattgtatattttgtttatgtgtatgtgtatttgtttatgtgtatttttagttttttataatgaataaatagtattttttgtgttatttttaaagtaataaattattggggaaatattaaatgttgtgtttttttaagtagggaaagtattataatttaaaaatggaaagttttggaaaaatagaaatttgaaatttgtttattttgagattaattttatagtagaattatatttattagaattttataggtgtgaggggttttttatgagtttaataaattattttgtttgttattgtaaaattgtacgttggttatgattttttgtaaagattagaggagtataggggtcgagttttgtttttatattatgatatatatgtatcgagttttataataaaagtattaaaggaatagtaagttattaaagtggttataatttgtgtagagtttataaattgatatatatataaaaaaaatttatatatatttttattttttttggttttttttagttattttgtaagaattttttttgttttatttaaatatgaagaatttggggaatttaaatgttaagtggattgtttttttttcgttgaaaacgtttttttatttgagttttgattatttttaaatggttgttcgtgtttttaatttaggatttgcgttataaatcgtttatttcggttttgttgaggtattcgaaattagatagtgcgttttaggatttaggataagtttcgtttcggttatttgtttttaattttagttaggttttggagagaagagatttaattattttgtattgtaattgatttagttattatgtaattattatagcgcggttatttcgggtgcgttaaggtgggtaaggaaataaggatttaggggtttgaattcgaaaaaattcggaaggtagggcgtttattatgatttttatttttttttttgttgtttcgtttttaatattaatttgcgatagcgtgtatggaatttgatttttaagatgtgatatttattttggaaattgggagtaagagatattaaaagatcgggttggtcgggggcggtggttcgcgtttgtaatgttagaattttggggggttaaggcgggcggattatttgttgtcgggagtttgagattagtttgattaatatggagaaatttcgtttttattaaaaatataaaaattagtcgggcgtggtggcgtatgtttgtaattttagttattcgggaggttgaagtaggagaatcgtttgaattcgggaggcgaaggttgcggtgagtagagattatttttttgttttttagtatgggtaataagagcgaaatttcgttttaaaaaaaaaaaaaaagatcgggttgttttaagattttttagtaagttttcggagttttcggatcgtcgcgagtttttgggggagaggaggtcgtcggttttttggagatagcgtttgtagtttcgcggtcgttcgtttaggggtcggacgtgggttttttagtttagttattggcggttttttatgtcgtagtcggcgtagaaagtttgtcgagaattcgggatcgcggagagttagaggcgtttaggttcgttttcggagtcggagtcggtcgattgtatcgcgaggacggggataggggatttcggggaaagagtacgggttttttacgttgcgtttttatttgtttcgggaggttgttttttgagggcggggacgttcggcggtttttttcggtcgcggtttttttttttttttttcgtcgtcgtttggtttcgcgtttttttgtttttatatatttgtcgagtttttttggtgggcgcgggattttgattttttcggtagtataaggagtagtttttcgggttaggggaaggggggtcgcggggcgtgggaggggggtttttagacgggggacgagcgcggggagacgcgttggaaaggggttggaattagtattgttttgtcgaaggcgtatttggtcgttcgtttttaggaagaatttaattatggatggcgttgggttttcgtttagaacgggcgggaggtttagtattttcgtgtggggtaggtcgggtagtttttgaggtcgttgaggcgagggtgaagttatttgcgtgcgtgttggggttggtatttgtttggttcgtatttggcggtaaatattatcgtttgtatacggggaggttttcgatttttttattgtttggaaattgtgatgtggaagtcgtggggaattatattttttttgttttattttggggaggggaggagggagtagaagttaggagtcgttttgtgggtgtgaaggtgagttgtattgtttttttggggtttgttttttaagggtttggtttaggggaggttttttttcgtgttttaagttttaaggaaaaagttttgttaatttaaattattaaatggggagagggtgatgttgtgaagagtagttgaagtgttttttttgtggtttttgatttttttttttgttatgagttggtagggtggtttggggatttagataatttttaatattttttttggttttggagttttggtttggttttagttttaaatattagattagagagaagagtatagtatttaaattaagttaagagattttattttaatttggagtaaataaataaaattaaattgtgcgatgtggtgggtgtgggagggagtattgggattaaattggattttaaattaagatatttgtttaatttgttaaatgttagaatttttttgattttttatgagatgtttttttggattttaggatttttttgtggatttagtttttttggtgatattggttttatatttagtaattttttttttttggattataagagagatttaagtttcgttatagtagataaggtgttttattattcggttttcgtttttttttagggttattttttagttttttattttgtattttggtattttagtatttataatatttatattgttagaatatggtttttttgggtttttattgtttaagttgtttttttaattagaatattttttttttttttagttatttaggagtttgatttatattaagatgtagtttatttattagtttttgttttttgaagttttttttggttattttttttattaggggtatgaggtatgattttttttgttttttatagaagtttatttttattttgttagtgtaagtggtttgtattaatttatttttgtttttatttttttaattttttatttattttacgattattattaggtttgtaaatttttttaagtagatggtggttttgttttattttattttgtgttatttttgtaattttaggaggttgttggtggtagtagataaaataaattaggaaaaatttaaatggatttaatttttttaattgggtttttttttttttttttttttttttttttttattttgtttgtttgtttttgaattagggttttattttgttgtttaggttggaatgtagtagtgtgaatattgtttattgtagtttttattttttgggtttaagtgatttttatgttttagttttttgagtatttggaattatagatgtatgttattatgtttagttaattttgggttttggttttttgttttgtttttgtttttgtttttggtagagatagggttttattatgttgtttaggttggttttaagtttttgggtttaagtaatttatattagtattttgaagtgttgggattataggtgttagttattatatttagtttagttttttaatttaatgtagtagaatttgttttggtttttatgaattgaaaggttattgaattgtatttagaattattgggtaggcggggtatagtggtttacgtttgtaattttagtattttgggaggttgagttgggtagattacgaggttaagagatggagatatttttggttaagatggcgaaatttcgtttttattaaaaatataaaaattagtcgggcgtggtggcgtatatttgtagttttagttattcgggtggttgaggtaggagaatcgtttgaatttgggaggcggaggttgcggtgagtcgagatcgcgttattgtattttagtttggcgatatagtaagattttatttaaaaaaaaaaaaaaattattgggtaggttgggggattaggatttaaaaatgggtagggatatagtgtggttggaattatggttaaaattatatttagtggagaaaaaaaaaatagattataaggggttataaggggtatgttaagattataggcgtttgatatagacgttatttttgtttttaggatgggacgttgttatttttattttagttaatgttattagaaaggagttattattgtttttgtatttttgtattattagtttttttttgaaagtttagaataggtgtttttgattgtttgatatgatataattttttatttttattttagtaatgtggtgaattattgtattgttgattttttggtgttaaatttattatggttttttagattaaatttaatttgattatgatgtattatttttatatagaaagtattggatttaatttgttaatattttatttaagatatttgtattgatgtttatgagatgggtttgtaattttttttttttgtggaatttttgtttaatttgagtattaaaaaattatgttgtttttataaaataagttggaaatttattttttttttttttttttattttttaaagatagggtttttattgtgttttttaggttggagtgtagtggttatttataggtattattatagtatattatagttttgatttgttaggttaaagtgatttttttgttttgttttttaataggtacgttttattatatttggttaattttatttatttatttatttattattataattattttttagattaagtttttttttgttgtttaggttggagtgtagtgatatgattttagtttattgtaatttttgttttttaggtttaagcgatttttttgttttagttttttaagtagttgggattatatgcgtacgttattatatttggttaatttttgtatttttagtagagatagggttttattgtgttggttaggttagtttttaatttttgattttaagtgatttgttcgttttaattatttaaagtgttagtgttgggattatataggtataagttattgtgatcggtttaattttttttttttttttttagatagagttttgttttgttgtttaggttggagtgtagtggtatgatttcggtttattgtaatttttgttttttggatttaagtagatttttttgttttagtttttcgagtagagtagttgggattataggtgtgcgttattatatttggttaatttttgtatttttagtagagatggggttttattatgttggttaggatggtttcgaatttttgattttaagtgattcgtttattttagttttttaaagtgttgggattataggcgtgagttattgtgttagttcgggtaaaatttttaaatattttttgtagagatgggtttttgttttgcggtttatggttgtttcgaatttatgggtttaagagatttttttgtttagttttttgagtcgttgggtttgtaggcgtgagttatcgtatttagtttagtttcgtatttttaaatatatatagatatttttttttttattcgttgttttgtgatttattttattgatttatttatgtaatgggtattttatattaaatatttttttaaaatattgttatgattgtttattgtatggatgggttataatttataaagttattttttattgttagatattttggttttgtaaaatattttttttttgagtttttttgatgttgaaatgatattggtttatagtatttattatgattcgaaaatattatttggatttatagtaatgttttgttaggaatgatttttttaggatgtatttagtatgggtttggttaaagttttcggaggttgtgttttatttgtaaatatggtttagtattgtatgttcgaggtatggattgtagtaatgtgatggggttgaattttatttaggatttttggattatagtagagtttattttttgtttttgagtttatagaagtttgagttttttggtattgattttttttgattttagattatttatttgtttatttagttgttttggggatttttgattacgtttttcgttttttttttatttgggtttttttataaatatattttcggggagtatgtatggagtttttttttttttggtttttattatttggcggttgggaggaattagataagagttggtttagtagggagagggagtttataggtaacgaaagagtttttatgttcggttcggtgtttttttttttttatagtttttttagtatagtgtttttagttgagttttttagtggaaattcgtattaatagggatttttagggtagtttgagaagtttaagttgtttgtttaggttatggttattaatgatatatgtgtattaagtgttttttaatgtagggaatttaatttttaagagattgtagttgttggttttaatgttttatttttatgtttttttttttttttttttttgagacggagtttcgttgttttgtttaggtt

SEQ ID NO: 1485 - DNA, 11092 bp, Artificial Sequence
  chemically treated genomic DNA (Homo sapiens)
aaataggtgtttgaaggagtaggtaggatttgattatgttaagaatggggattagtatttatattttcgtgtaatttttttattttgagagaatagaatgaatataatatggaaaaaatgatatgttattttgaaaattaggttataaagagatggtgatttttatttggtttgttaaaatgagattatagttttggttaatgtttgggttacgattttgggaaagattttgaggtagaggtattaggtaagttgtagttatatttttggtttatagaaagtgagaggtgataagtgtttgttgttataagttgatatattttaggtttgtttgttatatgatggtagataattaatatatttgtagggaagtggggtggacgtaggtatgagagggattgtaaataggtatgaagaaatttggaggtaaaggatatatttattattttgatgtttgtgatgtttttatgggtgaatatatatgttaaaatttattgatttatatataatgatatatattgaattataaatatatataattatatttatatattataaatgtgtgtagtttattgtatataaattatattttaataaagacgtttgtattttaaaatggggaataaaaagtttatggaaagatagtgttttaggtaaaagagtaaatgaaaataaaagtttagagtaagagttttagaaaaagtagattattttaaagtgtgtattgatatgggaaatttttgtttttggatttgaaagagataagtaggttaagggaaggaaggaggataagattggttgtgaaaagaggtaaaagagaataaagagaataaatagttagtgattttaaataaatattatggatttttgtgtaagaaagattatttgggttttttaaggtttataggataattgggttagaaaaggagagagtggtatttttagtttatttttaaattattttttaatttttgttttttttgttttttttatttttaattttttgttatttatttgtattttttttttttttataaatatttgagtatttattatgtgttagaaattgttttaggagttagagagaaggtagttagtaagttaaggtttgtgatttttaaaagtttatatgttagtaggggaaggtaggtggtattaagtaggaagatgattttttatggagtgttgtgaagatagtggtgatagagtttttaatattaggtatggtatagttttaattagttagtttagttttagttgaataaaatattatttgggagaagaattttagagattttattgtgttaggaaataatattttggttgttagattatggtaaagtgagggaggattttagggaagagagaatggttagtattgtggaggattttttggagggtttgaggaagtggttatttaataattattgtagaaatatgttattattttaataattagtaattttgtattggtgttaattatttgatattagtattgaggttttagtaattggtgtagagagagggtttaggagaagagggtgtggaggaagtttattttagatggtaatattgggaaaggttttttagaagaagtgatatttaagttatgatttgaatgaagagaaagagaaatgtaaggggtagttgggaagttaagttagggggatgggaagaggattttagttaaagaatagtaaagataatgatggtgaagtgtaataaatttggtgtgtgtatcgaatggtataaaagttaatgttgttgtaacgttatgttgagtgaattataagaaattaggttagatgataagtatagtttagattttgtggggttttttaggttataataagaaaataaaatgagaagttataagagggaggattttaagtatggaaatgatataatttgatttatatttttaaaggattacgtgggttttggtaagaagaatggatttgtggggagggtgattagggagagaataatggagaatttgttttagtttggagatgatagtagtttgaattagagtaatggtagtggaaatggggaaaattgggttgatttaagattatttgaaagttgtagtggttttaaagagttatttatatattttttgatatgtgggttaggtatttttgtattgttataaatatttgaggttgggtaatttatataaaaaaagttttaattggtttatggttttgtaggttgtataggaagtatggtgttaatatttgtttaggttttggtgaggattttaggaagtttaaaattatgggggaaggtgatgggtattattagtatgttatatggtaagagagggagtgggggtggggggaggtgttatagttttttaaataattaaattttacgtgaatttagagtaagagaatttatttattattatgaggatggtattaagataatttagagggatttgttattatgatttaatattttttattttgttttatttttattattggggattatattttagtatgagatttggaggggataaatatttaaattatattaatatgttttaaggtatatgaaggggagttttaaaaggtgaagtttaattttttttattttgaatgtaaattggagttagtagtttgtatttaataaatagaatatgatagaagttaggggatgttattttagaagttaggttaataaaagattgtggtatttattttggaggtatgttattttatttttttagattgtttattttagtgaaagttagttattttgttttgttgtagttttgtagagaggtttacgtattaagggattgaagtattaagggattgaagtttttaaagagttgtgtgagtaattttggaggttgattttattttttttatttattttagttgagtttttagataagatggtaatttatattgatagtttagttgttaatttatgagagattttgagttagaggtatttagttgtgttatgtttgaatttttgatttatagaaatgatgagataataaatgtttgttgtttttaatggtgagattttagtataatttgttatgtagtatacgataattaatataaaatagagtttataggattgattgatttgtttggtgtaagagggtgtgaggaaaagagatggatgaaagaagatatgtagattttggatttgagtaattggatggtagtgatgttatttattgaagtgtgagtttgggtaggggggattaagagtttttttttggatatattttgaaaagattgttaaatattttagtgggtatgttaattaggtagtttgttgggttttgtttaaattttttatgtattgtttatgagtataagaaaatgattgtttggtttagtagttaattttgtgaaatatttttaattttttatttttattttaatttattttaatatggtttgtgtttttttgattcgtgtagaatttgtttttattaaattatttattgtatttatgttatttaatttagtagttatttttttgttataagtatatttaatttatagttatattggatatagattattatttttttttttttcgaatattttttttttttggatttattggttttattttttaggtagatttttttgttttatttggtgttaattagggtggtttagttagtggtatttagttggtggttaggttgtggtggttgggtttgtttaatagtttattttatttatttttgtttttttggtgtcgatggttaagaggttggttttagttgattattttttttttttatatgtttatggttttttatgtgaatgttttagtggagtggttaggttttttatatagtagtttaaggtttaagagtaagtgtttagaaggagtagagagagagggtagtagttataatgtgaggttaaagaagtttttttttagaaagttaaaggtgataagtaaagtatgttggtattggttggtaatattttataagagatgaaaggatagatattgtagaagagagaaggtataattgggattaaaagttttgagaaggaaagagatatggagtaaattatttatagtaatagtagatagtagagaagagagatatggttgtatagaggtattttttttgggtttttatttaaatgttttattattagtgagaatttttttgattgttattttttagtagagggtattttttatttttttttttgttttatgtgttttttttataatatatgtgtatatttataatatatatatgtattatttagagtattatatatgttatagtgatatgttttgttgattttttaattgattttttttattggaatgaacgtaagtttgaggaagacgttttgttttgttttgtagtatttagaatagcgtttggtatatagtaggtatttaataaatgttagttgtatgaggaaatgaatgagttgtgtgggggatgtatttgagtgaattttaaagttagagtggtgttgagagaaaaatgtttgaaatttagatgttggaaggtgatatagagtagtagtttggtgagaatagttagattttaggggtttttattatagttttttttttcgtatttttttggttgttattatgattaagttattgaatttttttgagacgtaaggatcgggatggtataaagtgagtgtttattaaagtttgattgtttttttttatggtaatttattttagtttgtttgatttttttttttcgattggattaggtatttattttttgttttttttttttatagttggaaggagtaaaatgggatttttggttgaaagtgttgagtttttgcggtgggggttgatcgtaagttacgttttttgtgtatttggtcggtttagttagttgtcgattcggcggggaggggcggggcgggttaatcggcgttgttttagtagggttgcggttgtaggtaggtagagttttttagttcgtcggtgtttgcgtttatcgatttttttgtttattttcgattatggcgaagttgattgcgtttatttttttggggatgggattggtattttttaggaattattagtttttttattagtaagttgggttgtggtgagggttgtagttttcgttttttttattttttgttagttttacgagtttttagaaagttgggtttaggttgttaatagaatatttataagtaggtgttagatgtatattttgcgggggttttataaatgtttgtttagtcgttatgtgttatttgaaaataaatttttgtttatggtttgagatatgggataaggaggtaattgttaggggtgtgagtgtttaggttgttagtatatacgaattaattttttatgaagatttgtgtgttttggttatagatttattttttaatttggaaagaaataaattaatttggttgggggtttttttgatattttgtgtattagagaaaggagtttttgtcgtttttgcgttttgattgtttggttatggtaaattttttaggtttgaagatttttaaattgaggttattgagggttatagtaaaattgcgtgtggattcgagtaggtggagttaacgtgtgttgtgatggttcgttttagtgggggtaggcggggaagagggaattttggagttagtatttgatgttttggggtttagttttgttttatgagtatgcgatttgggtaaattattttatatttttaattttagttgttttagtaaattggaaatagtaatatatattgtttgcgatagagtagttatttaataaatgttagttttttgtttttttttaaagtatttaataaagggttaagtgttatataaggggggtggggatattttaagaatgtattaaaagttttataatttttaataggagtttaaagtttatagattattttagtttttaaggtttagttaataatgttttatttattttaaagtaaaatttaataaaaattaaatataaaaaaattatatgagtttatggattaattagaagtttatatttagaatgggtttttattatttattgtggatgtttttttaatttttttaagttatagagtgtagaaaaaaagtaagaagtagttggtatttttggtttttaaattatgtaaaaattatagtttgtgagtttttattaattatagtgttggtggttgttaaaggagattataggtatagataaaaatatatagataaaggatgggttgttgagttttttggagtgatttagatagaggaaggaagggaaattttatttattgttggaaatttttaaaatttagttatttaattgggtttggggattagatgtttgagtattatttaggggttttttgtataggtagaattttaagttttattttatattattgaattagaattagcgttatggaataaattttttgggggattagagattatgaatttgttttagggagagaaggtaagagatgatattatgaggtttgtattaggagtaagttaaatttttaggatagatgtatttttttttttttagatttggagtgtatgtgtgtgcggtttataggaagttatatatgtttgggttggagggaatttaaggaagtatataagggatgttttaagagatttttgagttttttaggtgggagtagtatagagaaaagaattgagagagtttttttagattacgagttttttatttacgagttttttatttttgtagtcggttgtatgtgtcgtataagtttagggaatgttttggatgatggtagaaatagttttttttttttattttaatttgggttatggaatgttgtagtatttgtatggtaatttttttgtttttatattgttaattgtaatacgtgagtttattgagtttttttttttagaaggaaattataaagttaacgttgggtttttcgatgtatttttgttattttatgtttattgtaggtaatatatagttgtgggaagagagtagttgtggatttttgatgatttgggttagatattatttttgtaatttttaagttattttattattttattttagaaaagttttagttagtttttttattcgaaaattaggggataataatatatattatagtatatatatatatatatatatatatatatatatatatatatatatatttatatttatataaaatatataaataaaattaagtatatatatatatataaaaattaggtatatagtagatgttttgtaaacgttagtttttatagttgttatatgtgattttaaaaatatagagtgatatttgaatatgtattataattatattttattgaaagtttgagataaggataaataattttttaattttttagttttttttatgaatgtaattaatattatttttttagtttgatgtatttgtttagtatttttataaaatattttagtggatatttgtagagtattttttttttgtaaacgttgtgtttttgttggaggttataggaatgaataggttgtagtatttatttattaattttaaagtttattgggagtaaaagaataaaaattgatagttgtgaaattgataattatgataattatggtaagaaagttgatagatgtatatgtgaaggtttttgagggtaaattaaggagttattaattttaatgtagaagattggagaagttataaagtattatgagtaggggtttttttagtgggtaatgggttaaagagtattttaggtgaagggaaaagtgtgagtaaataaaaagaggtatgaaagaaatatagggaagagtttttagtattatgatatttgattttaaattttaattttatttttttaaataagtaattatatgtaatttatttagttttttagtgtttttatttttttatttataaaatagggtaaatatttattttttttttaaaggtggttaaaaagattaaatgaggaagtatgtgtgagagtttttattggagtttggtatatagtaggttatgaaaagtaatttgaatgaatgaggcgtgtgtagtagtagaaaatagattgattagagtgaatttggttttaagaagagtttgagaatcgatacggattttttaatgtttaggtaaagatttttgtttttttttgcgagtagttagtatgtatttttatcgaatatttttgttttggtttggatgttcgttttttttaaatttcgtatttgatttttaatgttggaggtggggtttaatgggaggtgtttgggttatgaagatggattttttatgaatagattaatgatttttttgggagtgagtgaatttttattttatttatttcgagagagttggttgattgaaaagagtttggtatttttttttttttttatatttttttttattttatgatttttgtgagtattggtttttttttattttttgtaatgagtggaagtagttagagttttttattagatgtagatatttaattttgaattttttaattatttagaattataagttaaataaattttttttttttattagttgtttagttttagatgtttttttagagtgatataaagtagatttagataagtttatagtaaaggttgtatggtttttgcgtagagtttagagtttagtgaattagagatatattttagatattgatttttattttttaggtttagaatatttggatttaagtttttgataagatattttttaataaattgaaaatgaggtagaaaaaatatgagttggatgataataatataggtgggttaatttttaggtgtattttttagtttttaagtagtgttttttgtagattttgtttggttagagagttaaatgtgagttttgtgtttatatttgaattttaatttttgtttagttattttataattttgtggttttagaaagttatttaattttggttaattataatttagggaaaataatattttacggaggtgtttgaggattaaacgcgggtatatacggtatttgaattatagtagtaatgattattttgttgagatatgatatgtttgggttataaattggaatttaaattaataagtgttgatttaatgtttttttgtttattttgggttttttttaattgtgattattttatgttttttaggttagagattattttttatgagagagaagtttgaattagaataggagttgattagttttgtttttttttattttttgtgaatttatatgtttagtgatttttgtgagttaggtagtatgagtattttttttattggttttgagtttaagaaaagtgaatttgattatttttggtgttttttataagttttggtttatttagtgattttatgtttttgaatttttttttttatgttagtttttgtgttgttttcggttatgattattatttttaatattttgtatttgttttttggttttttgagggtatgttataaatatttattatattttttttagattagagtttttttaaatggtgggtaataaagttaatttagtaaataattattaatatttaaaaataaataaaatagaattgaatagaaaagttatgaatgtatgatatagattaggatgagtattgttttgtgaagtttgatttagatgtgtatgtgtatgtgtgtgtatgtgttgggtgttcgtattatataaaatattttttttattgtgagtttttgtttgaaaagtttgtaagttattgttttattatttttttttttatttttttattgttaatatttgtaattataatgttagatttttattttgaaaatattttttttttttttaggttatgggatagattttaatttttttttgaagtttgttttttaagtttatatttattaattaggaaattatagtttttttatagtttaagtttttattatttatttatttatttttgtatttttagtatttagattggtggttttttattttggttatacgttgggataaattgtggtatttttataaagtagattattaagaggtattttttgttttttacgttagatttttttagatagcgaaaatgatagttagtggtttgatggtaggaatgtatttatttttttttgaatgaataaatgaaagattaattatttttaaatttttattattttgtattacgtcggtaagaattttatttagcgtgtttgtttcgtttgtagtttattcgttttttgtgagtttaagttattaggaggataagtaaattttttagtttatttgaagttaaataagatttttagggatatttggataattgttattatttgttatgataatattgtattattagttttttaaaaaaaaaaaaaaaagtttattgtttaaattttttggttgtgttaacgtcgtttgttttttttaaatgtagtattagtagtttcgttttgtttaggtagtcggttggtattttttttttatatttgtttattttttttttgttttttatttagatattttttatggtgtttatgtatttatatttaataagtcgtttttgtgtatgtgtgtgagtgtatttgtgtgtgtgaaatgtttttttatatgtaggttttgtgtatgattttttgaagttataaatttttttaacgtatttgtattttttaagtattatattataaagtagatgtttagtttaggttgcggagttagattgggtagatgagtaggaggttgtttatttgttagtaattttaaaatattaatggaataaattggaattatgttgttatttattcggattttttatttaggagtttttatatattgatgaaattgtttttgtttttgttaaagtatatagagttttagagaggatattatgtattttttatgtgtatttatttatttttgttaaataaaaattaaatattgtatttagagttttttatttgttttgttttggttttgtttggaaaaattgtaggaaaaattttggagttgaaatttaggtaaagtatagtgaaggagaatttttgtggattgtttatttttgtaatttattataatttttgaatagttttgtgtgtgttttattttttttttttttataga

SEQ ID NO: 1486 - DNA, 11092 bp, Artificial Sequence
  chemically treated genomic DNA (Homo sapiens)
tttgtgggggagaaagaaataaaatatatataaaattatttagaaattataataagttgtaaaggtaggtagtttataaaagtttttttttattgtattttgtttgagttttaattttagagttttttttgtaatttttttaggtaaggttagggtaagataagtggggaattttgggtataatatttagtttttatttagtagaggtggataggtatatataagagatatataatattttttttagggttttgtgtattttggtaggaataggagtaattttattagtgtgtaaggatttttaggtggaaagttcgggtaaatggtaatatggttttagtttattttattgatgttttagagttgttgatagatgggtagttttttatttatttgtttaatttgatttcgtagtttggattgggtatttgttttgtgatgtagtgtttgaaaaatataggtacgttgaaaggatttgtaattttagaaaattatatataaggtttgtatgtaaaaaggtattttatatatataggtgtatttatatatatatataggagcgatttattagatatgagtgtataaatattatagaaaatgtttgagtaaaggataaaggaaaaatgaatagatgtgagaaggaagtgttagtcggttgtttgagtagagcgaagttattgatgttgtatttgaaagaaatagacgacgttagtataattaagagatttaaataataaatttttttttttttttttagagaattagtgatatagtattgttatagtaagtagtgataattatttaaatatttttagaaattttatttggttttagataggttaagaaatttatttgtttttttgatgatttgaatttataggaggcggatgggttataggcggaatagatacgttagataaaatttttatcgacgtggtataaaatgataggaatttgggggtgattgattttttatttatttatttagaaaaaaatgagtatatttttattattaggttattggttattattttcgttgtttaaaaaaatttgacgtaagaggtaaggagtgttttttaataatttgttttgtaaaagtgttatagtttgttttaacgtataattagagtaaagagttattagtttaggtattagaaatatagagatgaatgaatagatgatgaaggtttggattgtgaggagattgtggttttttgattgatagatgtgaatttagaaagtaggttttaaaggaaagttggaatttgttttataatttaagaaagggaaaggtatttttaaaatgaaaatttgatattataattgtaaatattgataataaggaaataaaaggggaagtgataaagtagtggtttataaattttttagatagagatttatagtaggaaaagtattttatatggtgcgaatatttagtatatgtatatatatatatatatatatttgaattaagttttataaaataatatttattttaatttgtgttatatatttataatttttttgtttaattttgttttatttatttttaaatgttggtaattatttattaaattgattttgttatttattatttgaaaaaattttggtttagggaaagtgtagtgaatatttgtagtatgtttttaaggaattaaagggtaggtataagatgttaagggtgatggttataatcgaggataatataaagattggtatggaaggagagatttaaggatataaaattattgaatgggttaagatttgtgaaaaatattaaggatagttaaatttattttttttagatttaaaattaatgggaagaatatttatgttgtttgatttataagggttattaaatatatgggtttataaaagatggagaaaggtagaattggttagtttttattttaatttaggttttttttttatagaagatgatttttagtttggaaaatatagaataattatagttaaagggagtttagggtgggtaagggggtattaagttagtatttgttgatttgggttttaatttgtggtttaaatatgttatattttaataggataattattattattatagtttaggtatcgtatatgttcgcgtttaatttttaaatattttcgtgaggtgttattttttttaagttatagttgattaagattaagtggttttttaaggttatagagttataaagtggttgagtagggattggaatttaagtatgaatataaagtttatatttagttttttgattaggtaaaatttatagagaatattgtttaaaagttggaagatgtatttgaaaattgatttatttgtgttattattatttaatttatattttttttattttatttttaatttattaggaaatattttgttaaaggtttaagtttaaatgttttgggtttaagagataagggttaatgtttgagatatatttttgatttattagattttgaattttgcgtagaaattatatagtttttgttgtgaatttgtttgagtttgttttgtgttattttaaaggaatatttgaggttaagtaattgataaagaaaaaaggtttatttggtttatgattttggatggttagaaagtttaggattgggtatttgtatttggtgaggggttttggttgtttttatttattgtagaagatgaagagaagttagtatttatagagattatgggatgagagagaatgtaagagaggggagaggtattaggttttttttaattaattagttttttcgaaatgaatagagtgagaatttatttatttttaaggaggttattaatttatttatgagggatttatttttatgatttaaatattttttattgggttttatttttaatattagagattaaatacgaggtttggagaggacgaatatttaaattaaggtagaagtattcggtgaaaatatatgttggttgttcgtagaaaaaagtagagatttttgtttaggtattaagaaattcgtatcgatttttaaattttttttggggttaaatttattttaattagtttattttttgttattatatacgttttatttatttaaattgttttttatggtttattatgtgttaagttttaataagggtttttatatatatttttttatttaatttttttagttatttttgagaaaaagatgaatatttattttgttttgtaggtaaggaaatggaggtattgagaggttgagtaaattgtatgtggttgtttatttaagagggtagagttgggatttgaaattaagtgttatgatattaaggatttttttttgtattttttttatatttttttttatttgtttatatttttttttttatttagaatgttttttagtttattatttattggaaagatttttatttatgatgttttgtagtttttttagttttttgtattgggattaataattttttagtttatttttaggaatttttatatatatatttgttaatttttttattatagttgttatagttgttagttttatagttgttagtttttgtttttttgtttttagtagattttaaaattggtgagtgaatattgtaatttatttatttttataatttttagtagaaatataacgtttgtaaagagaaggtattttgtagatgtttattgaagtgttttgtggagatattaggtaagtatattagattgagaagatggtgttggttgtatttataggggagattggagggttggaggattatttgtttttattttagatttttaatgaagtatgattataatatatatttaagtattattttatatttttgagattatatatgatagttataaaagttaacgtttataggatatttgttatatgtttgatttttatatatatatatatatttagttttatttatatgttttatataaatataaatatatgtatgtgtgtgtgtgtgtgtgtgtatatatatatatatatgttgtaatatgtattattattttttaattttcgggtggagaaattggttggaatttttttggaataaagtggtaaaataatttgaaagttgtagaaatgatatttaatttaggttattaggaatttataattattttttttttataattgtgtgttgtttatagtaagtatggaatggtagaaatgtatcgagaggtttaacgttagttttgtggtttttttttgagaagggaaatttagtggatttacgtattgtaattagtaatgtagggataaggaagttgttatatagatgttgtaatattttatagtttaagttggggtaggggaggggagttgtttttattattatttaaggtattttttggatttgtgcggtatatatagtcgattataaaggtgggagattcgtgggtgggagattcgtggtttaggggaatttttttagtttttttttttgtattgtttttatttgggaaatttagaaattttttgaggtattttttgtgtgtttttttaagttttttttagtttaggtatatatagttttttgtgagtcgtatatatatatattttaagtttgaagaaaaaaggatgtatttattttggggatttggtttgtttttgatgtaggttttatgatattattttttgttttttttttttggggtagatttatgatttttaattttttagggagtttgttttatgacgttggttttgatttaatagtgtggggtagggtttgagattttgtttgtatagggagtttttaggtgatgtttaggtatttggtttttagatttagttgagtagttaggttttaggggtttttaatagtgggtaaaatttttttttttttttttgtttgggttattttaggaggtttagtaatttattttttatttatatatttttatttatatttataattttttttggtagttattagtattgtgattaataaaaatttataaattgtaatttttatatgatttaaaagttaagaatattaattgttttttattttttttttgtattttgtaatttaaaaaaattagaaaaatatttataataaatagtaaaaatttattttgaatgtaagtttttaattagtttataagtttatataatttttttatatttaatttttattaggttttattttaaagtaaataaggtattgttgattaagttttagagattaggatgatttgtagattttgaatttttgttaaaagttatgaaatttttgatatatttttaaaatatttttattttttttgtatagtatttaattttttattaaatattttaaagggaagtagggaattaatatttattgaatagttattttgtcgtaggtagtgtgtattattatttttagtttattgaagtagttaaggttagagatgtaaagtgatttgtttaaatcgtatatttatggggtagagttaaattttaggatattagatgttggttttagggttttttttttttcgtttgtttttattgaagcgaattattatagtatacgttagttttatttgttcgggtttatacgtagttttgttgtggtttttagtagttttaatttgagaatttttaagtttggaaggtttgttatggttaggtagttaaggcgtagaagcgataggggtttttttttttaatatataaaatattaggagaatttttagttaggttagtttgtttttttttaggttgagaagtgaatttgtagttagggtatataaatttttatgaaaaattaattcgtgtatgttgataatttgggtatttatatttttggtaattgtttttttattttatgttttaggttatgagtaagagtttgtttttaagtgatatatgacggttggataaatatttatgaaattttcgtagagtgtgtatttagtatttgtttgtaaatgttttgttaatagtttggatttaattttttgggggttcgtggagttggtagggagtgaggaggacgaaggttgtagtttttattataatttaatttattggtaagaagattggtggtttttgaagagtgttagttttatttttaagagggtgagcgtaattagtttcgttatggtcggggatagataaagggatcgatgggcgtagatatcgacgggttaggaggttttgtttgtttgtagtcgtagttttgttggggtagcgtcgattggttcgtttcgttttttttcgtcgggtcggtagttagttgggtcgattaggtgtatagaaggcgtggtttgcggttagtttttatcgtaggagtttagtatttttagttaaaagttttattttgttttttttaattgtaaagagagaagatagagaataggtgtttagtttagtcggggaggggaaattaaataagttgaagtaaattgttatgggaaaggatagttaagttttggtgagtatttattttgtgttatttcggtttttgcgttttagagagatttagtagtttgattatggtgatagttaaaaaggtgcggaagggagggttgtagtaggaatttttaagatttaattgtttttattaggttattattttgtgttattttttaatatttggattttaagtattttttttttaatattattttgattttagagtttatttaagtatattttttatatagtttatttatttttttatgtagttggtatttattgagtatttattatgtgttaggcgttgttttagatgttatagaataggataaaacgttttttttaagtttacgtttattttaatggggggagttaattgagaaattagtaaaatatgttattgtggtatatataatgttttaggtgatgtatgtgtgtgttatggatatgtatatatgttatggagaaaatatataaagtaagaaaggggataaggaatattttttgttgaagaatagtagttagagaagtttttattgataatggggtatttgagtaaagatttaaaggaggtgtttttgtataattatgttttttttttttgttgtttgttgttattgtgaatgatttgttttatgttttttttttttttaaggtttttggttttagttatatttttttttttttgtaatatttgtttttttattttttgtggaatattgttagttaatattaatatgttttatttattatttttagttttttggggggaagtttttttggttttatattgtaattattgttttttttttttgttttttttgaatatttgtttttaagttttgagttattatgtaaaaaatttgattattttattggagtatttatatgaaaggttatgaatatatggagagggaaagtggttagttgaagttaattttttaattatcggtattaaggaagtagaaatgaatgaagtgggttattagataagtttagttattatagtttggttattaattgaatattattggttaagttattttggttaatattaggtggagtagaagaatttatttaagaagtagaattaatgaatttaaaagagaagagtattcgaaaagagggggaatgatgatttgtgtttaatgtggttatgagttgagtatgtttatggtagagaagtaattattgaattagataatatggatataataggtggtttaataagaataaattttatacgagttaaaagaatataaattatattagaatgggttaaggtgagaatggaagattggagatattttataaggttagttgttaaattaaataattatttttttatgtttataaatagtgtataaggaatttgggtagggtttagtaggttatttggttgatatgtttattggggtgtttaatagtttttttaaaatgtgtttaaaggaaaatttttaattttttttgtttaaatttatattttaataaatggtattattattatttagttgtttaagtttaaaatttatatatttttttttatttattttttttttttatatttttttgtattaaatagattagttagttttataggttttattttgtattagttatcgtatgttgtataataaattatattaaagttttattattaaaaataataaatatttattattttattatttttgtgggttaggaatttaggtatggtatagttagatatttttggtttaaggttttttatgagttagtagttgagttgttagtgtgaattgttattttatttgaaggtttaattggagtgggtgaaggaggtgagattagtttttaagattatttatatagttttttagagattttagttttttgatattttagttttttgatacgtgggtttttttatagaattataatagaataaggtagttgatttttattagaatgagtaatttgaaagagtgagatagtatgtttttaaaatggatgttataattttttattaatttaatttttgaaatgatattttttaatttttgttatattttgtttgttagatgtaaattgttaattttagtttatatttaaggtgagaagaattaaattttattttttgaggtttttttttatatgttttgaggtatattgatatggtttggatgtttgttttttttaaattttatgttgaaatgtgatttttaatggtggaggtgggatagggtaggaggtgttgggttatggtggtagatttttttgaattgttttggtgttatttttatggtaatgagtgagtttttttgttttgagtttacgtgagatttggttgtttaaaagattatagtatttttttttatttttatttttttttttgttatgtgatatgttagtgatgtttattatttttttttatgattttaagttttttgaggtttttattagaatttgagtagatgttgatattatgttttttgtatagtttatagaattatgaattaattaaaattttttttatataaattatttagttttaggtgtttatagtagtgtaaaaatgtttagtttatatattaaagaatgtatagatagttttttgaaattattataatttttaaataattttgaattaatttaattttttttatttttattgttattattttggtttaggttgttattatttttaggttagaatagattttttattgttttttttttaattattttttttataaatttattttttttattaaggtttacgtaattttttaaaaatgtaaattagattatattatttttatgtttaaaatttttttttttgtggttttttattttatttttttattgtggtttgaaaggttttataagatttgggttgtgtttattatttgatttaattttttataatttatttagtataacgttgtagtaatattagtttttgtattattcggtatatatattaagtttattgtattttattattattgtttttgttattttttggttagaattttttttttatttttttgatttaattttttaattattttttgtatttttttttttttttatttaggttatagtttaaatgttattttttttgagaggttttttttaatattattatttagagtagattttttttatattttttttttttgaattttttttttgtattagttattaagattttagtgttgatattaaatggttagtattagtatagaattattggttattagaataatgatatatttttatagtggttgttaaataattatttttttagattttttaagaggttttttataatattgattatttttttttttttggaatttttttttattttattatgatttagtaattaaggtattattttttggtatagtagggtttttaggattttttttttaaatagtgttttgtttagttgggattgaattgattgattgaggttgtgttatatttggtgttaaggattttattattattgtttttatagtattttataggaaattatttttttatttaatgttatttgtttttttttattagtatgtaaatttttagaggttatagattttaatttgttaattattttttttttaatttttagaatagtttttggtatatagtaaatgtttaaatatttgtaaagggaaggaaagtataaatgaatggtaaggggttggggataaaggaggtaggaggagtagggattgaaagatggtttgggagtagattagagatgttattttttttttttttgatttagttgttttatgggttttaaagaatttaagtggttttttttgtataaaaatttatggtatttgtttgaagttattgattatttgttttttttgtttttttttatttttttttataattaattttgtttttttttttttttttaatttatttattttttttaaatttaagagtaaaggttttttatgttaatgtatattttgaaatggtttgttttttttggagtttttgttttgggtttttgtttttatttgtttttttgtttgaaatattgtttttttataagttttttattttttattttaaaatataaacgtttttattgagatataatttatatataataaattgtatatatttataatatataaatataattatatgtgtttataatttaatatatgttattatatataaattaataagttttggtatatatatttatttatgaaaatattataggtattaaggtaataaatatattttttgtttttaaatttttttatgtttatttgtaattttttttatatttacgtttattttatttttttatagatgtattagttatttattattatgtaataaataagtttgaaatgtgttagtttataataataaatatttattattttttattttttgtgggttaggagtatgattataatttatttggtgtttttgttttagggttttttttaaggtcgtagtttaggtattggttaggattgtgattttattttaataagttagatggaagttattatttttttgtaatttaatttttaaagtgatatattattttttttatgttgtatttattttgtttttttaaggtgaaggaattatacgagggtatgaatattagtttttatttttaatatgattaaattttatttgtttttttaggtatttgttt

SEQ ID NO: 1487 - DNA, 15399 bp, Artificial Sequence
  chemically treated genomic DNA (Homo sapiens)
gagaattataaataatgttgttttggataatggaaaacgtgtatgtattttttagaagaggatgtaatatgtttttattttttttatagagtttagtttatttaaagttagttttatatggaggttggggagtttttgtatttttttttttttgtttttttttttttttttagtgttttttttttttttgtttttttttttagggtttaatggtttttggaagagaggtagtaaagtttatagttttttaaataaataggtttgggttttatggggataggtaagttaattggtttagacgtgaagtttataaagagttttaaatgttgatttttaatattattttataatttatttatttatatattataaagatatagtgatataattgaaaaaatttatttattttaaatttgagttttatgattggattattttttttatagtaaattaggaataaatattttttatgaattgtataattattttgtaattagtatattatattgtattttatttttgtttatgaatttgatttttataaataagttaatattatttaatttattatttgaagatgttaatttgttgaatataaatattaaaaaaaaattttatgtttttgttatgttatttttttattttttaatatgttggaatttttagaaaacggtttggttgtggggaggttttttttattttttgagaagttacggagtgaggtatttataaggtaaattttttttttgttgataataattatttttgatagtatttttttaatgtatttttgttttttttttaaaatagaagtaaggagaagaagggataaaaggaatatggagggtcgaattttttgttatatattatataaaattataataattacgagttatttattttataaattattgtgagcgttataattaagaatatattgtaaagaattttaaagagttaaaagtataattatgaaaggtagtgtgttttagggattattttagtttgtgaattttttgtttttggtttatggttagttaagtataaaaaattgaaagtaagtatttagaaattgttatagaaatttgataaagtaattttatgtttgttgaattaaataataaaagatttgggtttgtattttgtatgtttggtttttttatttttttttttagtaagttatttttattgtattttataaaggttaagaaaaatttgttttttattgtatatagtttgagaagtattgataaaaggtattattatttttgaaattttgtttaaaaaattatttaataattattaaataagttagaagttattatttgagaaatattgttttatattaagtataaggagttgttagtatataagtaagttttagaataagtttgttttgtattgagtaatttggttatttggtagttagaaattattttttttaggaaataaacgtaaattaggggttatgtttttggtgtggtttatatattttagttattttaaaagatagttaaattatattatataatgtaataattattataatatttttataatggtttttgatttttaaattagaaaatacgttttatttttatttttatgtgaggaatgataattttagttttagtatggtggtggggttgggggtaaagatggatattatttttgtaaaagttgttttaatcgtaatatttagaaagagaaagaatatgggggtagaagattttttatatagattattgggggaatttattggttatgttaataaagttaaaataaggtttttattttttttgattttttgagggtgagtttaggtaggttttggtggatttgaaagttttggtttattattataaatgtttttatgttaaattttaaggtgttgttttttttgattatttagtattaagatggtaaataggttttattttgaattgaaatttgttttttagtttagggatttttatttttttttcgttgttgttttaaaaaattgtgaggataagtttgggtgtgatgagatattttgttaaaattaattagtgacgtttattatgggttagggaagaaaggaaagttagtataaaagttggttttggttgttgttgttgtttttgttattttgagattagtttaaaagatgtagatttttaattttttaatgttatttggaattaggttgaagaatatgattattaagaatatgatttttttttttttaaaaaattgggaatagtaaaagggaaatagatagagaatagtatatatttggatatttttatttgttatttatgtggtttttttattttgcggaatttgtggaaagatacggtagtttggtttttgatttagaatttatgaggtatagttgtatgtattttttttggggtttaagagattaagagagaagtttagataatagtttaaggttttttgttttaggttttttttttaaattttgattttttaattttttttttttgttaattttaattttttttttgtagagatgggttttttttatgttgtttataatggttttgaatttttcgttttaagtgatttttttatttgggttttttaaagtgttgagattataggtaagagttattttgttaggtttaaattttgattttgtatttgaggttttttttttttttaataattgatattaaaaatagttttagaaaggagattttatttttttttaaatagttatagttttagtttatgttagagtttttaatttagtggtttattgatagtttagaggaattaatgattttggataagaaaaaaaaaattttgattttaaatggaatttagtattttttttaattataaaattagtagataaattttagaagtatttgtagtatttgtgattgttattaatggaaataatagttatttttattattttattatagttgtttttagtattatgaaagaatatttgtatttttttttatttaaaagaatgttgttagattttgttatttaatatgttaaataatgttgtatatattatattattatattattatagtaaaaaattatgttttagatattttaataattatattttaattgttgatttttaattttaaagttaaggtaaaattaatgtaagtagagagtttatttgggttaagtttgagtattgtaatttaggagtatagatttaagtttttttaaatatatattttgattagtagtagttatatatagatttttaaggggaaggaagaggtagtttttaaattttttgcgttaaaataatataagttgtggattggttatattttgttttttgtattataaattttaggaatatgaagataatgggtgggatagttattcgggaataaaatgtttttaaataattgtttttaggtatgggtattggggcgtgattgaagttttatatttatgtcgttttgggtttgataaattttgtatattttataaagtttagattgtttttagttattttttttttttataatgtaattgattttttttgtaatttatatattttatttatttatttaaaatttttttttttttttttttttttttatgaatcgtatagagaaaatttatgtattttattgtaagtatttataaatattattttaagaagttatttataggtttattattgttagaagggtttacgatataaaaaaggtaatgttttatgggtttttaaaggataattttttatttttttttttattatttagtataatttaatatttttaggattgaagtagagatatatatatatatagggagagaggtgtttgtgttttttttttttttttttttttttggtgagaggtaggtgggaaattggtatttatttttatttattggttttttataaaattgatatttgttgaaaattgttaagtgtgattatttttgtttatatattgtagggtggtaattaaatatcgaaaattattagaagtttattttagatgtatttatttattgtaatggtattaattttgatgggtaaattttattttatttttaaaattgtattttaaattatttttttatgttacggttgttagagtaaaaacggaaaagaaaaaaattatattttttttttttgagtttggatgaaaaagacgtgtttaagtttttaagtttgtagtttggaagtattaatagaggttgggtatggtggtttatttttgtaattttagtattttgggaggttgaggtaggaggatggtttgagtttaggagtttgagattaatttgggtaatatagtaagattcggtttttatatatatatatatagatatatatataatttatatatatttagttaggtgtaacggtacgtgtttgcggttttagttatttaggaggttgaggttggagggttttttgagttcgggaggtttagattgtagtgagttatgattgtgttaatgtattttagtttaggtaatatagcgagattttgttaaaaaaaaaaaaaaaaagtattacgaggtataggatgtttatttattcgtaattacgttttgttataaaaagtagtgattttaacgtgaaatatttatacgacgtatttcgttatttttttttttttggttatcgatttttatttttaaaagttgttttttatgtaagttttttattggaatagcgagtgagaaatgtgtttgaagattagggaaacgagaaaggtatgcgggttgttagagggtttcgggtgggttgtttgaaaaaggaagtgaaggaatttaaagttttatattatgagtttaatgtaaggcgtgttcgggtcgtttcgaaggtatttggggaaataggtttgtgaggataaagattagggttaggtttagggcggagttttcgcggtttcgacgtagggattcggtttaggcggaggacggggcggagcgcggtcggtattatcgagtcgggaagatggtatcgtttacggagttgttggttaggtcggagcgaggtagcgcgttcggttttcgcgttatggggcggttggtggttgtgggtttgttggggatcgcgttggcgtttttgggcgagaggtttttggtatttaggtaggtgggattttcgcgcgttttttttcggcggtttttaggttcggggtggtcgcgtggtgcggggagggcgtaggttgggggagggatttttgcgggatttggttttgcggtcgggggtggagaatttttgaatgttgttttttttttagttagttgaatttttattatttcgatttttcgtttttagtgaaaaaattagtaaagtttggagtgaatcgcgatatttttttgaaagtttataagtttttgttgttaataaagtttttttttgtttaggttgataagagaatgttttgtaattatttaagggttaaattagtggtttaaattgaaaataaaatgattatttatgtattgaaattttaattatgaagatttattttaggttattggtgttgtttttttttgttgtttaaattagattcgtttttaataaagttgttttttatttatttttgtatagtttgagaaattttttagttgtagattaaagatatttgaaatatttagttattgtttttattttttatttatttattagggaagtttgaagttagaatgttagatagcgtagatattattttatttcgtattttagttttaatgaaaatttttggtaggtagatattatcgtttataaattattaatttaacgtttgttttttgtttattttattttttgtagagatggggttttgttgtattgtttaggttgttttttaatttttgtatttaagtaattttttagtttaggtttttttatagtgttgggattataggtgtgagttgttttgttttgttttaattaaaattttataggttttatgtaaaagagttttagaaagattgagtatttgttatgtgtaatgtttttttttaggtttttatagtagagtacgatttttatggagtttgatataggggaagagagaattaaaatatagtaaatgtataaattaggatgttttaaggatagatataaatgaatcgtataggtttaaagaggaaagattttattttttgagggtggagttttagagggaggaagagatattcgatttgattttgaagggtgggtgtaatatatatgagtatgaaggggtttatgttaaatgtatagtgtagtaggagtaaaggggttaaggtgggaagttggaagattagtaaatgggttaatttgaagggagtataaagttaggagatgagaatagtagggtggtgggaaggataggttttgaggttattaaatataagttgaaaaatggggttttatttttataggtttaatagtgttttaaaagggaaatattggtgggttttgttttttaataagaatttaatataattagttgtgttttatagagataagtttggaaggggggattggaggagagtaatggttttttgtatattagaattttttggagggttggtgtttgagtggtattattaaagattttgatttagttgttttggattagaatttatagtttatatttgtaattttagtattgttggaggtttaagttagaagattgtttgagtttaggagttagtgataggtttgggtaatatagtaagattttatttttataaaatgaataaataaataaataaataaataaaaaataaaatttgagttggtaatttataaattatggtgtttatttattagagatttttcgttataattaaaatgtgatatggaataatgtattgtttggtaagttggttttagggtttttaggtaaatagataaataaggaagtgtataatgtaagaatagtggttgatagtagtagtggtattttttatttttaaaaatatttttgataattttaatgagtagttaaggtcgagaattattagaatagagagtagatatggggtaattggttaaggtattgtagtaggttagagaggataatagggatttaaattttggaattttagggatgagggagaagttaaaggtgttattagagtttgtgttatagttttattgttttatggttgtagttttatttattgataaagtagtgtaaagaggaagcgtgtggtggttgagatgggagtgagatttgaggaaagaacgtttatgggtaggaaatggatatgttgattttaatttttatgttaggtaatgtttattgtgttttatagaatatttatgagttggatgattttgtatatgatttgttttgttttttattttaaaggtaagattattaaaatttataagtttattatgttgttattaatgtgtaagttattagtttttttgtaagttggaagtttttttaatagttaaatattttttttttttattaattttaaggttttaaagttatagttgtaaatttaaaaaaaaaagaaaaagtaaataaaatttattgatagaatgtttgatagtttatttataggtttttgtttgtttgttttttgtttttttttgttttttattttgatataaggttttgttttgtcgtttaagttagagtatagtggtatattaaagtttattgtaattttaaatatttaggtataagtagttttttttttttagttttttgagtagttgggattatagatgtatgttattatgtttagttagtatttttattttttgtagagatagggttttattttgttgtttaggttaattttaaatttttagttttaagtgatgtttttgttttagttttttaaagtggtaggattatatatatgagttattattttcggtttattttataatttgatgtattttttttttacgtgattgtgatgtattttaatgggtagtgattttataaaatggtaattttattggatatgtggagttttaaatgggttgacgtgagaatgttggggtaggtggtgggtggttggatttagtaaagaaaaatgtaggttatttagttaattttgaattttatatggatttttttttttttttttagtataagtatgaaatatttatattatatttttagtattaagcgtggaatttgggatataattatattaaaatattatttattgtttattttaaattaaaatattattgggtattttgtattttattatatgttcgagtgttttttgttagaatttggtgattttttgagtttgttttaaaaaggagtatgtttggtcggatatagtggtttacgtttgtaattttagtattttgggaggttgaggcgggtagattattagaggttaggggtttaagattagtttggttaatatggtgaaatttcgtttttaataaaaatataaaaattagttaggtgtggtggtgtatttttgtaattttagttatttgggaggttgagttaggagaattgtttgaattttagaggtagaggttgtagtgagttaagattgagttattggattttagtttggataatagagaaagatttttttaaaaaaaaaagaaaaaaagtatgtttttatttttttataaggaaaggttttttagaggaagttgaaggaatagaggttttatgtttgatttttgttttaatttgatgtttattgtttgattatttaatatttagagatggtattttggtaattaagttatttttttttttaggttgtttattttaatttttagtataaggatgttttagagggataaatgttattaaagttgtttttttttttttgaattgtaattgggattttatattttttttttttatttttttttagttgagtaataaaggggaaaataatagtatataaatatttttaggttagtttttggtgttaaggtatatagttatggatgaattatgaggtttgagtgtattagagatttaagcgtgggtaggaatttttagagtatttatgtgaatgttttgtttgttgtttcgtattttttatgataatttttataagaagttatgtggtttgtttttatttttgaaagagtagttttttttttttttttttttttttaaattattattttttaaattatttattatgtaatttttgtgtgttggttagttagtgtgttaaaagtgtaaaaatttttttatttatttttttaatttattttttaaaaaatatttttttttttttttttttttttttttaaggtaggtttttgttttgttatttaggttggagtgtagtagtataattatagtttattgtaatttagaatatttgggtttaagtaatttttttattttagttttttaagtagtgaggattataggtatgtattattatatttggttaattaaaaaaatatggtcgggtacggtggtttattattataattttagtattttgggaggttgaggcgggtggatatttgaggtcgggagtttaagattagtttgattaatatggtgaaattttatttttattaaaaatataaaattagttaggtacggtggtatatgtttgtaattttagttatttaggaggttgaggtaggagaattatttgaattcgggaggcggaggttgtagtgagttattgtattttagtttggtaatagagcgagattttgttttaaaaaaaaaaaaataaaaaaatttttttgtagagatgggggttttgttgtgttgtttaggttgattttaaatttttagttataagtgattttatcgtattaattttttaaagtattgggattatgggtatgagttattgagttttgttaaatttttttatattaaattaaaacgtatatttattgatatttggaaagaaagtttttttatttttatgtttttatttagtttttatagatatttttttttttatattataattgtaaatattgaggttagagaggttaattagttagtttaatagaataatataaatattgaataatataattaatgaataattagtgttgaatttgtcgttttagttaggttttttgattttaaatatagtttgttttagttttttatagttttttagtttttttgttagtggagtaaattttttttaggtttataggtttaagtatagatttttagttatttagtgtaagtattgttagagtttaaggggtgaattttaaagggtttttataaggttatatataaaagataaagttttggtttgtatattatttgtatataggagataaagttttagtagttgtatgtaaattttaaaagtagagaagtatggtataaagaaatttttgatagtaatattgtgtttttattttgtttaggggtatattggtatcgtagtatggtatatttttattgttatttgttatgaggttagataatagttagtagtttttggttttattttattttggatgggtattgttgttttttgaatgaaagatattgagattgattttatgttaatgattgttggttaagagtttatgttttttatttataatagtaaagatttggaattaatttaaatgttcgttaatgatagattggattaagaaaacgtggtatatatatattatggaatattatgtagttataaaaaaggatgagtttatgttttttgtagggatatggatgaagttggaaatcgttatttttagtaaattattggaaggatagaaaattaaatattatatgtttttatttataggtgggaattgaataatgagaatatttggatataggaaggggaatattatatatcggggttttttgtggggtagggggaggggggagggatagtattaggagatatatttaatgtaaatgacgagttaatgggtgtagtagattaatatggtatatgtatatatatgtaataaatttgtacgttgtgtatatgtattttagaatttaaagtataaaaaaaaaaaaaagtttatgttttgtggataggtagtttgagtttatttatagttttattatttatttgaaattttggattaattattttatttttttgtgttttagtgttgtaatttgtaggatggggtattgtttgttttatagtgggattatgagaatgtttaaaataatgttaagcgtatagttagtttaataaatgttatttatgtagataatgaaatttaagtataattttttaaatttttgtgttatatatttttttggtagtttggtaaagtttttatttttttttagtattatgtttttaaatgagtaaaataaaatatataggattatataggaaattaattaaatattgttattaagttatttaaaaatttatgatataatatgttttttaaattaaatttttaaatggatttagaggtaggtaaatgtttaatagtagatattttgaagttgtaatgaatgtaaatggtattttgagttatttataattgaaatgcgatagaaaagtatttataatttttattagtgatagttataaatattattaatagtattgtggtttgttgtttatatttattattaaaggaaatatttaatttgagttaaaggtttaaataaagatgtattttttttttatttaagtttatggatttttgaattttatttatggattttttggttattggattttataggggttatttggggaatgattgtgatattaatgaaggaagttagcggatattgtttgttgtattatatttattataggttcgtgatgaggaaataataaaataaataattgtaatgaaaaagaaaagaaaggaaaataaaaggaatttaaaatagagaaggtaaatagttttttttttgagtgttaattttaatagattttttgtggttgcgaaataatgtgtttgaggttggttttgggttagagggagagtgttgttattgattagtaatttttgtatgatagtagagtggtaatagttatgtatttttgatttggtatagttataagtatgttatagatataaagtgttagggaataaataggttttagtaaaagtaaagagtgtttttttttttatattattatttatatgtgtttatattatttatgttgtattttttatatgaatatttttagatttattaatttaatttaaaaaggtttgtatagttttttttatattaagagaaatatatgtattttttaaatatataaagtttttaaatttgatgttagcgaggattgtttttagttataagtaatatatattagattaatagtagtttatttaaagagggatttattttttttatatgaaaaatagttttgtgggtgatttaatatagagtttgtttattgagttagtgattatattaaggaattgggttttttatatatttttattttttgatttttttttattgattttatagttgtattttttttaaggatgtagaatggttgtcgtagttttaaatattgcgtgtgtgtttaaattatgaagaaaggagattgagtgatgttagttagtttttttttcgtgatttttttttgtatttagaatatagtgtttttttttaaaatttgggttatatgattatattttaatatagcggagtttgggaaagtaaatatttgttttgtttattattataatagaaacgataagggagaaagaaagggggttgggtatggcgttaattttgttagtcgttagggtttgttatttagaaaatagaagtttattaataagtagggaattgattgttttgttagggaaaaagtttggtagttttttattgaagaaatttggaagttttgatggtttaggaaggataaaggtaaaatttttatttttttttattaaaaaggaaagttaagaaaaaaattagttaagtagaagttatgtataatttttatgtaatttttttatgttaatagtaggtaggttgtatatgaaaatatgatattatataagaaaattagttgatgaagattgttttatttagtattaattatttacgtaaatttaagttgattttgaaataggaattttatattaaattttttaaatatattagaatatgttattttgaatagattttatttaatttaaagagattatttttgaaaaaggtagatggtaaatatcgttatttttatttttgtatagttaaataggtatagtagtaagttgtgtaaaattgatatttaaattaatgtatgatattaaaatttggtgtataaatagtagttatattttattgttttgtatttatatttgtttttggagttatataatatttgtagaattttggaggtgttttaggtttatttttattttatttataaagaagattgatatttatagagattaattgatttgttaagggttatggtagttttattgttgagataagaatatagatttttttatttttttttgagaaaagtataaagtagtttaaagtaaaagtttttttgtttttagtatttttggttaagttgcgtcgtgggaaaattgttttgtttgatttagtttttttattttttaaattggaataatgttatttaatttatagggttgtttgaagaattaaatgaatgtatggaggtaaattatttagaatagcggtaaattatatttttttattatttattttttttgattatttataattattattagtgttatttttattattataattaagattattattatattaggttatataaattttttttttttttttttgttttataattttaattttattttagatttaaggggtatatgtgtaggttttatatgggtatattgtttgatgttgaggtttggggaataattgatgttattatttaggtagtgagtatagtattttatagttttttagtttttgtttattttttttttttttttttttagtagtttttagtgtttattatcgttatttttatgtttatgtgtattattgtttagtttttagttaaagtgagaatatgtagtatttggttttttagtttatttttttttttttaaattatttttgtgatacgtaggttatgagatttattgtattttttaatgttttatttaaaaatttgtattatttaatatatttaatgtattattttttattatatttaaatattgatttatttgtattttttgttttattgttatattgttttaaaaaatttaatattatttgagttatatgattttaaatatatattgattaatattttaattagaaattttatgtttgatatgaattgttaaaatgtgtagttggtataatttatgagttattttgggttatttagaagaaattggtagtttgttttatattttagaagttttttttagtgtttagattttagaagttgttaggaatatgtataggagaaggatatatggtaaatagttatttcgttttttaaatgtatggtatgtgggaattattgaaaaatgtaaagtttttataaggtgttatttttattatttatggttttagagaatagagaaggtgaaaaatgtgagagagaagggaaagttaatagtatgtggtttttaaaataaaagattttatagatattgttttaaattgttttttggttttttagagtggagagggagggggaagatattttattagagtttaatatttttttattattttttttttttaattttttgggtatataatagtaaatagttttgttgaagtagttatagaattagttggtgttttttaatttttttattttaatatatattgttatggatgggtatattaaaattttagaatttattgttatattatttatttatgtaattaaaaattatatgtatttttaaaagttattgaaataagataaatatatttttatttaaaaaaatattgttatagggatgttattttttttttttttttgttagtaattatttgtgggatgtttttggtgtgttaggttttgagtaatgttatttttttttggtttttttgtagtttttgtgtgaggtttatagttattttttacgtttgattttttagaaggaagatagggttattggttttatatttggaattttttttttataatattaatattgagaaatgtgatatggtgttgtgtttatatttgtataggaatttgtattataagttttatttgttgagttattggttttttttttttaataatttatattagtatatagaattttgtaataggtatttttgttttaattttatttttggtgtagttttatttttttatttttgtttttttatttttttttttatttgttttagatttaaattgtgttttatgtattgttgtaagtttttttaaattttttttaaaataaagtagggaatatataaataaatagttttttgttttttgtttttttttttttgtaataga

SEQ ID NO: 1488 - DNA, 15399 bp, Artificial Sequence
  chemically treated genomic DNA (Homo sapiens)
tttgttataaagaaaaaaaaataaaaaataaaaaattatttgtttatgtattttttgttttgttttagaaagggtttaaagaggtttatagtaatatataaaatatagtttaagtttaaagtagatgaaagagaaaatagaaagataagggtaggaaaataaaattgtattagaaatgaagttaaaataaaaatgtttattgtaaagttttatatattgatgtgggttattaaaaaaaaaaagttaataatttaataaataaaatttataatgtaagtttttatgtaaatgtaaatatagtattatgttatattttttagtgttggtgttgtgggaaaagagttttagatgtagaattagtagttttgttttttttttgaagagttaaacgtgaaaaatgattgtaagttttatatagagattgtaaagaagttaagagaaaatggtattgtttagagtttgatatattaaagatattttataaatagttattaataaaaaagaaaagaaggtagtatttttatgatagtatttttttaaataagaatgtatttattttattttaatagtttttgggggtatatgtggtttttggttatatggatgagtgatatagtagtgaattttgagattttagtgtatttatttatgatagtatgtattggaataggaaggttggagaatattaattagttttgtaattattttagtaaaattatttgttgttgtatatttagaaaattaaaagaaggaaataataagagaatgttgaattttaataggatgttttttttttttttttttattttagagggttaggaagtagtttgggataatatttgtgggattttttgttttgaaggttatatattattggttttttttttttttttatattttttattttttttgttttttagagttataaataataaaaatagtattttgtagaaattttatattttttagtggtttttatatattatatatttaagagacgaaatagttatttgttatgtgttttttttttgtgtatatttttgatagtttttgaggtttagatattggggaaggtttttggagtatggggtaggttattagttttttttagataatttagaatgatttataggttgtattaattatatattttggtaatttatattagatataaagtttttaattaaaatgttaattagtatgtatttgaaattatgtaatttaaataatgttaaattttttgaaataatatagtaataaggtaaaaagtataaataaattaatatttaaatataataaaaaataatgtattaaatgtattaaataatataaatttttaaataaggtattaaaaaatataataaattttatggtttacgtgttatagaagtgatttaagagaggaaaaataagttagaaaattaaatattgtatgtttttattttaattgggagttaaataatggtgtatatggatataaagatgacgatggtagatattggggattattagaaggggaagggaagggagtagataagggttgaaaaattatagggtattatatttattatttgggtgatggtattagttgttttttaaattttagtattagataatatatttatgtaaaatttgtatatgtattttttgaatttaaaataaaattgaaattataaaatagagagagaaaaaaaaagtttatgtagtttaatgtggtagtaattttaattgtgatgatgaggatgatattgatgataattgtgggtggttaaaggaaataaataataaaaaagtataatttatcgttgttttaagtgatttatttttatgtatttatttaattttttaaataattttgtaaattaggtagtattattttagtttaaaagatgagaaaattgaattagataaaataatttttttacggcgtaatttagttagaagtgttggaagtagggaagtttttgttttaaattattttgtattttttttagaaagaagtaaagggatttgtgtttttgttttagtagtgaaattgttatgatttttggtaggttagttaatttttataggtgttagttttttttatggataaaataaggatgagtttaaaatatttttaagattttataaatgttatatgattttagaaatagatgtagatataaagtaataggatgtaattgttgtttgtatattaagttttagtattatgtattggtttggatgttaattttatataatttattattatgtttatttgattatataaaaatagggataacgatgtttattatttattttttttaaagataatttttttggattaaataaaatttgtttaaagtaatatattttgatgtgtttgaaaagtttaatatggggtttttgttttagagttaatttaggtttgcgtaagtaattggtgttaaatagggtaatttttattaattagtttttttgtataatattatgtttttatatgtagtttatttgttattaatatggaagagttatatgagggttgtgtataatttttatttaattaattttttttttggtttttttttttgataaaagaaaatgaaggttttgtttttattttttttggattattaagatttttaaatttttttagtaggaaattgttagattttttttttggtagaataattagttttttgtttgttagtggatttttgttttttgggtggtagattttagcggttgataaaattaacgttatgtttaatttttttttttttttttttgtcgtttttattgtagtggtgggtaaagtaaatatttgtttttttagatttcgttgtattgaggtgtagttatatgatttaggttttggggaaagatattgtgttttagatataaaggagagttacgagaagagagttagttggtattatttaattttttttttttatgatttgaatatatacgtagtgtttgagattgcggtagttattttgtatttttgagaaagatatagttataaagttaatagggggagattaaagaatgaaaatatatgaagaatttagttttttgatataattattggtttaatgaataagttttatattgggttatttatagagttgttttttatgtgaggaaaataaatttttttttgaatgaattattattaatttgatatatgttatttgtggttggaagtaattttcgttggtattagatttaagaattttgtgtatttaagaaatatatatattttttttaatatagagaaagttatataaatttttttggattagattaataaatttaaaagtatttatgtaaaaaatataatataaatggtataaatatatataagtgatgatatgagaggaggaatattttttatttttgttagagtttatttgttttttaatattttatgtttataatatgtttatgattgtgttaggttagagatgtatggttgttgttattttgttgttatgtaggaattgttaattaataatagtattttttttttaatttagagttagttttagatatattgtttcgtaattatagggagtttgttaaaattgatatttaaaaggaaagttatttgttttttttgttttaggttttttttgtttttttttttttttttttttattatagttatttattttattatttttttattacgagtttatggtaggtataatatagtaaatagtattcgttggttttttttattggtgttataattattttttaagtgatttttatggagtttagtgattaaggaatttatgggtagaatttagggatttatgaatttggatgggggaaaaatatatttttatttaaatttttaatttaaattgagtattttttttgatgatgagtataagtaataaattataatattattagtagtatttgtgattgttattaatagaaattatagatatttttttatcgtattttagttgtagatagtttaaagtgttatttatatttattgtaattttaaaatatttgttgttagatatttatttatttttagatttatttaagggtttaatttaaaaagtatattatattatagatttttaaatagtttggtagtagtatttaattggttttttgtgtaattttatatattttattttatttatttaaaaatatgatgttgagaaggaatgaaggttttattagattgttaaagggatgtatggtataaaggtttaaggaattatgtttgaattttattgtttatatagatgatatttattgagttgattgtgcgtttggtattattttaagtatttttatagttttattgtggagtaggtagtattttattttatagattataatattggggtatagaaaagtgaaataattagtttaaggttttaggtaaatagtagagttatgaatgaatttaggttatttgtttataaagtatgaatttttttttttttttatattttaagttttagggtatatgtgtataacgtgtaggtttgttatatatgtatatatgtgttatgttggtttgttgtatttattaattcgttatttatattaggtatattttttaatgttattttttttttttttttttattttataagaggtttcggtgtgtgatgtttttttttttgtatttaagtgtttttattgtttaatttttatttataagtgagaatatgtggtgtttggttttttgtttttttaatagtttgttaagaatgacggtttttagttttatttatgtttttataaaggatatgaatttatttttttttatggttgtatagtattttatggtgtatatgtgttacgtttttttaatttagtttattattgacggatatttgggttggttttaagtttttgttattgtgaatagaaagtatgaatttttaattaatagttattagtatgaaattaattttagtgttttttatttaggaaatagtagtatttatttagagtagaatgagattaggggttgttagttattatttggttttatggtaggtagtagtaagggtgtattatgttacggtgttaatatgtttttaagtaaagtgggaatatagtgttattattaggagtttttttgtgttatatttttttgtttttgaaatttatatataattgttggggttttattttttatgtgtaagtgatatataagttagggttttattttttatgtatagttttgtaaaaattttttggaatttattttttgggttttggtaatatttgtattaagtaattaagaatttgtgtttaggtttgtaaatttagggaaaatttgttttattggtagagaagttagaagattgtggggagttggggtaaattgtatttggaattaggagatttggttgaggcgataggtttagtattaattatttattaattatattatttaatatttatattattttgttgaattaattagttaatttttttaattttagtatttatagttataatgtaaaagggaagatatttatgaagattggatgaaggtataaaagtaaaagagttttttttttaaatattagtaaatgtacgttttggtttaatataaagaaatttggtagggtttagtagtttatatttataattttagtgttttgggaagttgatgcggtaggattatttatggttagaagtttgagattagtttgggtaatatagtaagatttttatttttataaaaaaatttttttgtttttttttttttgagatagagtttcgttttgttgttaggttggagtgtaatggtttattgtaattttcgtttttcgggtttaagtgatttttttgttttagttttttgagtagttgggattataggtatgtgttatcgtgtttggttaattttgtatttttagtagagatggggttttattatgttggttaggttggttttgaattttcgattttaggtatttattcgttttagttttttaaagtgttgggattatagtaatgagttatcgtgttcggttatgtttttttaattagttaggtgtagtggtgtatgtttatagtttttattgtttaggaggttgaggtgggaggattgtttgagtttaggtgttttgggttataatgagttatgattgtgttgttgtattttagtttgggtgatagagtaagaatttgttttgaagaaaaaagaaaaaaagaaagaaaatattttttaaaagatagattaaaaaaataaataaagaagtttttatatttttgatatattgattgattagtatataagagttatataataaatgatttaaaggatggtggtttaaaaaaaaaaaaaagggaaaaaggttgtttttttagaagtagaaatagattatatagttttttgtgggaattgttataaaaggtgcgaggtagtaagtagaatatttatatgggtattttgggggtttttgtttacgtttaggtttttgatgtatttaagttttatgatttatttatggttgtgtattttgatattaggaattggtttgggaatatttgtatattgttatttttttttttattgtttaattagggaggggtggaaaaggagggtgtggaattttagttatagtttagaagaagaaagataattttgatggtatttatttttttgggatatttttatattaaaaattgaagtgggtaatttggggagagaaataatttgattgttaaagtattatttttaaatattgaataattaaatagtaggtattagattaaagtaaaaattaaatataaagtttttgtttttttaattttttttgaagagtttttttttatggggaggtgggaatatgtttttttttttttttttttgagggagtttttttttgttgtttaggttggagtttagtggtttaattttggtttattgtaatttttatttttggggtttaagtaatttttttgatttagttttttaagtagttgggattatagggatgtattattatatttggttaatttttgtatttttattagagacggggttttattatgttggttaggttggttttgaatttttgatttttagtgatttgttcgttttagttttttaaagtgttgggattatagacgtgagttattgtgttcggttaaatatgtttttttttaaaatagatttaaagggttattaaattttgatagaaggtattcgaatatatgataaaatatagggtatttagtgatattttaatttgagataaataatgaatgatattttagtataattatgttttaaattttacgtttaatgttaaaagtatggtataagtattttatgtttatattaaaaaaaaaaaaaaaaatttatgtgaaatttaaagttaattgggtagtttatatttttttttgttaaatttagttatttattatttattttaatatttttacgttagtttatttggggttttatatatttaataaagttattattttataaagttattgtttattaaagtgtattatagttacgtaaagaaaaggtgtattaaattgtaaagtaggtcgagggtggtggtttatgtgtataattttattattttgggaggttgaggtaggagtattatttgaggttgggagtttgagattagtttgggtaataaagtgagattttgtttttgtaagaaataaaaatattagttgggtatggtagtatgtatttgtagttttagttatttaggaggttgaggagggaggattgtttgtgtttaggtgtttgagattgtagtgagttttgatgtattattgtattttggtttgggcggtagagtaagattttgtgttaaaataaaaaataaagaaaaataaaaaataaataaataaaaatttgtaaataaattattaggtattttgttaataagttttatttatttttttttttttttttagatttgtagttataattttaaaattttaagattagtgagaagggggaatatttgattgttgagaaaatttttaatttgtagaaaaattggtggtttatatattagtgataatataataagtttgtgaattttggtggttttgtttttgaaatggagagtaggatagattatatataaagttatttaatttatgaatgttttgtagagtataatgggtattatttaatatgaaaattaaggttaatatgtttattttttatttataagcgttttttttttaaattttatttttattttagttattatacgttttttttttgtattgttttattagtagatgaaattataattatgggatagtggagttgtggtataaattttggtagtatttttgattttttttttatttttggggttttagagtttgggtttttgttattttttttgatttattgtaatattttaattagttattttatgtttgttttttattttagtagttttcgattttgattgtttattagaattattaggaatgtttttaaaaataaaaaatgttattgttattgttagttattgtttttatattatgtatttttttatttatttatttatttgggaattttgaagttagtttgttaaataatatattattttatattatattttaattataacgaaaaatttttggtaggtagatattatagtttataaattattaatttaaattttgttttttatttatttatttatttatttatttattttgtagaggtgggattttgttatgttgtttaggtttgttattaatttttgggtttaagtaattttttggtttaggtttttaatagtgttgggattataggtgtgagttgtagattttgatttagaatagttgaattagaatttttggtggtgttatttagatattagttttttaggagattttaatgtatagagaattattgtttttttttaatttttttttttaggtttatttttataaaatataattagttatattaagtttttgttgaaaagtaaaatttattaatattttttttttgaagtattattgggtttatgaaagtggggttttattttttaatttatatttaatggttttaaaatttattttttttattattttattatttttattttttgattttatgttttttttaaattggtttatttgttagttttttaattttttattttagtttttttgtttttgttgtattatatatttggtatgggtttttttatgtttatatgtgttgtatttattttttaaggttaggtcgaatgtttttttttttttttagaattttatttttaggggatggaattttttttttttaagtttatgcggtttatttgtgtttgtttttagaatattttaatttatatatttattgtattttaattttttttttttttgtattaaattttataagggtcgtattttattatagaagtttaagagagaatattatatatagtaggtgtttagtttttttggaatttttttgtatgaggtttataaaattttggttgaggtagggtagaatagtttatatttgtaattttagtattgtggggaggtttaggttggaggattgtttgagtgtaagagttagggaatagtttgggtaatatagtaagattttatttttataaaaaataaaataaataaaaaataaacgttgagttggtaatttataaacgatgatgtttatttattagagatttttattaaaattaaaatgcgagatggaatagtgtttgcgttgtttggtattttggttttaggtttttttggtgaataaataggaagtaagaatagtagttgaatattttaagtgtttttgatttatagttgaagagttttttaaattatgtagaaatgggtggagaataattttattaaagacgggtttggtttgggtaataaggagaaatagtattaatgatttgaaataaatttttatagttaaggttttaatgtatgagtagttattttgtttttaatttaaattattagtttggtttttgggtaattgtaaagtatttttttgttagtttaagtagaagagaattttgttagtagtaagggtttataaatttttaagaaagtgtcgcgatttattttaaattttgttagtttttttattagaagcggagagtcggggtgatgggggtttaattagttgggggagggatagtatttaaaaattttttattttcggtcgtagggttaggtttcgtaggaattttttttttagtttgcgtttttttcgtattacgcggttatttcgagtttggggatcgtcgaggaggggcgcgcgggagttttatttatttgagtgttagaagtttttcgtttaggagcgttagcgcgatttttagtaagtttatagttattagtcgttttatggcgcgggagtcgggcgcgttgtttcgtttcggtttggttagtagtttcgtgggcggtgttattttttcggttcgatggtgtcggtcgcgtttcgtttcgtttttcgtttaggtcgagtttttgcgtcggggtcgcggaggtttcgttttgggtttggttttggtttttgtttttataaatttatttttttagatattttcgggacggttcggatacgttttatattaggtttatgatgtgaaattttgaatttttttatttttttttttaaataatttattcgaaattttttagtagttcgtatatttttttcgtttttttagtttttaaatatattttttattcgttattttagtgagaaatttatatagaaagtagtttttggggatgggggtcggtggttaagggagggaaagtaacgggatgcgtcgtgtaaatattttacgttggaattattattttttataataggacgtagttgcgaataaataaatattttgtgtttcgtaatattttttttttttttttttaatagggtttcgttgtgttgtttaggttggagtatattggtataattatagtttattgtagtttggatttttcggatttaagggattttttagttttagttttttgagtagttgggatcgtaggtacgtatcgttatatttagttaagtgtgtgtaagttgtgtgtgtgtttgtgtgtgtgtgtgtggagatcgagttttgttgtgttgtttaggttggttttaaatttttggatttaagttatttttttgttttagttttttaaagtgttagaattataggaatgagttattatgtttagtttttattaatatttttagattatagatttaaggatttagatacgttttttttatttaaatttaaagggaagaagtgtagtttttttttttttcgtttttattttaataatcgtaatatgaaggaataatttaaaatataattttaaaagtaaaatgaaatttatttattaagattgatattattataataaatgagtatatttgaaataagtttttaatggttttcggtatttaattgttattttataatatgtaggtagaaatggttatatttgataatttttaataaatattagttttataaagaattagtaaataaaagtggatgttaattttttatttgttttttattaaaaaaaaaaaaaaaaaaaaaaagtataaatatttttttttttgtgtgtgtgtgtatttttgttttagttttaaggatattggattatattggatggtagaaagagaagtaaaaagttgttttttgaaagtttatgaggtattattttttttgtgtcgtggatttttttggtagtggtgagtttgtggataattttttagaataatgtttataaatgtttataataaaatgtataaattttttttgtgcggtttatgaaaaaaagaaagaagaaaaaaaaattttaaataaatgaataaaatgtatagattgtaaagaaaattaattatattgtaaggaaaaaaaatagttgagagtagtttgagttttgtgaggtatgtaaaatttattaggtttagagcgatatgagtatgggattttagttacgttttaatatttatgtttggggatagttgtttaaagatattttgttttcgagtagttgttttatttattatttttatatttttggaatttatgatataaagaataaagtataattaatttatagtttatgttattttaacgtaaggaatttaggaattgttttttttttttttttaaaaatttatgtgtaattgttgttaattagagtgtatatttagggaaatttgaatttatatttttgggttgtagtatttaaatttggtttaaataaattttttatttatattaattttgttttagttttaaaattaaaggttaataattgaaatgtaattgttaaaatatttaaaatataattttttgttatagtaatgtggtaatgtaatgtgtgtaatattatttaatatattaaataataagatttagtaatatttttttaaataaagaggagtgtaaatgtttttttatgatattgaaaataattataatgaaataatgaaaataattgttatttttattagtaatagttataagtattgtaaatgtttttgaggtttgtttgttagttttgtaattgaagaaaatgttaaattttatttgaaattaagatttttttttttttatttaaggttattaatttttttgaattattaatggattattgggttaagaattttgatataggttaaggttatgattgtttagagaagggtggaattttttttttaggattatttttggtgttaattattgaggaagagaagagttttagatataaaattagaatttaggtttggtaaggtagtttttgtttataattttagtattttgaaaggtttaggtgggaggattatttgaagcggggagtttaagattattgtgggtaatatagggagaatttatttttataaaaaaaaaattaaaattaataaaaaaaaaaaattaaagaattagaatttagaagaaagatttaaagtagagggttttggattattgtttgggttttttttttaattttttaggttttaagggaagtatatataattatgttttatggattttgggttaggagttaggttatcgtgtttttttataagtttcgtaaaatgaggaaattatatagatggtaaataagaatatttaagtatatgttattttttgtttattttttttttgttatttttaattttttaaaaagaaaaaagttatgtttttaatagttatgttttttaatttggttttaggtgatattaaagggttggaggtttatattttttaggttagttttaggatagtaaaaataataataataattaaaattagtttttgtgttgattttttttttttttttggtttatggtaggcgttattaattgattttggtaaagtgttttattatatttagatttgtttttataattttttaaaataataacgaaagggaaataagaatttttgagttagggaatagattttagtttaggatgaaatttgtttgttattttggtgttgggtggttaggaggaataatattttgggatttagtatggaagtatttgtgataatgagttaggatttttaagtttattaaaatttatttaagtttatttttagagaattaagagaaatggaaattttattttaattttattaatatgattagtgagtttttttaataatttgtgtgaggaattttttatttttatattttttttttttttgaatgttgcggttgaagtaatttttgtagaagtagtatttatttttatttttagttttattattatgttagggttggaattgttattttttatatggggatggagatgagacgtattttttaatttggaaattagaaattattgtaagaatgttatagtggttgttatattgtatagtatagtttagttgttttttgagataattaggatgtataggttatattaagaatataatttttggtttacgtttgttttttggggaaagtggtttttgattattaaataattaagttatttaatataaaataaatttgttttggaatttgtttgtgtgttggtaattttttatatttggtatgaaatagtattttttaaataatgatttttgatttatttagtggttattaagtggttttttaagtaaaattttagaaataataatattttttattagtgttttttaaattatgtgtagtgaaggataggttttttttggtttttgtaaaatgtaatgaaaatgatttattggaagaggaagtaaaaaaattagatatataaaatataagtttaaattttttattatttggtttaatagatataaaattattttgttaaatttttgtaatagtttttaaatgtttatttttaattttttatatttaattagttatggattagaaataaagagtttatagattgaaatggtttttggagtatattgttttttataattgtatttttaattttttaaagttttttgtagtgtatttttaattgtaacgtttatagtaatttgtgaaataggtgattcgtgattattgtaattttatataatatgtgatagggagttcggttttttatattttttttatttttttttttttttatttttgttttaaaaagggaataaaaatgtattgaagggatgttattaaagatggttattattagtaaaagaaagatttgttttgtagatgttttatttcgtggttttttaaagagtaaaggaaatttttttatagttaggtcgttttttgagaattttaatatattaaaaagtgaagaaatggtataatagaaatataaagtttttttttaatatttatgtttaataaattaatatttttaaataataggttgaatgatattaatttgtttgtagaggttaaatttataaatagagataaaatataatgtaatgtgttagttataaaataattatgtaatttataaaaaatatttatttttggtttgttataggaagagtggtttagttatggaatttaagtttaaaatgaatgagtttttttagttgtgttattgtatttttgtgatgtatgaataaatgaattgtgagataatgttgaaagttaatatttagggttttttgtaaattttacgtttaggttagttggtttgtttgtttttatgagatttaagtttatttatttggagagttataggttttgttgttttttttttaggagttattgaattttggggaagaggatagagaggaagaaaatattgggagaaaagaggggagtaggaagagaaagatataaaaattttttaatttttatgtgaggttgattttggatgggttgaattttatggaaaaagtaaagatatgttatatttttttttaggaaatgtatgtacgttttttattgtttaaagtagtattgtttgtagttttt

SEQ ID NO: 1489 - DNA, 5576 bp, Artificial Sequence
  chemically treated genomic DNA (Homo sapiens)
tgggagtgattttagatagttgggatgtgtagagtttgagagagtgttagggagcgggttgggagttgaaagttgggtgtggtggtttacgtttttaattatgatattgggcggtagaggcgggaggattttttgaggataggaatttaagattagtttgggtaatatagtaaggttttatttttattaaaaataaaaaaattaatagggtatagtggtttaagtttgtagttttagttatttaggaggttggagtagaaggattgttttggtttagtagatcgaggttatattgagttattattgtattttattgtattttagtttgggtaataaagtgagattttgttttaaaaaataaaaataaaaaaagtttttgtgggggatttgtattgaggttttggaggggcgttagttgtgtttttcggttttttttttttatagatattattgttattattattaggtaaatatttttcgttttagtttttttttttattttttttttttttatttatttagggggcggggttagaggttaaggttagtgggtgggattggggagggagagaggggttgagtagttttttcgtaagtttttattttattaggttttcggtttggggcgttttttttttttatggcgggatatttggttttagatttcgttttttcgttttttttaggtggtggaggtgatgggttaggggggtcggagtcgggttgggttgattttcggatttggttaagtttttaaggtttttttggagggttaggaatcgggtcgggggttgggttaggttttgaggtgtgggggatttttttatgtttttcgtcgtatgagttttgtggggggatggcgtattgtgggttttaggttggagtggggttagtgttttaaggcggtttggagattttttagtttgagggtgaagtaggagtcggggtggagagtaatttcgatggggttttttcggagttttgtatcgttatttttggtgtcgtgaagttggagaaggagaagttggagtaaaattcggaggaggtaagtgagtttcgacggggttggggtgtggggaggtggttatgatagggtagtttgatggggaagtggttatttgtagttgtttagatttggtatttaggagaggagtaggtagggttagttgttttggttagggaggggtgtgtattaattgtaggtagttttggtaggtaggggttaggtgggaattggaagttggatttcgaagagataattgtaggtgagggtagagcggtttgggagagtcggaagttggtttaggttggtttttgttttgtttggtttagtttttgttagggttttttatattttttaggtttgtttagggtttggttatttattattggtttagtattagatttagtttggggttggtttgagtttttttttttatttttagttttgtttgaaaatttgatttttattagatttaagattttggttttagggttaagtatagtttgagggtaaaaatagtgtttattttaggattattgtttttgaaagtttagggtgtgattcgtttttgataggattttttgtttgggttgtgtgtgtgcgcgttgtgagttgggtttatttttagttaagtatagggtttgtttttttcggatttttgttttaggttaatgattggttattgtgttaaggtgtatattttggtattttttgtagaaagttggattttgattgattttagttttagttttaaagttgtaaataagaaaaatggtgagagatttttttaggttatttgtaaatatagagttgttgcgggattgaaggtatttagttttgttgaggattattaaagatgtattttttagttttttaaggcgataagtgtaagtaattagagattaaatattaagttttgagattttatagaaaggtgtgattggtttttggagtgatcgagaagttttaattttttcgtaggaggttattgttgagttttgaatgataatggttggtaattgtggtttattttttaagtgtttggttgtgtgtttcgtttatatattattattttattaattagtataaaattttttagggggaggtattattattttatttaacgggttttaattgttaaatgatgaagcgaggatttggattagtgtttattttaaaattttaaaatagaatttggaaaatttaggatagtagagggtatttattagtttgagttattggttgagtagaagttggggatgaaaatagtttatttgaaattgatatgattaagtattattgaaatatttttttgaggttttaggattataaaaaggttttgttttttttttattagttgtgtatttttgttcgtcggtagttttatatggtatgttttagggtttagttttttaatttttgttttatttatttttttttttttttatttatttttaaggtttaaatgttatttagatattagatgattatcgcgttttttgttttttgtgatggttttttgaattgttttattttgattatttagttgtttaaggttaaatttagttatttttagttttttttacgttttatattttatttttaagaaatattttgaattaattataatttaattttggttttagttattattatttttgttgggattatcgtagtagttttttaaattatattgttttttttttattgtttgtggttaatacgttaattagagttagtgttttaaaaggtgtggttaggtattttgggaggtcgaggtaggcgaattatttgaggttgggagttcgagtttagtttgattaatatggcgaaattttatttttattaaaaatataaaattagttgggcgtggtgacgtatgtttgtaattttagttatttaggaagttgaggtaggagaatcgtttgaatttgggagatgtaggttgcggtgagtcgagatcgcgttagtgtattttagtttaggtaataaaagcgaaatttttaaaaaaaaaaaaaaaaggtgaggttaggtgcggtggtttatatttgtaattttagtattttgggaagttaaggtggatagattatttgaggttttttgattagtttggttaatatggtgaaattttatatttattaaaaatataaaaattagtcgggtatggtggtgggtgtttgtagttttagttatttaggcggttgaggtagaatagtttgaatttagaaggcggagattgtagtgagttaagattacgttatagtattttagtttgggcgatagaacgagatttcgttttggggggggagaaaaagggtgagagattattttatttggattaaaataaagttattatgtttgtaataggatttatttagttattagattagttttgggttttggaaggtttattttagggttttgttatattagatttttgttttttgtttaaataattattttttttgtttttaaaagtgttatttttttttataattttttttttttttttattttatttttatagattgttttattttttttttaatttttgagatggagttttattttgttttttaggttggagtgtagtggtgcgattttggtttattgtaaattttattttttaggtttaagtaatttttttgttttagttttttgagtagttgggattataggggagcgttatgatgtttagttaatttttgtatttttagtagagatagagttttattatgttgattaggttagttttgaatttttgattttaagtgatttatttattttggttttttaaagtgaagggattataggtatgattattgcgttcggattgttttgtttttttttataatatatatatattttttaaatagaggtagtaggggtgggagaaggggcggtacgggttttattatgttatttaggttgttttttaatttttgggtttaagtagtttgtttattttggttttttaaagtgttaggatttatagatatgagttattgtgtttggttattttttattttatttatttttttattttttagagtaggagtggaagtttattattaaaaagttatagggtagggaaaaaaggaaagtgtatttggaagagatttaagtgggtaatttgaagaataagtgtcgaatagtatttttgttatgttggatgttagggttttttgtttattttgtatagtcgttggtttatagaaggtgttcgataaattttttgaatttaaaaattaattaggatgtttttatagtgaaaaagatatagtaaagatgagggataattaatttaaaaaatgaggagtaagtatatataaagtattttatttatttttatgatatttgttatttttttgttgtgtttgtgtgtatgtatgttatgttatagtttgtgggatttttaaagtaagttggggagagtatatattgaatttagtttttgagatatgatgttttttttttttaattaatttagaatttagtagtttatttatttttttaattttaaaatatttttaaattgggggtgatatttgagtgagagaattttgtaggtattaaatgaattattttttttttttttttttttgagatagagttttgttttgttatttaggttggagtgtagtggcgtgattttagtttattgtaattttcgtttttcgggtttaagtgatttttttgttttagttttttgagtagttgggattataggtgcgtgttatcgtgtttagttaatttttgtgtttttagtagagacggggttttattatgttggttatgttggttttgaatttttgatttcgtgatttgtttatttcggttttttaaagtgttggaattataggtatgagttatcgcgtttagtaaagaatttttaatttttataatttgataggtgtttttttcgaggttagggtttttttttttgtttttttacgatgttttgtattttttggatgtgttagtttttgggggaagagtagttttttgttatatgtatgagttagtgaatagggaatgggtgaatgatatttgtgggtaggttatttttagaagttaggtgggtagtttggaaggtagatgtatttttatagattattttttggggttatacgtaggtttttgaatttcgaatggaaaggggagattgataattggtgtgtttatgtttttataagttttttgttttttaaaatttagttttaggatattaaagttttgtagaaagaattcgagtaatttgttaagtttttgaagtagaagaggattattttgggatatatataggtcgatgtggggtttattttgggggttttatttggtgggtttttttttgtagattttgatcgtattttttttttaaggagtatttttgaatttagtggggaggggtaggggtagattttatttttatttatgaagaggagtagggagagggagaagatgtttgggttttgagttttttttgggaagaggtggtaagtttggattttagggttataagggttttgcgtgtttttttattttgttttttttttgattggttttttttagg

SEQ ID NO: 1490 - DNA, 5576 bp, Artificial Sequence
  chemically treated genomic DNA (Homo sapiens)
tttgggggaggttagttaaaagagaagtaaaatgagggagtacgtagggtttttgtgattttgagatttaagtttattatttttttttagagggagtttaaagtttaagtattttttttttttttttatttttttttatgggtgagggtagagtttgtttttgtttttttttattaggtttagggatattttttagaggggagatgcggttagaatttgtagaggggaatttattaaatagaatttttagggtgagttttatatcggtttgtgtatattttagggtgatttttttttgttttaggagtttggtaaattgttcgagttttttttgtagagttttgatgttttgggattggattttaaaaggtagaagatttgtaagaatataaatatattagttattaattttttttttttattcgggatttaagaatttacgtgtggttttaaggaatagtttgtagaagtgtatttgttttttaagttgtttatttaatttttagaaataatttatttataaatgttatttatttattttttgtttattgatttatgtatgtaataaaggattattttttttttagaaattggtatatttaagggatgtagagtatcgtgaaaggatagaaagagagattttggtttcgaggagaatatttgttaggttatgaaggttagaagttttttgttgggcgcggtggtttatgtttataattttagtattttgggaggtcgaggtgggtagattacgaggttaggagtttaagattagtatggttaatatggtgaaatttcgtttttattaaaaatataaaaattagttgggtacggtggtacgtatttgtaattttagttatttaggaggttgaggtaggagaattatttgaattcgggaggcggaggttgtagtgagttgagattacgttattgtattttagtttgggtgatagagtaagattttgttttaaagaaaaaaaaaaagaagatagtttatttaatatttgtaaaatttttttatttaagtattatttttagtttaaggatgttttgagattagagaaatagataagttgttaagttttgggttaattaaaaaggaagagtattatgttttagaagttaaatttagtatatattttttttagtttgttttgagggttttataaattataatatggtatgtatatatataaatatagtaaaaaagtaataggtgttataagaatggataaagtgttttgtgtgtatttattttttattttttaaattgattattttttatttttattgtattttttttattatagaggtattttaattgatttttaaatttaagagatttatcgagtattttttataagttagcggttatataaagtggataaagagttttgatatttagtatgatagaagtgttattcggtatttgttttttaagttgtttatttggattttttttaagtgtattttttttttttttttgttttataattttttaataataaatttttatttttgttttgaaaaataaaaaagtaaataaaataaaaaatggttaggtatagtggtttatgtttgtaaattttagtattttgggaggttaaggtgggtagattgtttgagtttaagagttagaaagtagtttgggtaatatagtgagattcgtgtcgtttttttttttatttttgttgtttttatttaaaaaatatatatatattatggaaaaaagtaaagtagttcgggcgtagtggttatgtttgtaatttttttattttgggaggttaaggtgggtagattatttgaggttaggagtttaagattagtttggttaatatagtgagattttgtttttattaaaaatataaaaattagttgggtattatggcgtttttttataattttagttatttaggaggttggggtaggagaattgtttgaatttaggaggtggagtttgtagtgagttaagatcgtattattgtattttagtttgagggatagagtgagattttattttaaaaattaaaaaaaaaataaagtagtttataggagtagggtaaaggagggaaggagattatggaggagggtgatatttttaaagatagagaaggtgattgtttgagtaaaggataagagtttaatgtggtaaggttttgaagtgggttttttagagtttaaagttggtttggtggttaggtagattttgttgtagatatagtgattttgttttagtttaagtgaaatgattttttattttttttttttttttttaagacggaatttcgttttatcgtttaggttggagtgttgtggcgtgattttggtttattgtaattttcgttttttgggtttaagttattttgttttagtcgtttgagtagttgggattataggtatttattattatgttcggttaatttttgtatttttagtagatatggggttttattatgttggttaggttggttaggagattttaagtgatttgtttattttggttttttaaagtgttgggattataggtgtgaattatcgtatttagttttattttttttttttttttttgagagtttcgtttttgttgtttaggttggagtgtattggcgcgatttcggtttatcgtaatttatattttttaggtttaagcgatttttttgttttagttttttgagtagttgagattataggtatgcgttattacgtttagttaattttgtatttttagtagagatggggtttcgttatgttggttaggttggattcgaatttttaattttaggtgattcgtttgtttcggttttttaaagtgtttggttatattttttaaaatattgattttagttgacgtgttggttatagatagtagggaggaagtagtataatttgagaagttattgcggtaattttagtagagatgatggtggttgaggttagggttaggttgtgattgatttaggatgttttttaaggataggatgtaggacgtgaaagaaattgaggatgattgggtttggttttgagtaattgggtgattagggtggagtagtttagggagttattataagagatagaaaacgcggtagttatttggtgtttaaatggtatttaagttttgagggtgggtgagaggaaggaagggtagatagagtagaggttgaaggattgagttttggggtatgttatatgaggttgtcggcggatagaggtgtatagttagtgagaaaaaaataaggtttttttgtagttttgaagttttaaggaagtgttttaatggtgtttgattatattaattttaaataggttgtttttatttttaatttttgtttagttaataatttaaattgataaatgttttttgttattttggattttttaaattttgttttggggttttggaataaatattggtttaaattttcgttttattatttagtagttaaaattcgttaaataggataataatatttttttttaggagattttgtgttggttaatgagataatgatgtataaacggagtatatagttaggtatttaggaagtggattataattgttagttattattatttaaggtttagtagtgattttttgcgaagaggttggggtttttcggttattttagaaattagttatatttttttgtgaggttttaaggtttagtatttaatttttaattgtttatatttgtcgttttggaggattggaagatatatttttaatagtttttagtagggttggatgtttttaatttcgtagtagttttatatttgtaaatggtttggagaaattttttattattttttttgtttataattttggaattgaggttgaagttaattaaaatttagttttttataaggggtgttagggtgtgtattttaatatagtggttagttattggtttgaggtagagattcggggaagataagttttatatttgattggaggtaaatttagtttataacgcgtatatatatagtttaaataggagattttattagaaacgagttatattttagatttttaggaataataattttggaatgagtattgtttttatttttaggttatgtttaattttaaggttaaaattttgggtttgataagggttaaatttttaagtaggattaagggtgggaaaaggggtttaaattaattttaagttgggtttggtgttgggttagtaatgaatgattagattttgggtaggtttaggagatgtgagagattttgataagggttgggttagatagagtaaaggttagtttgggttagttttcgatttttttaggtcgttttgtttttatttgtagttgttttttcgaaatttagtttttagtttttatttggtttttgtttgttagggttgtttgtagttgatatatatttttttttggttagggtagttgattttgtttgttttttttttgggtgttaggtttgggtagttgtaggtgattatttttttattaggttgttttgttatgattatttttttatattttaatttcgtcgaagtttatttgtttttttcgggttttgttttagtttttttttttttagttttacggtattaggggtgacggtgtagggtttcggggaggttttatcggagttgttttttatttcgatttttgttttatttttaggttgagaggtttttaagtcgttttggggtattagttttattttaatttggggtttatagtacgttatttttttatagaatttatacggcggggggtatgggggaattttttatattttagagtttggtttaattttcggttcgatttttggttttttaggagggttttggaagtttagttaggttcgaggattaatttagttcggtttcggtttttttggtttattatttttattatttggagggggcgagaaggcgaaatttgaagttaggtgtttcgttatggggaaggaaggcgttttaagtcgggggtttggtgaaatgagggtttgcgaagggattatttaatttttttttttttttttagttttatttattagttttgatttttggtttcgttttttggatgggtggaggagagggaggtggggggagaaattgaggcgaaggatgtttgtttaatggtggtggtaatggtgtttgtggaaggggaaaatcgggagatataattggcgtttttttaggattttagtgtaggttttttatagaaattttttttatttttattttttaagatagggttttattttgttgtttagattggagtgtagtggagtataatgatggtttaatgtagtttcgatttattgggttaaagtaatttttttgttttagttttttaagtggttgggattataggtttggattattgtgttttgttagtttttttatttttagtagagatggggttttgttatgttatttaggttggttttgaatttttgtttttaagaaattttttcgtttttgtcgtttagtgttatgattaaaggcgtgagttattatatttaatttttaatttttaattcgttttttggtatttttttaggttttgtatattttagttgtttggaattattttta

SEQ ID NO: 1491 - DNA, 5520 bp, Artificial Sequence
  chemically treated genomic DNA (Homo sapiens)
  unsure 2701, 2828: n is a or g or c or t
ggagggtgttggaagggattatgatttgtttgtttttttttttttatttttttttttttttttttttttttttttttttttttttttttttttttttgtttattttttttttttttcgttattttttatttttgtttattagtgagaagttaaataattatatttaaaagagtaggagaagaacgtaggtgttttagtagaaattataattagtagttaatattaataattttttatgtgaattaagttattaaaatgttgttttaaattattttattattttttttatttttaagaaaatgttgtgggtatatagtagttgtatatatgtatggggtatatgagttgttttgatataggtatgtaatgtgaaataagtatattgagaattaggtatttatttttttaagtatttattttttgggttacgaataatttagttatattttttatgagttattttaaaatgtataattaagttattattgattattgttattttattgttttattttttattttagttattttagttgtttttgattgtatttaagtgagtttagtagaagaaatttacgttaatatatagaattattagaaataataaattaatattttaagttattaataatgaggtcgatttattatataataaaagaggattaatggtatttgttaataatgttttagaatattatgttagaatttttttaatgaatgagtatgtaaggaaattaggtaatttttatatatttgagatttaataaatgatattaattaatataatttaaaatataaattttgagtttggtaaaattttgaagtattgtatataatagcgtttagaaagatatttttttttaatttttttattttttttattgtttttttatttttattttatgttttatttttgggtagtagatagtaaaattttaatttatatttgaataatttttgttaatttatagttatatagtaagtatatttggttttagtttttatagaaaaatttttgatggttagtattttaaatttattgattaagatattttaatgaatagatttaatattgtattatttttagtatttttggtattaattgtttttatgattgatttgtttgtgttagtttattttttttatatttgaaagaaggatttgggaaatgtgcgttaaaaatgttttgtgtgaggtagagaagttatttatgttttaattttatagatagtggttttttaatgtttttagatatttttttttaaaatagttaatataaaatgtgttttgagttttagataatttgtttgttttttttatgattttgttatttataagatgatttaaagaaaaaagagttaaaataatttagtattttttaatatatatatatataaatttataatgataatgtaagattaataaaaaggttgttaagttattttaaaaataaggaataaaataatttttttttaattttagtatttatttaaataataattttgtataatagtatgtttttaattgaataagtttttaaaaatattttttaattagttttgtatatttagtttattattatttttattgtgttttttaacgtggaaatggaagggaatgatgtaaatgatagtaatagtaattaatagtagtagttgttattatagtagtaagagtagagtattttttatattttattgttttttataaatattttaggtttgatttttaaaaaataaataattaaatgattaagttatgtaaagagaatttcgtaaaatttgttaggaagtttaggtttaattaattgatgtttaattaatattttttgagttaataaaaattagtaaaatattgttttatattaaatgttgattgatatttttaagaaattttgatgatttaagaaatttgttattatttttttacgaattttgtcgacgatgtgtttttcgtgataagttatatttgttgattaagataatgattttatgatattggagttattttttttttggtattaatttattagttggttttttggtaggaaagagtttattttttttttggtattaatttatttaaaagtattattattttagaaaattttttatatagtttttttaaaacgattaggaatttttaggaaattttattaatgaacgaggaaagaaatttggataacgttaagtagggggaaaaaaggtgtttagtgaagttaataaatatttttagtaatgtattttggtgttgaatagaaaatgaaatatattatgaatagtgttaaaaaaaaaatttttatattttgttttggaaatggttttgattttatgtttgaaaatgtatatgatttgcgaatttataatattttaattttaataatgaagaaaagttataaagttattttataggaggaaagagaaagaagtttgttttttttattttgtgttttgttgagtttatttttgtaattaattttatattttaatttttagaagatttcgaatttttagtttatattttttttttaagtttgtttaagattagaaatttttatgttgtgatagggagaaaaattattttaattaaatatgttgtattgttaagttttaatttaaagaaaataataaatgaggtggagaaaaataagaaatatatttattaattgaaattaaggttagtgaggtagaaataattttanatatgtttatgaaagttaacgggaagatagatttgggaagatatatttataaagttgggggtgttttagagttttttataagttataagggttttatataatagaaaagtttaaaataaggtagaanaattttttatattagagttgtttttttttttattggagggtataatatcgaagttaaaattattagttatagattatagtatataggttaaatgtttatatataaaataattaataaaattttttgttttagttaaatttagaaataaattattgttttatttagtgttagtaggttttatagtaattagtatattaattatttgaggaattcgtaataaaatattttatttagagatagaatgttattattaagttacgaaatttttttagggcgagttaatttggaagtttgtttatttttaaagtaaattgttaaatgtggtttgtaggttatcgtatttaaaaataggatttgagaatttgagtagatatagtagataattattaaataatagggaaaattggtttgaaaataaaaatatgatttaaaaaattattatatttatttttttgatagagagtaattttgaatatttagtattttaagtattttttttaaaatttaaggatatgaaaagtaagaaaagaatatggaaaatttaaataatattttgtgagatttatatatagttgtaaaaggaagaaaatttgttgttagtgttatttatatttgttttttttttattgataattttttaaataaatttaaatagtatagttgttttgggttttgtcgagtttggtttggaattgtaggtgattagaaaggatagggaagtttttatgtgatacgtatttattgatttattaattatttaagatttattttatattgaagtattttatatgttataggatatatgagatatttaaataaatataggatatgttattttttataaaagtgtatggtttaattgaggaaggaagttttatagatgggatagagaattagaaaataatataaagttaatatgtaatgtgtaggtttatttttttatttttgtagggatatagtattttagattaaaatttttaatttgggtttgagaatttaggaataaatattttttttggtaaggatattttttgtataatttttaatagtgtaaaattggaaatatcgtgaagggtattaataaggtaaggttgagtaattattgtttttattataggacgttatatggttattaagaagaatgggggaaaattatattaagatgatttgaaaagataaggaatatatattttttgaaggataaaagttagttgtatagtgatttatatataatatttttatgtatatgtgtatttttatgttttaaacgtgttttattgtatatatatatatgtgtgtatataagtgtagatagaattgaaaattaatgtaaaattgttattagtgtttattattgaatagtaggaatgtggagaaatgatgaagagaaatttgtgttttattttaaagatatttgtagtatacgaattttttgtaataaattatataatttttttgttaaattaaaaataaaaagaaaaataaatatgttgggttttattttttaggtatttttaggtggtagaaataagtagttttttttgtaatataaaggaggatgagttttatttgtagtttttagatgaaattataaaagataatatagattgaaggtagaaagaatttaataagttaaaatttaaagataatttttgacggtaattggtttttattttatttatatgttttaaattaattttaatatttattaatatttatgaaaagaatatttgttttttttggtaagtaaagataatttttttttttaagggttatatgtttgtgtttttaggtgtttttaaagtttttattaagtttaaaaattgtagtatagaaaaggtagggcgtattgttataaattatataaagaaaatgtatgtagtattttagtttagtttttatttttttgaacggagtttttatataggtgtaaggaagataagtattgagaaagggagagtgggaatgtgaagtgatgtatattaagtaagttagtaggaatttgatttgtttggtttttttttgggttgggtatagttttaaatgtttatgtgtgtattattatatatttttattttttttttttttatttttttttttttattggttttgagaaagagtatataaatgatatttttagggtatgagaagttatttatttgtagatttgtaggtagtaatttatttttatttagaggttttttggttttggaaataattttagtttagttttttttattatgagttttagatttgatattatttttttttgtaatagtgcgagattattttatgttttgtaggtgttgttgtttttgttattgttgttgattgttttggttttttttattaaaggataaattaagagaaatttggcgaaaggtaaaggtagaggttttgtttttttgtatttgttgttgtttttgttatatttgtttttggggtaaagattagtttggtgtttttggggttggagagggttattatattaataattttaattggaggagatatataggggggttattttttattttttgtgtgttgggtaattttttgggtattttattaaagcgttatagattatatttataatggttttatgagagaggtataattgtttttaatttgtaaataagagatttgaggaaaatatttatgattattaataggttatattttttattttaga

SEQ ID NO: 1492 - DNA, 5520 bp, Artificial Sequence
  chemically treated genomic DNA (Homo sapiens)
  unsure 2693, 2820: n is a or g or c or t
tttagggtagaaaatgtgatttattggtggttatgaatattttttttaggttttttatttgtagattgagggtaattgtattttttttataaagttattgtgaatatgatttgtaacgttttagtaaagtgtttagaagattgtttagtatataagaagtgagaagtgatttttttgtgtgttttttttaattggagttattggtataatggttttttttagttttaaaggtattaagttagtttttattttagagataggtgtagtagaagtagtaataagtgtagagaagtagggtttttatttttgtttttcgttaagttttttttagtttgttttttggtggaggaagttagagtagttagtagtaatgatagaagtagtagtatttgtaaggtatgaagtggtttcgtattgttataggaaggggtggtattaagtttgaggtttatggtggagaaggttgagttagagttgtttttagaattagaagatttttgagtgagggtgagttgttgtttataagtttgtagataagtggttttttatgttttgaagatgttatttatatgtttttttttaaagttagtaagaaggaagaggtaggaaaggaggaagtgagggtatgtggtgatatatatataagtatttgaagttgtgtttaatttagagaaagattagataggttaaatttttattaatttgtttaatgtgtattattttatatttttatttttttttttttaatatttattttttttatatttgtgtaagaatttcgtttaggaaggtaagaattagattgaaatattatatgtattttttttgtatgatttataataatacgttttgttttttttatattgtagtttttaggtttaatagaaattttaggagtatttgaaggtataaatatgtggtttttgaaagagaaagttatttttgtttgttaaagaaagtaaatgttttttttatgaatgttgataaatattgggattggtttggagtatgtaagtaaaataagagttaattatcgttaaaggttgtttttggattttagtttattggattttttttgtttttaatttatattattttttgtaattttatttagaaattataaatgaaatttatttttttttatattataaaagaagttatttgtttttattatttaagaatatttaaaaagtaggatttagtatatttatttttttttttatttttaatttaatagaaaaattatataatttattgtaaaagattcgtatgttgtagatgtttttgaaataaaatataaatttttttttattatttttttatatttttattatttagtggtaaatattggtaataattttgtattagtttttaattttgtttgtatttatatgtatatatgtatatgtatataatgagatacgtttaagatatagaggtatatatatatatagaagtattgtatatggattattatatagttgatttttattttttaaaaaatatgtgttttttatttttttaggttattttaatgtagtttttttttattttttttaatgattatgtgacgttttgtgataagaataatagttatttaattttgttttgttggtgttttttacggtgtttttaattttgtattattagaaattgtgtaagaaatgtttttattaaggaaaatatttgtttttgaatttttagatttaaattaaaggttttggtttgaaatgttatatttttataaagatagagaggtggatttatatattatatgttggttttatgttattttttggttttttgttttatttgtaagatttttttttttaattgaattatgtatttttgtagggagtggtatgttttgtgtttgtttgaatgttttatgtattttataatatgtaggatattttaatataaagtaggttttaaataattaataaattaatgaatacgtattatatgaaagtttttttattttttttaattatttataattttaggttaaattcgataggatttaaagtaattatgttatttaaatttatttggaagattgttaataaagaagaggtagatgtaagtggtattggtaataagtttttttttttttataattatgtataagttttatagaatattatttaaattttttatattttttttttattttttatatttttaaattttagaagaaatgtttaaaatattaaatgtttaaaattattttttattaaaaagatgaatatagtaattttttaaattatgtttttgtttttaagttaattttttttattgtttaatagttatttattatgtttatttaagtttttaggttttgtttttaaatgcgataatttatagattatatttgatagtttattttagaagtaagtagatttttaaattaattcgttttggaaaggtttcgtgatttgatggtgatattttatttttgagtaaagtattttattacgagttttttaaatgattgatgtattaattattgtagaatttattgatattaaataggataatgatttatttttaagtttagttgaaataaaaagttttattgattgttttgtatgtagatatttagtttgtatgttgtaatttgtagttaatgattttaatttcggtattgtattttttaatgaaaaagaagataattttggtatgaggagttnttttgttttattttaagtttttttattatataaagtttttgtaatttgtgaaagattttagaatatttttaattttgtggatgtgtttttttaggtttgttttttcgttggtttttataaatatgtntaaaattatttttgttttattagttttagttttagttgatgaatgtattttttatttttttttattttatttattgttttttttaaattagagtttagtagtatagtatatttaattggaatgatttttttttttgttataatatagaaatttttagttttaagtaagtttaaaggaagggtgtaagttgagagttcggagttttttgagagttgagatgtggagttaattgtagagataagtttagtaggatataaaatgaggggagtagatttttttttttttttttttgtggggtgattttatagtttttttttattattgagattgagatattgtgaattcgtaagttatatatatttttaaatataagattaaagttatttttagaataagatataaaggttttttttttaatattatttatagtatattttattttttgtttaatattaaaatatattgttgaaaatgtttattggttttattggatattttttttttttttatttaacgttatttagattttttttttcgtttattagtaagattttttaaaagtttttaatcgttttaagaaaattgtatgaaaagttttttgaagtaatgatgtttttgagtgagttgatattaggaaaaaggtaggtttttttttattaggaaattaattggtgggttaatattaggaaagaggtgattttagtattatggagttattgttttaattaataaatgtggtttgttacgaaagatatatcgtcggtaaaattcgtgaggaagtagtaatagattttttgagttattaaaattttttaaggatattagttagtatttgatataaaataatattttgttagtttttattaatttaaaaaatattgattaagtattagttgattaagtttgaattttttaataggttttacgaagttttttttgtatgatttggttatttaattatttattttttaaaagttaggtttaaaatatttgtggaaagtaatgggatatgaaaaatattttatttttgttgttatgatgataattgttgttgttaattgttgttattgttatttgtattatttttttttatttttacgttgagaaatatagtaaagatgatgataaattgagtgtataaaattggttaaaagatgtttttaaaaatttatttagttaaaagtatattgttatgtaaaattattgtttaaataaatgttagaattagagaagagttattttgttttttgtttttaaaataatttgatagtttttttattaattttatattgttattgtgggtttgtatatgtgtgtgttggggggtgttaagttattttagtttttttttttttaagttattttataaatagtagagttatgaaggaagtaagtaaattatttaagatttaaagtatattttatgttagttattttaaaagaaaatatttagagatattggaggattattatttataaaattaaggtataaatgatttttttgttttatatagaatatttttaacgtatattttttaaattttttttttaagtatgaaggaaatagattagtataagtaaattaattataaaagtaattagtattaaaaatgttaaggatagtataatgttgagtttgtttattaaagtattttaattaataaatttaaaatattagttattaaaagtttttttgtaagggttgaaattaaatgtgtttattgtataattatgagttgataagaattgtttagatgtgaattgaggttttattgtttattgtttagaggtgaagtatggggtgaaaatgggaggatagtggggagggtgaagaagttgaggggaagtatttttttgggcgttattatatataatattttaaagttttgttagatttagaatttgtgttttaaattatgttgattaatattatttgttaaattttaaatatatgaaagttatttagtttttttatatgtttatttattaaggaaattttaatataatgttttagagtattgttaataagtattattaatttttttttgttgtgtaataagtcgattttattgttagtggtttaaaatattaatttattgtttttgataattttgtatgttagcgtgagttttttttgttaagtttatttgagtgtagttaagagtagttgaaatggttgaaataaagagtgggataatagggtgataatagttaataataatttaattgtatattttaaaataatttataaagaatgtaattggattgttcgtaatttaaaggataaatgtttgaggggatggatatttaatttttaatatgtttattttatattgtatgtttgtattaaaatagtttatgtattttatatatatatatagttattatgtatttataatatttttttaagaataagaaaaataataaaataatttaaaataatattttaatggtttaatttatatgagaggttgttggtgttggttgttggttgtgatttttattggggtatttgcgttttttttttatttttttaaatataattatttaattttttattaataagtagaaatgaggaatggcgggagagaaggagagtaggtaagggaaggggagggaagagaagaagaaggaaaaggagagaaggaagaaaatagaaaggaaaaaataggtaagttatagttttttttaatatttttt

SEQ ID NO: 1493 - DNA, 5754 bp, Artificial Sequence
  chemically treated genomic DNA (Homo sapiens)
  unsure 4079, 4125, 4131, 4164, 4189, 4198, 4206, 4258, 4283: n is a or g or c or t
  unsure 4313..4314, 4345, 4380, 4420, 4437, 4446, 4519..4520, 4558: n is a or g or c or t
tggtttcgaatttttgattttaggcgatttattcgttttagttttttaaagtgttaggattataggtttgaattacgcgttcggttttgttgtttgttttgaaatatttttggtaattttaatgtttagttaaggttttatttattttttgtgaattttgtgggtttgataattattttagttttgatgttgttttaaattttatgttatagtttattatttgttagaaaattttattggataattttttaagtattttaaaattattttgtgtgaaattgaatttatttgttttatgttttatttaaatttttttttcgttttgttttttttagttttgttagtgttgttttagatattattttaggtttggtgtttttagttggtattattggttttgttttttagtttgagtttagtagttgatgatgagttattagttgatagtatagtgttgtttatgttatttgttttaaattttttgaggatttgttattgtcggtagttggttgtaaaagatatttgatggttagatttaaattttatattttaaaatattttttatttatgtttgtttttaggtaaattagggttttttttttttattttatttttttttatttttttttttttttgagatagggtttcgttttgttgtttagtttagagtgcggtgatacgattttcgtttttatcgtaatttttgttttttgggtttaagcgatttttttgagtggttgggattataggtttgtattattatattcggttaatttttgtgtgtattttttgtagagacgggggttttattatgttgttgaggttggtttcgaatttttgagtttaagtgattttttcgtttttgttttttaaagtggttggtttataggtgtgagttattatgtttagttatttttttttattttaaatgttaaatattgaaatgttatttattttttaaggtttgatttagatttcgtttttataaagtttgataattatatttttttaagttgaaagttattttttttttttgagtttttatgatattgtttttatttttattatattttttttgtaatgttcgattggagaaattggatatggttttataataatttaagaaaatagtttttttaagaggaaattagtagtgaaaatttttgttagaaatttgggagttgttgtattatttgtttaaacgtaagagaagttagtgtttaaattaggtttggtaaaattatttttatttagaatagttatgttttaatagaatattttatttttgatgattttttagatttgattagaattattcgggatttagaaaagtttaatattttagaagaattggaagtggtttcggaaagttgtgtggaagtttaggagataaatgaagaagaatatttggttattattaggtttacgttaatagtattttattgttttttggcgatttttattggtaagtttttttgtatatatatgtatatttatataaattttaagttatttttgttgatattgatttataataataatttgtattattgttgaaaaattatatagtgtatgtattatattttatggtttatagagtatgttcgtgtatttattttttgtagtttttataattagtttgttgagttaaaatattattatttttattttgtagatgaggaatttgaagtttagagagtttaagtgatttgtatagaattaggtagttaggaaatggtgaaattaaggtttatatttaggttttttgattttattttttttttagttatgttaggttgttttttttaggtatatatgtttataattaatggagagtgtatgtgggttagtgtttttttttagttttggaggttggagtgggtggtgttagattagtattgtttttattattatttttttttagtgatttttttggtttttatatagtatgggtagaagttttggtaggaggttggatttttagtattttggatttgttagtaggtataataaatgtatttgaatatatgttttgttataaagggattttattttaaattaaatgtttatgagtaggggattgattaaataattattgatggtgaatataaatagtggaatattatgtagttataaaaaagaatgaagaagttttgtatgtattgatatggagagatttttatgatatattgttaagaaataaaagtaagtattattttgttattatttgtgtaaaaaaagtaaaaatatatatttgtatttgattgtatatgtttgaataatattaatatataaatgaatagttataagggtgttagcgggtaatagtggtggtgggagttgggtagatgggggaaagggtgggagggagattttatatttttttatgtttttatatttttaaattatgggattattttatttattaaaaagtaataagtttataaaaaagatttaaaaggtcgttattttattattatttttattattgtgatttttgtttttttttattggttgatttgggttttttttgttggtggtttttattatataggttatattttgagggattggaggtttgtgaatttataggtattattgtggttattaaaattttattggtgatcgggcgtggtggtttatatttgtaattttagtattttgggaggttaaggtgggtagattatttgaggttaggagtttgagataagtttgattaatatggtgaaattttatttttattaaaaaaaatataaaattaggtcgggcgcggtggtttacgtttgtaattttagtattttaggtggtcgaggcgggtagattacgaggttaggagatggagattattttgggtaatatggtgaaattttgtttttattaaaattataaaaaattagttaggtatggtgacgggtgtttgtagttttagttatttaggaggttgaggtaggagaatggcgtgaattcgggaagcggagtttgtagtgagtcgagattgtattattgtattttagtttgggtattagagcgagatttttattttttaaaaaaaaaaaaaaaaaaaaaagtaaaattagtaaggtatggtggtatatatttgtaattttagttatttgagaggttgaggtaggagaattatttgaatttgggaggtagaggttgtagtgagttgagattatgttattgtatattaatttgggtaataagagtaaaaattttattttaaaaaaaaaaaatttttattggtatggcggtttatatttgtaattttagtattttgggaggttaaggtagtggattatttgaggttagaagtttaagattagtttggttaatatggtgaaattttatttttattaaaaatataaaaattagttgggtatggtggtacgtatttgtaatttcggttattcgggaggttgaggtaggagaatcgtttgaatatgggaggtggaggttgtagtgagttgagattgcgttattgtattttagtttaagtaatagagtaagattttgttttaaaaaaaaaaaaaaaattttattgttagaaaaagtattattgaatgttgaatgtatggttatttttggttattggataatttgtgaacgaatagatattgaaagtattgttgtgggtgttgtggagggggtgttttaaaatattttgatatataagaaagagtttttaaatggagagtttaagaatttatagtaaatttatttatttatttattttttgagttggagtttaatttttgttatttaggttggagcgtaatggtgtaattttggtttattgtaattttcgtttgttaggtttaagcgatttttttgttttagttttttaagtagttgtaattataggcgttcgttattacgtttggttaattttttttgtatttttagtagagatggggttttattatgttggttaggttggtttcgaatttttaatattaggtgatttgtttatttcggttttttaaagtgttgggattataggtgtgagaaaaaataaatagttttttgtaaaaggtaatggagttttagtcgtgggtagaaataatgttaaggttagnggggaggggagcgagtttaatcggggttttgtgggtaattagaatngtcgtntgtaaaggaattggggcgagagtaaaggcggtntagttttgtcgaagaaaaaaaaaanaatgtagtnaatggggngaagggaaagggaggttaggcgtagcgtagataataggatggtcgttgaaanacgtaatagtaagtttagtaagatnatagaagggagagaaagatgggtagtaatnngtcggttttagtaaaaaaggaagtgggttgngtagtaagttttgtaagataagtggaggagtcggntaaggttacgttcggtaaggataaatgtttttgaagggtntggaagttataacgttnagagttaantgggcggtgttaaatatttggttggtttaaaatagtgataagtttttcgtgttttttgtttaggtttacgganntgttaattttaagcgttagttatcgtaggttagtggantagcgtttcgggcggggcgggtcgcggagtatgtcggggtttgtggttttttcggagttcgggttcgtgttttgcgaggtcgtttttcgtcggtggtttttttgtgggcgggagagggcggtcgggagtttaatgagggagtaataacgtggtaattatttacgagttcgcgtcggtgttcgtttcgtagggggatttattattcggcgtcgagtcggaggggggaaacggttcgtcgttcgttcggagttcgcgagtaattttagttttttttattcgcgcgtgggcgtcggttttttagttatcgcggttttattttttttcggttttagttgttcgggttgttttcgttttcgtttgtggatgttgcgttttttcgaacgtaatatgaaggtgttttttgtcgtcgtttttatcgcggggttcgttttttttttgttgttgtcgggattttttgcggtcgatgagaagaagaaggggtttaaagttatcgttaaggttcggtggagttcgcggtatttacggtgtcggagttcgggttcgggcggttttggtttggttttggtttagttttttttttttcggtttttgtttgtggtttcgtggcgtttgggtcgttttgtttatttagtttagggaacgattcggatttatttcgatatttttagtttttgttttgatttagggagttagttggattttcggatatttatttggggtcgatattggtagttttagagtaggttttttgtaaatattttttagtgttggggagatggtgaaagattacgtttgtcggatttcgaattttttttttttttaagttaaattttagttatttttaattataaagtatagtatgtatattttaaatttaagtggtgaatttaggtttcgttttttatgggttttttaatgttaatttttagaatttgggtttattagttgtttagagtaaatattgttattttgtagtttaaggagggtatagataagtatgttttttaagaaaagggtttggagtttttattagatttttataggatttttatcgttattaaaattagatttagaattatttttttaaaaatatggttttatttttttttttatttttaggttagttttttgtatttttttttttttagtaacgtttttttaaagaagttaagttggaaatggtttttttttttagg

SEQ ID NO: 1494 - DNA, 5754 bp, Artificial Sequence
  chemically treated genomic DNA (Homo sapiens)
  unsure 1197, 1235..1236, 1309, 1318, 1335, 1375, 1410, 1441..1442: n is a or g or c or t
  unsure 1472, 1497, 1549, 1557, 1566, 1591, 1624, 1630, 1676: n is a or g or c or t
tttgaggaaagagattatttttaatttagtttttttaaaggggcgttgttaggggagggaaggtataagaagttaatttgaggatgggagagagaatagagttatatttttagagaagtggttttgaatttgattttggtgacggtaaaaattttatgagaatttaatgaaagttttagattttttttttggaaaatatgtttatttatattttttttggattataggataataatatttgttttaaatagttaatggatttagattttaaaaattaatattagaaaatttataaggagcggagtttaagtttattatttaagtttgaagtatatatattgtgttttgtaattggaagtggttaaaatttggtttaaggagagaaaggattcggaattcggtaggcgtgattttttattatttttttagtattgaggggtgtttgtaaaaagtttgttttgagattgttagtgtcggttttagatgggtattcggggatttaattaattttttgggttagggtaggggttgggggtgtcggggtgggttcgggtcgttttttggattgaatgggtaggacggtttagacgttacgaggttatagatagaagtcgagggaggaggggttgagttaaggttaagttaaggtcgttcgggttcgagtttcggtatcgtaaatgtcgcggattttatcggattttgacggtgattttgggtttttttttttttttatcggtcgtagaaggtttcggtagtagtaggaagaagacggatttcgcgatgagggcggcggtaaggagtatttttatgttgcgttcggagaggcgtagtatttataggcggaggcgaaagtagttcggatagttgaggtcggaagagggtggggtcgcggtggttagggagtcggcgtttacgcgcgggtgggggggattggggttgttcgcgggtttcgggcgggcggcgggtcgtttttttttttcggttcggcgtcggatagtaggtttttttgcggggcgggtatcgacgcgggttcgtgggtggttgttacgttattgtttttttattgggttttcggtcgttttttttcgtttataggaaggttatcggcggaaggcggtttcgtagagtacgggttcgggtttcgagaagattataagtttcggtatgtttcgcggttcgtttcgttcggagcgttgntttattggtttgcggtagttggcgtttggggttagtannttcgtgggtttggataaggggtacgggaagtttgttattgttttgggttagttaagtgtttggtatcgtttanttggttttnaacgttgtggtttttanattttttagggatatttatttttatcgagcgtggttttgntcggtttttttatttgttttgtaaaatttgttgtntaatttatttttttttttattggggtcggtnngttattatttattttttttttttttttgtnattttgttgggtttattgttgcgtnttttaacggttattttattgtttacgttgcgtttaatttttttttttttttnttttattnattatattntttttttttttttcggtagggttgngtcgtttttattttcgttttagtttttttatangcggtngttttgattgtttataaagtttcggttgggttcgtttttttttttnttggttttggtattatttttgtttacggttggggttttattgttttttatagaaaattgtttatttttttttatatttgtaattttagtattttgggaggtcgaggtgggtagattatttgatattggaagttcgagattagtttggttaatatagtgaaattttatttttattaaaaatataaaaaaaattagttaggcgtggtggcgggcgtttgtaattgtagttatttgggaggttgaggtaagagaatcgtttgaatttggtaggcggaggttgtagtaagttaagattgtattattgcgttttagtttgggtgataagagttaaattttagtttaaaaaataaataaataaataaatttgttataggtttttgaattttttatttaagaatttttttttatatgttaaaatattttaagatattttttttataatatttatagtagtatttttagtatttgttcgtttataaattgtttaatgattaaaaataattatgtatttagtatttagtaatgttttttttagtaatgggattttttttttttttttgagatagagttttattttgttgtttaggttggagtgtagtggcgtaattttagtttattgtaatttttattttttatgtttaagcgatttttttgttttagtttttcgagtagtcgggattataggtgcgtgttattatgtttagttaatttttgtatttttagtagagatggggttttattatgttggttaggttggttttgaatttttgattttaagtgatttattgttttggttttttaaagtgttgggattataggtgtgagtcgttatgttaatgggaattttttttttttgagatgaagtttttgtttttgttgtttaggttggtgtgtaatggtatgattttagtttattgtaatttttgttttttaggtttaagtaatttttttgttttagttttttaagtagttgggattataggtgtgtgttattatgttttgttaattttgtttttttttttttttttttttttgggagataagagtttcgttttgatgtttaggttggagtgtagtggtgtaatttcggtttattgtaaatttcgtttttcgggtttacgttatttttttgttttagttttttgagtagttgggattataggtattcgttattatgtttggttaattttttatagttttagtagagatagggttttattatgttatttaggatggtttttattttttgatttcgtgatttgttcgtttcggttatttaaagtgttgggattataggcgtaagttatcgcgttcggtttaattttgtattttttttagtggagatggggttttattatgttggttaggtttgttttaaatttttgattttaagtgatttatttattttggttttttaaagtgttgggattataggtgtgagttattacgttcggttattaatgggattttaataattataataatatttatggatttatagatttttagttttttaagatgtggtttatatggtggaaattattagtagagggaatttaggttaattagtgagaaaagatagaaattataatagtggaaataataatgaaatagcgattttttgaattttttttataaatttgttgttttttaataggtgagatagttttatggtttgaaaatgtaaaaatataaaaaggtataaagttttttttttatttttttttttatttgtttagtttttattattattattattcgttaatatttttatagttatttatttatgtattaatattatttaggtatatgtaattaaatataaatgtatgtttttgttttttttatataaatgatagtaaaatgatatttgtttttattttttaatagtatgttatagagatttttttatattagtatatgtagagtttttttatttttttttatagttgtatagtattttattgtttatatttattattaatgattatttaattaattttttatttatgaatatttggtttgaaataaaatttttttataataaagtatatgtttaaatatatttattgtatttgttaataaatttaaaatattgggaatttaattttttattaggatttttatttatattatgtagaaattagaagagttattgaaaggagatggtgatggaagtaatgttagtttgatattatttattttaatttttagaattgaggaaaagtattggtttatatgtattttttattaattgtgggtatatatatttgggaggggtagtttgatataattaaaggagaagtggagttaggagatttgggtatgagttttagttttattattttttggttatttgattttgtgtaagttatttaaattttttgagttttaggttttttatttgtaaaatgaagataataatattttaatttaataagttaattgtgaggattatagaagatgaatatacgaatatattttgtaaattataaagtgtaatatatatattgtatggttttttaataatgatgtaaattgttattatgggttaatattagtaagaataatttagaatttatataaatatatatgtatgtatagaaaaatttattaataagagtcgttaaagagtaatgaggtattgttggcgtgaatttgataataattagatatttttttttatttattttttgaatttttatataatttttcgagattatttttagtttttttaaagtattgggtttttttgggtttcggatagttttaattaaatttaaagaattattagagataagatattttattaaaatatgattattttaaataaagatgattttgttaggtttaatttaagtattgattttttttacgtttaagtaaatagtatagtaatttttaggtttttgatagaaatttttattattggtttttttttgagaaaattgtttttttggattattataagattatatttagtttttttaatcggatattgtagagaaaatataataagaatggaaatagtgttatggaagtttaagaggaagaaataatttttagtttgaaagaatgtggttattaggttttataggagcggaatttgaattaagttttgaaaaataggtaatattttaatatttgatatttaaagtgaaggaaagtagttgggtatggtggtttatatttgtaaattaattattttgagaggtaaaggcgggaggattatttgagtttagaagttcgagattagttttagtaatataatgagattttcgtttttataaaaaatatatataaaaattagtcgggtgtagtggtgtaggtttgtggttttagttatttaggaggatcgtttgagtttaggaggtagaggttgcggtgagagcggagatcgtgttatcgtattttaggttgggtaataaagcgagattttgttttaaaaaaaaaaaaaagtgaaggaaagtaaagtaaagaagaagaattttagtttgtttggaagtaggtataagtgaaaggtgttttagagtatgagatttgggtttgattattaagtgttttttatagttagttatcggtaatagtaagtttttaagaggtttgagataagtgatatggataatattgtgttgttagttggtaatttattattagttgttagatttagattaaaaagtagaattaatgatattagttaaaaatattaggtttaaaatagtatttaggataatattggtagaattaaaagaaatagaacgaggaagaaatttgggtggggtatagagtaaatgagtttaattttatatagaatgattttgaggtgtttaaggggttatttaatggagttttttagtaagtggtaaattgtagtatagagtttaaaatagtattaaagttagagtggttgttaaatttataggatttataaagaataagtagaattttggttgaatattggaattattaagaatgttttaaaataaataataaggtcgggcgcgtggtttaggtttataattttagtattttgggaggttgaggcgggtggatcgtttgaggttaagagttcgagatta

SEQ ID NO: 1495 - DNA, 6928 bp, Artificial Sequence
  chemically treated genomic DNA (Homo sapiens)
tttagtttttcgagtagttgggattataggcgttcgttattatgtttagttaattttttgtatttttagtagaggtagggttttatcgtgtttgttaggatggttttgattttttggtttcgtgatttatttgtttcggttttttaaagtgttgggattataggcgtgagttattatttttttttttattttttttatgaaatattttagtagtattgggtagatttagtatttttttttttaatgagttattaataaaattatgggttgggcgtagtggtttacggttataattttagtattttgagaggtcgaggcgggtggattatttgaggttaggagtttaagattagtttggataatatggtgaaattttgtttttattaaaattataaaaattagttaggtatggtggcgtacgtttgtaattttagttatttaggaggttgaggtatgagttttgtttgaatttaggaggtggggggttgtattgagttaagatagtattattgtattttagtttgggtaatagaggttttgttttaaaaaaaaaaaaaaaaaaaaaaagaaaaaagaaaaataaaaaattatgatattgtataaggtataaggtaaagtagaaatgttattgtggttatttaatttgggaatgttttagaataagaatttgttagatgttagatagatatttttaggggagtgtgtgtgtgtgtgtgtgtgtgtgtgtgtgtgtgtgtgtgttttgttaaggggtagggatgggagggtttatttatcgtagtgtaaaatattaaaatgaaattattgtttagtttatgtaaagtaaaatattttgagttatttttattaagtgtttttgttttttttttttttatttagagattgtttttagttatgggaatttagtttttgtttttggttattaattgtagattagagtttattttagattttagtttattttgttttttaagtttgggaattatttgttgttttttcgttttttaaagtatagttagggtcgggtatagtgatttatgtttgtaattttagtattttgggagatagaggcgggtggattatttgaggttaggagttcgagattagtttggttaaggtggtgaaattttgtttttattaataatataaaaattaggtcggatatggtggttcgtgtttgtaattttagtataattttagtattttgggaggttgaggtaggtggattatttgaggttaggagtttgagattagtttggttaatatgatgaaattttgtttttattaaaaatagaaaaattagttgggtatggtagcgggtatttggaattcgagttattcgggaggttgaggtaggagaatcgtttaaattcgagaggtggaggttgtagtgagataagtttgtgttattgtattttagtttgggcgataagagcgaaattttattttagaaagaaaaaaatgataaaataataagaatataaaaattagttaggtgtggtggtgtgtgtttgtaattttagttattcgggaggttgaggtaggagaattatttgaatttggcgggtggaggttgtagtaagttgaaattatattattgtattttagtttgggagataaaagtaagattttttttggtagggtatagtggtttatatttgtaattttagtattttgggaagttgaggtaggcggattatttgaagtcgggagttcgagattagttttattaatatggtgtaatttcgtgtatggtggtatatgtttgtaattttagttatttgggaaggtgagataggagaattgtttggatttgggaggtggaggttgtagtgagtcgaaattttgttattgttttttagtttaggtgatagaataagattcgttttaaaatataataatttaaaaattttttaaagttttttgattttaatatttttttaatgtttttagattttattttaaggaaatttattaaaggttaatatattaatttttttattgagatattaaaatttaaaggtagttagtatattagtttattttaaaaggttaaggatttagattgttgttttttagtttgttggtttatattgatattattggtgtttaaataaagagtattttgttttatgagggtttaggtaagtataaggtgttacgtgtgaatatttattgtgttagaaatagaatatggttaaggagtaaagaattagaaaggtaagatgtagtttttaggttttttgggtttatagttagtaatagaaggattatataagttgagaagttgaaatataaagttgttataagatattattaggttattgttaattgtaaatggttttaatattatgttatgtttaaaaggagtatagaattttaaaggtttatataatttttgtaggtaaaagtattttttttttttttgttagatttaaaaatttttgggattaattttttttaaaaaattatgttttgtatttagaagagagggatataggattatttttgtttttttgaaattaagtttagaatttgaatttttttaattagtttagttttattttggaattataaggttgaaaaggaggatattaataggttatttgataagtgatttgattagtcgttatttttgttggataagtttattgtgttttaaaggttagaggaaaaggtgtttttttagtttatttaagagttgataattttaaaatttaagttaatgttatattgtagttatttttttgatttttttattttttttaagttatattgtagttaaattttgagggttggagattttattaagggtaaaaattttttgaataggttgattttttatagaattagtagtatggaagtaagaaaagaattatttttattatagattttttaatttgttgagtagtgtttttttttggatgaataggaatttagtaattgatttatttaaaaaaggaaaaattggttagataatttttttaacgcgtttataaaagtgaaaaagaggggtattagttgtatgttaataataaatataattatattaatattaaagtgtaagagagaatagtgatttatgagtatggttttcggtattatataggtttaggtttttgattttattttatttgttttagggtgaagttgggtaatttaatttttttaagttttttttttggaattataataatatttaatttaagagtattgttaggattaagtgagatgatttatataaaatatatatttgtttaggtaattgttgaatagataatgttattaaaattagaggttttttcgtttaggagggaggtggggggggggttagttttcgttcggttagtcgttttatttaggaggtgaggggcgtttttgttcggtcgtttttattgggaagtgaggagtttttttgttcggttattattttatttgggaggtgtatttaatagtttattgagaacgggttatgatgataatggcggttttgtggaatagaaaagggggaaaggtggggaaaagattgagaaatcggatggttgttgtgtttgtgtataaagaagtagatatgggagattttttattttgttttgtattaagaaaaatttttttgttttgggattttgttgatttatgattttatttttaattttgtgttttttttatttagggttaaatggataaagggtagtgtaagatgtgttttgttaaatagatgtttgaaggtagtatgtttattaagagttattattattttttaattttaagtatttagggatataaatattgcggaaggttatagggttttttgtttaggaaaattagagatttttgtttatttgtttatttgttgattttttttttattattgttttatgattttgttaaatttttttttgcgagaaatatttaagaatgattaataaaaaaataaaaaataaaaaattagaggttttgttaatggttttttaaaattagttggtgatttagggtaagcgagtaatttttatgtttttttgttttataattaaaagtaaaaaattttttttaaaaaaattaattatttgagttaagtatagtgatgatttggatttttgttttttgattggatttgtttttggtttttgtttgtttagagtttttataaatagattaggtgatttttaatgtagattttttgataatttataggtttaaacgtgaattagaaaaaagtgagtagggtgttattttttggagaagggttgaagagaaataataattattttaattttcgagttttgttttttagttttttcgttttgagggtaaaaggttgacggttttaatttaaattttggaggaggatgtagtttttagattttttttttttttattttttttttttttttttttgagacggagtttcgttttgttgtttaggttggagtgtaatggcgcgatttcggtttattgtaatttttgtttttcgagtgtaagcgatttttttgttttagttttttaagtagttgggattataggtatgtgttattatattcgattaatttttgtatttttagtagagacggggttttattatgttggttaggttggttttaaattttcgattttaagtgattcgttcgttttagttttcgaaagtgttgggattatagacgtgagttatcgcgtacggtttagttttaagattttagagttaagaagcgtttgtaggaggacgtagggaaagattgatttttttttttataaagtttttttttttttgatattttttggttaaggaaaattttaattattggagatttttagagacggttaattcgtataaacgttgaaaaaaaaaaaattttaaaagtttttttgtttttattagaagtatcgtttttcgtacgggcgtgcgtgagcgtgcgtacgtataggttgttgggatgtcgttttttttttttcggttttttagtttttcggcgtgtttagggcgcgttaaatgggagggggagacgtaagatggcggtagtcgcgaatttcggttttagtttttcgttgttcgattgtttaatttggtgagtggcggggcggttagggttagagtggttcggtcggagttagtttgggttggaagggcggttttttttttatttttttgttgcgagtcgaacggtttagaaatttcggaatggttgaggaaaaattgtttgttgtatcgggtcgggcgacgtgttgaagaatcgagagtttggagtttaggtttaggaattgaagaaattcggggttgggggtttaaaggcgtttatttaggtagtttttttgagcgattagttagtcgtcggagcgtttcgaggttttggttcgaatttacgtttaatttttgattgagtgtttggtgttttcgtggagtatcgtatttggtttttttttgtacgtttcgagcgcgttcgagttagtttcggttttaattttatttttaagtttcgtatttttttgtggttgttgtatttttcgtgcggtatttgtttgtttgttatagagaatacgagggtaggttagcgttatttttgtttttagggagtttttagtttgtggtattagtaggtattagtaatggttggtatgaattttttttattttttcgaaagtttttgggaataatgaaataatttaatttggtttttgagtagggtataagttgaataaatatgaattattttataaggaaacgtttttgaattaagagtttttttttgttgtagtttatcgtagtgtattgtttgttgtttgtttttgtttttcgttgtattgttatttttaagggtaaagattgtatttttgtatttttagtttttaggtttgagttaggtatatagtaggaatttagaaagtatgttttggatgtaatatttttttttttttttggataaaatggttttttgttcggtgtattgttttttttatagaggaggggttggggtaggattgtgagatgattgtgttgaatttttagttagttagataaggatacgtttttttatgtgtaaatttaaaggttttagtgaggtggtttttttttttaattttaaattagtaaatttaaaaagtaagtaaatgtgtggttattttttggatcgttttgtatttttgtagtagttgttttagtttataaattttgtatttattttgatttttcgttgtattgattttaaatttgggtcgagatagtaaatatagttagaaagtattgtttttgagattatttattttttttttaggatttggtaggtattaggtatcgttaggtgttttgatatatgagttttttttgaatggtatggttgtaggatatagaggaaacgttttttaattatgttgttgtagaaagatttgttttaagggtaatatatttatttggtatttggttttatggggtatgattttgaattgttttagttttttaattatgtatttttgatttggttttagagtttaggatagtattttttgtttattttgtgatgagattaattttgatgagttttaaatagtaattaatttattcggtttttatatgatattggagtaggggtggattttagatttaaattttaggtgattagattattttagttatcgtatttgtattttttatgtagttttttttttgaggtgaagatttagtgttaaaatataggttttttggtgttgttttaaatatagatttattaaaatttgttgtagagtaattgaattattagggaagtaagtgttaaacgtagaatggagttgtaataatagtgaagtggatgatatttttgtttgaatatgaattaattataggttggtaggagagttgtaatgttgaatgggataatggttgtaaatagtatttataaatttattttgaaaatgtttttttttatttttattttttagg

SEQ ID NO: 1496 - DNA, 6928 bp, Artificial Sequence
  chemically treated genomic DNA (Homo sapiens)
tttgaaaaataaaaatagaaaaaagtatttttaggatgggtttataaatgttatttataattattgttttatttaatattgtagtttttttattagtttataattagtttatgtttaagtagaaatgttatttattttattgttattatagttttattttacgtttgatatttatttttttagtgatttaattgttttgtaatagattttagtagatttgtatttagagtagtattaagaaatttatattttaatattggatttttattttagagaaagaattgtatagagagtgtaagtacgatagttggggtggtttagttatttggagtttgaatttgaaatttatttttattttaatattatataaagatcgaataaattagttgttgtttggggtttattaagattagttttattatagagtaagtaaagagtattgttttgagttttgaaattaaattagaggtgtataattagggaattagggtaatttaaaattatgttttatgaaattaggtattaaatgaatatgttatttttgaaataggtttttttataatagtatgattaggggacgttttttttatattttatagttatattatttaagggagatttatatgttaaagtatttaacggtgtttggtatttattagattttaaggaaagggtaggtgattttaaaaatagtgttttttaattatgtttgttatttcggtttaaatttgaaattaatatagcgagggattaaaatggatatagaatttgtagattgaagtaattattataaaagtgtaaagcgatttagaaaatagttatatatttgtttgttttttgggtttgttaatttgaagttagaaaaaagaattattttattagaatttttagatttgtatatgaaaaaacgtatttttgtttagttaattgaagatttaatatagttattttataattttgttttaattttttttttatggaaaggataatgtatcggataaaaggttattttgtttaggaaaaaggaggaatgttatatttaaaatatattttttgaatttttattatgtgtttgatttaggtttaggagttgggaatataaagatgtagtttttgtttttgaggatggtaatataacgggagatagagataagtaataaataatatattgcgatgagttatagtagaaaaaaatttttaatttagaagcgtttttttgtaaggtaatttatatttatttaatttgtattttatttaaagattaaattaaattattttattatttttaagaattttcgaagggataaaaagggtttatgttaattattattaatgtttattagtgttatagattgggagttttttgagggtagggatggcgttaatttattttcgtattttttgtggtagatagataagtgtcgtacgagggatgtagtaattatagagggatgcggggtttggaggtagggttggggtcggggttggttcgagcgcgttcgggacgtataggaaggggttagatgcgatgttttacgagagtattaggtatttagttaagagttgggcgtaagttcgggttaaggtttcgaagcgtttcggcgattggttaatcgtttaaaggggttgtttaagtgagcgtttttgagtttttaatttcgggtttttttagtttttgggtttgggttttaggttttcggttttttaatacgtcgttcggttcggtgtagtaaatagtttttttttaattatttcggggtttttgagtcgttcggttcgtagtagaaaagtaaaaaaagagtcgtttttttagtttaggttagtttcggtcgggttattttagttttggtcgtttcgttatttattaggttgggtagtcgaatagcgggaggttagagtcggagttcgcggttgtcgttattttgcgttttttttttttatttggcgcgttttaagtacgtcgggaaattggaagatcgagaagggaaaagcggtattttagtagtttgtgcgtacgtacgtttacgtacgttcgtacggggggcggtgtttttagtggggatagaggagtttttgggatttttttttttttagcgtttgtgcgagttggtcgtttttggaagtttttagtggttagggttttttttggttaggaggtgttaaaggaaaaggggttttgtagggaggggagttagtttttttttacgtttttttgtaaacgttttttggttttaaaattttgggattaagtcgtgcgcgatggtttacgtttgtaattttagtattttcggaggttgaggcgggcggattatttgaggtcgggagtttgagattagtttgattaatatggtgaaatttcgtttttattaaaaatataaaaattagtcgagtgtagtggtatatgtttgtaattttagttatttgggaggttaaggtaggagaatcgtttgtattcgggaggtagaggttgtagtgagtcgagatcgcgttattgtattttagtttgggtaatagagcgagatttcgttttaaaaaaaaaaaaaaaaaaagtaaagaaagaaaaaatttggggattatatttttttttagagtttaggttaagatcgttagttttttgtttttaaagcggagaagttaaagggtaaaattcggagattggagtgattattgtttttttttagtttttttttaaaaagtggtattttatttatttttttttaatttacgtttaggtttgtagattgttagggaatttgtattaggggttatttagtttgtttatgaaaattttggataagtaggagttaggagtaggtttagttagaaagtaggggtttaaattattattgtgtttggtttaaatggttaatttttttaaaaaggattttttgtttttggttatagggtaaggaagtataaggattgttcgtttgttttagattattagttggttttaagagattattagtagggtttttggttttttattttttatttttttattgattatttttgggtgtttttcgtagagggggatttggtagggttataggataatagtggagggaaggttagtagataaataagtgaataaaggtttttggtttttttaggtagaggattttgtggtttttcgtagtgtttgtgtttttgggtatttgagattagggagtggtgatgatttttaatgagtatgttgtttttaagtatttgtttaataaagtatattttgtattgttttttatttatttaattttgagtggagagagtatagggttgggggtaaggttatagattaataggattttaaggtagaagaattttttttagtatagaataaaatgaaaagttttttatgtttatttttttgtatatagatatagtaattattcgattttttaattttttttttattttttttttttttttattttataaaatcgttattgttattatggttcgtttttaatgagttgttgggtatattttttagatggggtggtggtcgggtagaggggttttttattttttagtaggggcggtcgggtagaggcgttttttattttttggatggggcggttggtcgggcgggggttgattttttttttattttttttttggacgggagggtttttggttttaatggtattgtttgtttagtagttatttgggtaagtatgtattttatatggattattttatttaattttgataatatttttgagttaggtattattataattttagaggagaggtttagagagattgagttatttagttttattttagaataagtggagtgggattaaaaatttaaatttatatgatgtcgaaggttatgtttatgagttattatttttttttatattttgatgttggtataattatatttattattagtatgtaattgatgttttttttttttatttttgtagacgcgttgggaggattatttgattagtttttttttttttaaataaattaattgttaagtttttgtttatttagaaagaggtattgtttagtaagttgaggaatttatgatgaaagtagttttttttttgtttttatgttattggttttgtagaaaattagtttatttaaaagatttttgtttttgatgaagtttttagtttttaagatttaattgtaatataatttagaaggagtgagaagattaaaaaagtaattgtaatataatattaatttggattttaagattattaatttttaggtagattggagaaatatttttttttttggtttttaaagtataataaatttatttagtaaggatggcgattaattagattatttattaaatggtttgttaatatttttttttttagttttgtgattttaaagtaagattaggttgattggaaaaatttaaattttaaatttggttttaagaaaatagaaataattttatgttttttttttttgaatatagggtatgattttttagaaggaattagttttaaaagtttttgagtttaatagaaaagaagaagatatttttatttatagaaattgtgtgggtttttgaggttttatgttttttttaggtataatatggtgttgaagttatttgtagttagtagtgatttgatagtattttatggtaattttgtattttaattttttagtttgtgtgatttttttattgttgattatagatttaggaaatttaaaagttatattttatttttttaattttttattttttggttatgttttgtttttagtatagtagatatttatacgtggtattttatgtttatttaggtttttataaagtaaaatgttttttgtttgggtattaatgatgttagtatagattagtaaattagagggtagtaatttaggtttttaattttttaaaatagattgatgtattagttgtttttggattttggtattttaataaagagattagtatgttggtttttgatagatttttttagaataagatttaaagatattagaagaatattgaggttagaaaattttaaaaagtttttaaattattatgttttgagacgaattttattttgttatttaggttggagggtagtggtaggatttcggtttattgtagtttttattttttaggtttaagtaatttttttgttttatttttttaagtagttgggattataggtatgtgttattatatacggggttgtattatgttggtgaggttggtttcgaattttcgattttaggtgattcgtttgttttagttttttaaagtgttgggattataggtgtgagttattgtgttttgttagaaaaagttttgtttttgttttttaggttggagtgtaatggtgtgattttagtttattgtaatttttattcgttaggtttaagtgatttttttgttttagtttttcgagtagttgggattataggtatatattattatatttgattgatttttgtatttttattattttattatttttttttttttgagatggagtttcgtttttgtcgtttaggttggagtgtaatgatataaatttgttttattgtaatttttatttttcgggtttaagcgatttttttgttttagtttttcgagtaattcggattttaggtgttcgttattatgtttagttaatttttttatttttagtagagatagggttttattatgttggttaggttggttttaaatttttgattttagatgatttatttgttttagttttttaaagtgttaggattatgttgggattataggtacgaattattatattcggtttagtttttgtattgttagtagagatagggttttattattttggttaggttggtttcgaatttttgattttaggtgatttattcgtttttgttttttaaagtgttaggattataggtatgagttattgtgttcggttttaattatgttttgaaaagcggggaagtagtaggtgatttttagatttagggaataggatggattgagatttgaggtgggttttggtttgtaattagtgattaaaagtaaaagttgagtttttatgattgaggatagtttttgaatagaaaaaaaaaaaataaaaatatttaatagaggtggtttagaatgttttattttgtatagattgaatagtaattttattttgatattttgtattgcggtgggtgaatttttttatttttattttttagtaaaatatatatatatatatatatatatatatatatatatatatatttttttgggagtatttgtttagtatttagtaagtttttattttggaatatttttagattaagtagttatagtaatatttttattttattttatattttatatagtattatagttttttattttttttttttttttttttttttttttttttttttgagatagagtttttgttgtttaggttggagtgtagtggtgttattttggtttaatgtaattttttattttttgggtttaagtaaagtttatgttttagttttttgagtagttgagattataggcgtgcgttattatgtttggttaatttttataattttagtagaggtagagttttattatgttgtttaggttggttttgaatttttggttttaagtgatttattcgtttcggttttttaaagtgttgggattatagtcgtgagttattgcgtttagtttatagttttattaataatttattggaagagagaatgttagatttatttagtattgttaggatattttataaaggaagtagaaaaggggatgatggtttacgtttgtaattttagtattttgggaagtcgaggtaggtggattacgaggttaggagattaagattattttaataaatacggtgaaattttgtttttattaaaaatataaaaaattagttgggtatggtggcggacgtttgtagttttagttattcgggaggttgag

SEQ ID NO: 1497 - DNA, 6035 bp, Artificial Sequence
  chemically treated genomic DNA (Homo sapiens)
gaacgtgtggtgtttggttttttgtttttgcgatagtttgttgagaatgatggtttttagttttatttatgtttttataaatttatatgtatatatattttagtgtatattttgtattaaagtttgattatttttttttagttgaattttgtgtattttttgttttttgtttttaggtattttatattgtttttatgaataaggttatttttttattttttttttttttttttttttttttttttttattttgtcgttttttttgtattgtattatgttgttatttatgaagtgtatgtttaagggaaagttatttaattatattaagattttatttttatttttgaaaagtgaatataaatgtaaaaaatttttaaagtgttattgtaagtattagaagagttaaggtatttgaaatattattatgtaaggtagataggaataatttataaatttttagttatgtagttatgtatgtgtagaaatataatatgtggtataggtaggaattgggttattgaaataaatttgtttattgaatattgtttagcgataattttgtatttaattatttttaaaatgaatgttttatttttgttttatagtatgggttttttcgtagtatgtggtaggttttataaagaatagtttggaattgtatggtatttttatgatttagatttaaaagttataaagtattatttttgatataatttattggttatggtagtaacgaagttttaacgaagtttaagggggtaaaaatagattttatttttttaagagaggatgttaaggtattattgtaagaaaatattagatgaatgattttgtcgtgattaatttttaaaaatataatgtgttatatattttaatttttaagatgaaaaatatgtatatatgtggattttaatattaatgaaataaaataataatttgtggtttttaagtagaagagaaaacgttttttgtaagaaataggtataggtttatttgtttaataagtgagttattgattaattattttaatgaaattttttttaaatgtattagtttatcgatttggtatattattaggaaaatacgagggtgatatatattgttttgtattttttatgagataagttgtgattgtatttttttatgaattgttaggaagtgtaattgaaaggttaagaatatattttgatattgagataatagtggtgagttgaggttatagatatttgattttaggttgatgattaatgttttttatagttttaattatttaggatggtatattagttttggggttaggatataggcgatatttttatgtagaatatgaaagttgtgtaagcggtgtataatttatttttttttagataattttttgattagatttttttttggatttttagaatgttaattttattgtgattagaaggattaaatttagttaatttaaaagggtatatataaattttgttaatgttaatatgttatttaagaaaaatgtatgtagtatggattaaggaagtatatataggatttatattgatagagttttgtaattaggaaaaaaaggaattaatttttttgagtatttttatataaatgtaaggggtaaagtagaatattagaagatattttaaatgtgattacgattttaaataaatatgtttatttaggaaaatatatttttttttattttagttgttaaagttttaggaaaatttaattttgaaaatattttaagagaaatttgttttttttttttgaattttatttttttttatttttttgtaaagaaatgaatgaatgaagattaagtaattagtgaagtatagtaggtaagaatttagatttgagaattgatttttttttattttatttattatttttatatgaatttaggtacgtatttaaattattttatttataaaattaagataataataataattatatttttttaatatgatagttttgaagattgaatattatagtaaatgttgaagaagtgttttttattataattagtttttgttaggataaatggaaagaatataaatatgtttaaataattgtgaaatatatatttagagagtattaatattaaataaaaatataaagatgattattatataatatatattatgttattatataatatatagtataatataatataatataatataaagatgataattatattagtgtaatcgaagtttttagataattttaagtaaatttgaatttttatatataatcgtattattagaatggttggtttatgtaatgagtatagtaagttgaggaaaattttgttttttgtttcgtttatagaattttttagtttttaaaaagagagagatgtgtgggtgtgagagagttaatgttggggtaggaatgttattaagagtagttgaggatattaagttttttaggagagtgtatcgtggtttgaattattattttttagtaaagattatgtaagtggttttatttgggatgagtgttgaaagtggaggtaatttaatttgttaaaggatagtgtttgaagggagtgaggatttttgaattattgaatatttgttagtgatttagaaaaggttgggagttgttatgagagttgaattgtgttttttaaaattttatatgttgaagattgtttttttagggttttagaatatgaatatggatattagaaggtaagtggagtgttgagggttgttatttatttttagatgtttaattttttgttgtagttttgttttttttttttatttatttttatttatagatagtgtttttttttatatttttattatttttgtttttgttttgtttggttagtgtatagttgatatttatgtttttttgatatattttatttattgttgatattggagaaagttagggaaagggtttgagataagggatttttaggggtatttttgttgtttttttttatttttttgttaaggataaattttttttgtattaggtttgtagtaatttaagttggcgataatattaggtaatgttggtttggtttttttgttgttttttgtttttgatatttttttgttatttgatggtttaatttaagatatttaggtaggattggttatttttagtttttatggaggagattagagatagaaattttaataatataatgggatttgttggtataagtaagtattttttgtttaagataaaatttatgaagattagttagaattagtttattttttatagagttagaaataatttttaattaataatatattttttttttaagtatgtttatatttttgttagggaaaatattaatttttttggtttttttgtaagggtaaagttatttgtagtaaagttttttgtattaggaagtttttttgtattattatttttaattttttagaagggttagattagatttttatttgtatagtttaggatttatttatttataatggttaagaggtttgtttttaggatttattgttatatattttttttatttttattatatttttagttaagttgtttttaaattaatattagttatgtataaaatgtgaataattatataagatatatagaaggtttaagtggtaaatggtagttgatttattgattaatttgtatattttatgaattgatgagtagggatttattaggtataatagaagaattagtagttaaaagaagtgttaataatgtaggattttgagagggttttttggaaatataatatttattgtgaaattatatagataagaatgaaataaaggtggtgagaattatagtttattatttagaagattaaataaaggaaattttattaaatttttggggaaaaaagttagatatataaagaaaattatataaaatgagtttgatttagaaaataaaatatgaataaagaagtattagaaagaacgttagggaggaatgtatattagaatattgtagaaaaaatattttttgtggaagaataatttgagaaaataggtaatataaatattgattaaattaagaaaattaatataatgtaattgaggttttaatgagggtatttgattattttatttgaatgtagaattgtagttatttaattattagaggtaggaatttaatataatttttaaaagaaatgaagtagagggtgaattttgtagaatattttagagaaagggaagagtatgaaggaagttttggtaatatgatattgtatggtttttgtaaggaattatatatttagtttttttaggtttagaaattttttcgtggtttgtgtgtttattttgtatttataatttttaaagatattttaaaatatataattttggtttttttgtgttttataataagaagttttttttgatttgagtgagatttatagaagtatgaataatagttgtagtttgagtaggttgtgaggtagttttttgttatttgtgtgtttaggagtgtgttgtttttaaatattttttagatagtagaaattatttttatcgtattaaaagttaagttaaatgtgatattttttgtatatatatattacgagagatggaaataggttataaaaatagttagagatattgattattattatcgttggttgtagttttattgtttatatatatatatatagaaataaatagtaaagttgaaagtggataatagttttattaaaaagattgaaattttaatgacgtttgaagtttaattatgatatcgtgttgattgtttggatatagtttttttaaaatttttgtttaagttatagttgtattttttagaaataaggtataaataatatttaatttaatttgtttttttgggttagagttttagatagaaataagggatatatttgatttgtagtaaggaaagtagaatttagtttttggggtggtgaggtttatttagtgtggagtttaaaggtgttattgttttgtttttttttataaagggagttgttatggtttttttagtatagagttgggagtgattttagagtttttagtaagatgttattgattttgttgtcggtggttttgttggttttgagtttagtttagagtttaaatgaaggtaagatagaaggaggagaagatgtggtgattttgtttggggtttaggaggtgatagttgtaattatggggaagagaggagaatgaaaatatagatggggttgtagaggttttatgtttaggattaggagatttgttgtgtttttattttatattaagggtttttaatttatttaatgtataatgaaaatttaataaagaatttgtattaggggaatgagaaggtaagatttgtatttatagagagatagaattgtgttgtgaaggatgtagtggtgaatgtaaggtagatttaggaaagtttagttgtgaagattttaaattgattttagtaagtatatagggatgattgtggttttgttttatttagtggattagtattgatgatggagataaatatatattagagatattgtagagatagaattggataaaatatttgtttgtgtttaattatagatatagaaatattagatttaattattgtgattttttttttttttatatatagtattttaatgtgttgggagtggtataggtaagattgtattgaaataattatttttggttatcgaaattgagaaagtttgtgaatataagtaatgtatttataggagatggagggtataagaatattaaaatattatattgaagtatttggtatgtgtaaattaaattagtattaagttttgaaggatgttagggaagaaaaaaaggggtttttttatattgagtttatggttgttgttttgtgtggtaataattttgtttttttttatatttttttttttttttagtagttttatagatggtagttgatgagttaatttaggggatgtatggggtgtggtgagaagttttttttttttgtagaatatttgtgaattttgtaaaattcgagatgtaattttttttattattttgtgttttttttttaga

SEQ ID NO: 1498 - DNA, 6035 bp, Artificial Sequence
  chemically treated genomic DNA (Homo sapiens)
tttagaagagaagtataggatgatgggaaaggttatatttcgaattttgtaagatttataggtgttttatagggaaaggggattttttattatattttatgtattttttaggttagtttattagttattatttgtgaagttgttggaaggggaggaaggtgtaaggggaggtagggttgttattatatagagtaatagttatgaatttaatatagaagagttttttttttttttttttagtattttttaagatttaatgttaatttagtttatatatgttaggtattttaatgtgatattttggtatttttatgttttttattttttataaatatattgtttatatttataagtttttttaatttcggtaattagaagtaattgttttaatataattttatttatattatttttagtatattgaaatattgtgtgtaggggaaagaaaaattataatgattgaatttgatatttttatatttgtagttagatataggtaagtgttttatttagttttgtttttgtagtatttttaatgtgtgtttatttttattattaatgttgatttattaggtagagtaaggttataattatttttgtgtatttattgagattagtttaggatttttatagttggatttttttgaatttgttttgtatttattattgtattttttatagtatagttttatttttttataaatgtaaattttatttttttatttttttggtataaattttttattggatttttattgtatattaaataaattagaagtttttggtgtggaatgagggtataataggttttttgattttaggtatgaaatttttgtagttttatttgtgtttttattttttttttttttttataattataattattattttttaagttttaagtagagttattatatttttttttttttttgttttatttttatttaagttttgagttgagtttagggttagtagggttatcgatagtagaattagtagtattttgttggaggttttggagttatttttaattttgtgttgggagaattatggtagttttttttataaagaggagtagaatagtggtatttttgagttttatattgggtgggttttattattttagagattgggttttgttttttttattgtaggttaggtgtattttttatttttgtttgggattttagtttagaggaataggttgggttggatgttgtttgtattttatttttaaaaggtataattatgatttgaataaaggttttaaaggaattgtgtttaagtaattagtacggtgttataattgaattttagacgttattagagttttaatttttttggtaagattattgtttatttttaattttgttatttatttttgtgtatgtgtgtgtgggtagtgaagttatagttagcggtgatgatgattaatatttttggttgtttttatagtttatttttatttttcgtgatgtgtgtgtatagagagtattatatttagtttaatttttgatgcgatagagatagtttttgttatttgggagatgtttgaggatagtatatttttgggtatatagatgatagaaggttgttttatagtttatttaggttatagttattgtttatgtttttgtggattttatttaagttaggaaaggttttttgttgtgaaatataggaaggttaaaattgtgtattttaaagtatttttaggggttatgaatgtaaaatggatatataaattacgaggaaatttttagatttgagaaaattgaatatatagttttttgtaggaattatgtaatattatgttgttaaaattttttttatgtttttttttttttttagaatattttataaaatttattttttgttttattttttttaagaattgtattgaatttttatttttgataattaagtggttataattttatatttaaataaggtaattagatatttttattaaagttttaattgtattgtattggtttttttggtttagttagtatttgtgttatttgtttttttagattgtttttttataaagagtattttttttataatattttgatatgtatttttttttgacgttttttttggtatttttttgtttatattttattttttgagttaagtttattttgtgtaattttttttatatatttggtttttttttttaggaatttggtaagattttttttatttaattttttaagtaataagttataatttttattatttttgttttatttttgtttgtgtaattttataataaatgttgtgtttttaaaaagtttttttagagttttgtattgttagtattttttttagttgttgatttttttgttatatttagtaaatttttgtttattagtttatggaatatataggttagttagtgagttagttgttatttattatttagattttttgtgtgttttgtgtaattgtttatattttgtgtatggttggtattaatttgaggatagtttggttggaggtatgatggaggtagagagggtatgtgatagtaaattttaaagatagattttttgattattgtggatgagtggattttggattgtgtagatgagggtttggtttggtttttttgaagagttgggggtaatagtataggaagattttttaatatagaaggttttgttatagataattttgtttttgtaagggaattaggaagattgatattttttttggtaaaaatatagatatatttgaaaggggaatatattattaattggaaattatttttggttttatggaaagtggattggttttagttagtttttatgagttttattttaggtagagagtatttgtttgtgttagtaggttttattatattattgagatttttatttttggttttttttataggaattggagatgattaattttgtttaggtgttttaagttagattattaggtaataaaggaatgttagaaataaggagtagtagagaggttaggttaatattgtttgatgttgtcgttaatttaggttgttgtaggtttgatataagaaagatttgtttttggtaggagagtagaggaagataatagaaatgtttttaaaagttttttattttaggttttttttttgattttttttaatgttagtaatgagtaaagtgtattaggaaagtataaatattagttatgtattaattagataaaataaaaatagaagtgatggaaatgtggaaagggatattgtttgtgagtgagggtgggtggaagagaggagtaggattgtagtaggagattgggtatttagaggtgagtggtagtttttagtattttatttgttttttaatatttatgtttatattttgaggttttgaaggaatagtttttaatatatgaaattttaggaaatataatttagtttttataataatttttaattttttttaagttattaataggtgtttagtggtttaaaaatttttattttttttaggtattgttttttagtaaattgagttgtttttatttttaatatttattttaaataaaattatttgtataatttttattagaaggtgatagtttaggttacgatgtatttttttgaagagtttaatatttttagttgtttttggtaatatttttattttagtattagtttttttatatttatatatttttttttttttgaagattgggaagttttgtgaacggaatagaaagtagaattttttttaatttattgtgtttattgtataaattagttattttaataatacggttgtgtgtgagaatttagatttgtttggaattgtttaaaagtttcggttatattgatgtaattgttatttttatattatattatattatattatattatatattatatgataatataatatatattatgtgatggttatttttatatttttatttgatgttgatgttttttaaatatatattttataattatttgagtatatttatattttttttatttattttagtaaaggttgattataatagaaaatatttttttagtatttattatgatatttagtttttagaattattatattagggaggtgtgattattattattattttaattttgtagatgaggtgatttaggtgcgtgtttaggtttatgtaaaggtagtgagtggaatggaagggagttagtttttagatttgagtttttgtttattgtgttttattggttatttggtttttatttatttatttttttataagaaagtgaaaggaaatgagatttagagaagaaaaataagttttttttagaatatttttaaggttaaatttttttgagattttaatagttgaggtgagaaaaaatatatttttttgagtaaatatgtttgtttgaaatcgtaattatatttaaaatgttttttagtattttgttttattttttgtatttatataaagatatttaggggaattaattttttttttttttagttataaaattttgttaatgtagattttgtatgtatttttttaatttatgttatatgtattttttttgggtagtatattagtattggtaaaatttgtgtatgtttttttaaattgattaaatttgatttttttaattataatggaattaatattttagaaatttaagagggagtttgattagagagttgtttaagaaaggataaattgtatatcgtttatatagtttttatattttgtatgaagatgtcgtttgtgttttggttttagagttggtgtattattttgagtggttggggttgtagaaggtattggttattagtttaaggttaagtgtttgtagttttagtttattattgttattttaatgttagagtgtatttttgattttttagttatattttttagtagtttatagagaagtataattataatttattttataagaaatataaagtaatgtatattattttcgtatttttttgatgatgtattaagtcggtaagttgatatatttaagaggaattttattaaagtgattaattaatgatttatttattaaatagataaatttgtatttattttttataaaagacgtttttttttttgtttaaaaattataaattattattttattttattgatattgaaatttatatgtatgtatattttttattttgggaattggaatgtgtggtatattgtgtttttaaaagttgattacgatagaattatttatttaatgtttttttataatggtattttgatatttttttttgaaggggtgaggtttgtttttatttttttgagtttcgttagaatttcgttattgttatgattaatagattatattagaagtgatattttatgatttttgagtttagattatagaaatgttatgtaattttaaattgttttttatggaatttgttatatgttgcgaggaagtttatgttgtgagatagggatagaatatttattttaaaaatgattggatataaaattatcgttaaataatatttaataaataagtttgttttagtgatttaatttttatttatattatatattatatttttatatatgtatggttatatagttaaagatttatggattatttttatttattttgtatagtgatgttttagatgttttagtttttttagtatttataatagtattttgaggattttttgtatttatgtttattttttaaaggtagaaataaaattttaatatgattgaatgatttttttttggatatatattttataggtaatagtataatgtaatgtaaggagagcgatagagtgagagagagagagagagagagagagagagaaatgagaaaatgattttatttatgaaaataatataaaatatttaggaataaagagtaagaaatgtatagaatttagttgaagaagaatgattaaattttaatgtagaatatgtattaaaatgtatatatatgtaaatttgtagggatatggatgaagttggaaattattatttttagtaaattatcgtaaggataaaaaattaaatattatacgttt

SEQ ID NO: 1499 - DNA, 9965 bp, Artificial Sequence
  chemically treated genomic DNA (Homo sapiens)
ttaggtattttatattgttttaaggattggggtaaatttttaaatcggtttggtattggattttttgagttttatagaatattgattttttatagtgtagggggtaatggattgaataaagattaaaattttttagaatatattatttcgtagaggttataatgttatattgtggtttatagataaatggttaaattataaatgttaaataagattagtagagtaaattttaatataggtttagttttttttaaattaagatagtagtgagtattgtatgagagaagtagtagtaaatggaaaggtaatttggttgttatttagttaattttagagaaaattggagatattgattagggtgaagaatttggaatatgtaggttagatattttgtttagtttatattaattagaaaagtattaagagaggttgggtgtagtggtttatatttataattttagtattttgggaagttgaggtgggtagatgatttgaggttaggagttcgagattagtttggttaatgtggtgaaattttgtttttattaaaaatataaaaattagttgggtatattggtggtatttgtagttttagttattcgggaggttgaggtaggagaatcgtttgaattgggaggtagaggttgtagtgatttaagattgtattattgtattttagtttgggtgataaagtaagattttgttttaaaaaaaaaaaaaaaaaaaaaaaaaaaaaagtattaagaggtaatatcggtaatattattaattattttagagttttataaattttaatagaatttaaaatttgtaataatattttaaaggttataagatgaaatgtggttttatgaaattttttgtagttgtttaattttgattttttgtatgtttttatgtgtttatttgtttttatattattttttagtatttatttttattttttttggtgtgagtaaatttgtgatgttgtgtgtttattttgttatgtttatttcgttttttttttttttttttttttttaattttttatttttttaattttatatttaattattttgaattgatatattttttattatatgttgtatttattgaatagttttaagtttttagttttttatttaaaatagtggatgaatagattattttatttttttttatttaaatgaaatattttttatgtagggggttatatttgattttttttttataatcggtttaagaaaaaatattttttttttttgatttaaaaatatttttattttaggaattttattagaaatgttttaaataagttttatgaattgaagtagaaaaatattttagatttatttttgatttattttttttgtttatatttttaatttggattgaatttagttttatttttttatattagtgtttaatttagttaagtattaaattgagaaggggaagaatgaggtggagatttagattttatagttgtaattttagatattttatatttttttttaattatatgtttatgttgagagaagggtattagaagggaatagttatagtttttgaaaaggttagatttatgtatttagtatggattataggtttaataatagtttttagagttaaatttttttttgtgaatggtttgaaaatagaagaaaattatggagaaagtttttttagtagatagataattattgtttaattttatttgtatttgtttataacgtttggataatttttttttaggataattttatttttaatttagagttagttttgaggtttttgtattttttgtttttatttagaattaaagaattttagatttttttgaaattatttaatttaattgttttaatttttaaataaaaatattgatgatatgatggatttatttaaagttaggaaattagttagtgatagagtttgaaagagaattttatttttattttaggtgttattttatattttatgatgttttgtaaagattagatatataagaatatataagaatttttattaaaagttatattggaaaaagtaatataaatttttggggaaatatagtgtgaaatgattgtattttattaattagttagtatgttagttagttatttggaaattagagttaaattaaaaggtggattatttaggtagtatttaaagtatttatttttaaggggtgttaataagatagtatttttgtgtgaattagaaaaatattttttatttaggaaggtgtagttttttgagaataagatatttttttttttaggtgaatgtgttagtatttgtttgtagtgtggtaagtggagagtgagatggattttagtttttatttcgttttttgggtgggtatttttgtgtatttattagaaatttttttttggagattatatgtgggtgggggttgttttgataagtaatttgaggtggggtagagatagttaagtagtagtaaatgattattagtttgttttttttagagggtgattttttttaattgagtggggtataaagtttgaggttagaggagaggttgaaggttgttttggaagtttttttatgtttttgtttatttttatttttttaaaggtttagggttttgaattagagtatgagttattatagtgtaaattttataatttttttgaaaatagtttatagtgttagaggttaaagagtgttttggtatttattttggaggtggtatttttattttgagatagtttaaatattttttttttttgtattgtttatggaaaaagttgattttgtagttaatttatgaatatgaattttgtattgttttagttgtgtgatgattttgaatttatttttttaaagttgttgagattttttttttttatttgtaaaatggtttttgttataaggattaaaggagataatatattggtaaataaaagtgtaattaacgtggttaataggaggggaaagggtgtttttttatttttttttttattttattttattttagatgtagataatttattgttgggagttttttgtattgtttgtgttattataaatttttattttttagggtttagaggaattgggtattagaacggttgattgaaagggaagagaggatgatatttaggtttgatttgttttttgggtattataatttttatattttttttaggttttgttaaattgaagttttttttgtaaatgggtgttttgtagattttagagtatttttatttatttatgagtaggaaggtcgttagagtggttaagaatgagtattggtattggagagatttaggttggaattttggttttatttttttattttttgtgaagttttgggtaaaagttagttcgttttttttaattataaaatagggatattagttttagatagttttttgatatattgaaaaaaatattttataagtattaatattattattagggggtttgttgggttaagtgtttttgggttgttttttaaaaaattttttatagtggtagaaggaggagataatgtttgttagtttttgcgttaggtgatagttagggaaggtacgaggtgggaattggaattgggatttttgggttgtagtgggttatgttttcgtgtttgtataaagtttgttattaatagcgtgagtttttttagaattgaggatttttagattgttttaggagggggtatttgggattagatgtagaaaatgattatgatatattattatgaatagaaatggtgaattaagggtgaggtatggaattgggattatattataaaagagacggaggatataagtttataatagttattatatttatttagatttcggaggtgaaggattttttggttatatttatttttttttttaggattttttggaagttagggatagaaaatatattgggtatatattatatttttgatggttggggttataaagttttttttgggtggtttaggaagtaagattagaatatatatcgttgttggttcgaggatgatgatatgtaattattaaatttttatgggtttgaggttaagtattttgtttattattttttttttttataaatagtaggtgtttaataaataagtatgatagtaggagaggaaatgaggaaaaggtaggataaataaaatatttttgatgagttttaggttttttaattttggtttttttttaatcggtaaatattaaataagggtttaatcgtagttttgttaatatttttaaagtatttttatagttcggatgttaaattatttagtgtttattaggggttttgggatgaagggagacgtgttttttttacggttattatgatcgattattttttttttttaagtttagagtcgtaggtagtggatataaggttatttttagttttttgtttttaaggttggggagaggtaaggttttttttcgtcgtcgtaattagttcgggaataggaaggttggggaaggtgggggattttattagtaaggaaattttggggttttatttttttataggcggttttgcgagcgcggttaaagagaggtagggcgttagggaaggcgcggggattcggtttcggtggaaagatttgttttcggcgtataagataggcgggcggtcgggcgtgggcgagcgcgtagtcggcgtgttttttcgtgcgttcgggcggcgcgggcgcggtcggcgattttgtaaagggagttgtgcgtcggttttagcgtacgttcggtgtcgttcgtttttttttgtcgtcgtcgtcgtcgttgggttcgttcgtcggggaggggttttcggtttcgtagatagcggttttttgttttttgtacgttttcgtcgtcgcgtcgttagttcgtttgtgttagttttggtcgtgagtcggtcgttcgttgtcgtcggtcgtttcgtagttgtttgcgttttagtcgcgtttcgcggttagttcggttagtttaggttcgttttcggagttcgcgtttttttacgttgttttttgtttgttttcggttatgttgtttttttagtatttcgacgtgtatcgcgacgagatcgtcgtaagtatttttgttttcgtttagagggttttcgggtaaaggtgtttagtttgtttgattcgtggtattcgtagtttttttttttgtaggttttcgattttcgcgttttttttttttttttcggtttttgtttgggagaattgggtcgggggcgcggggtttttttgtagcgttggggtttcgcgggcggttattttgttagtgttggcggcggagtttgtgggtagcgtcgttcggtcgttttttagaattaatggggttaagggtagacgttcgggtagaatgggtgtttttagggagtgggaagatagacggtgttattgtttttttgattggcgaagttttttgtttaaatatggtggtaggagaaagtgttcgttggggtgtgtgtgtgtgtttgtgtgtgtgtgtgtgtgtgtgtgtgtgtgatgttatatttaaaaacgaaaataaatttttaaaatttatattttaaagtttttagagttgaagtatattcgttcgattttaaaaggtgtgttgagcgtttattttgttttaggtcggatgaggcgtattgggttttggggatgttagagattcggatagaaatggggaaggcggagtagtgattttatagtgtggtcgtgttgatttatgtttttttaaataagaaaaggagttgagagagggtgagaggaggttttagaagggagaggggttgattttttttagaatgagtaagttttgtttagtggcggagttgattattatttgtttaagttgtagatgaatttaaggtaattgttgagatttagtaggcggaattttgggtagatattttttttgtgtaaacgtgaatttgacgatttaggaattggattgtatttatatgttgtggtcgtgatttttttattaatagttatattttttagattatttaaaatataattagaataagtatgtatttgtgtgatatagttttaatgtttttttgtttatttttttaatttatgttagaaagtgtttattttaaagtacgtgttatattggggtaaagggtgttgacgtttcggagtaaaggatatattgttttaaattaagatttttaagtgatattgatgtatttatttatggtttttttgattagtggttatttggtaattatgtttttttagtttgtttagttgtttgtttattaaatttattttaatagtttaagaagttttatttttgtggtttaaaggttgttttttttgaatatgggagtaaagtgattttgttggaatggagaaagaggttggattaaatgaaaagattagagcgttagttttggttttgttatttattagttaggtgatttttagtagtttttttatttgttatgggtttttttttttatatgagaaatatttggattgattatagggtttatttgtttttgtagtaggaatgttgttatttatttatttatttatgtgatagtttagttttgtagtgttttagattagtaatgggaagttaggtgatttttttggttttggtttttgaggattagaatataaagaattatttattttgtggtttgataagtgtagttttaagtttgtttttagagttatttgttagttttttattattgtgggtgtttaaattttatagtttgtttatttatgtttgatattttatgaaaggtttaagtgaggattttatgaagacgtttaaaagattataaataattcggaagggtatattgtggattttaatatattttagtttttttttattaagtaatttatgttaattttaagtttcgtggttaagggaatgtagttttggtttagtttggattttgttgtgtggttttttgatagtttacggtggagtatttttttttttgtattaaggttttggttattaagttttaggtttgatttaggtatttgtttaaatggtagtttttgatttttaggatgggtttgtttttttttagtattagttgggtattgcggtagttttttgttttttttatttgagtatttttagttatatgtttagtatttttttgttgaaagttttggagcgttgagattattttggtggagttttgtttttttgggtagaaatttggaagttatgatattttttgtgtaatattatcgattattgtttaagagagttgttattaggaaatttaggtttgttataggggatttatattttgatagaagaggatttagggtgagaggagaatatagaagaggatgggattaatttttattaggagggggaggtattatgtgaattgagtttggaagttgattagttgggtaagggataaaggatatttttgattttgtgattaaagtaaagttatagttatgtaggtttggattgttgtggaattgtatttgtttgtagggtggtaagaaggcgattttgattagattattaatagatggataaatttgtatggggttggaaagatgagtagggtaggtttgatgggttttgtttgttgtgtgtacgagtttgtattttattttgaaggtagtgggtgagttgttgaatagtataagtaaaatatcgaataggattaagtagtatagtattttattagggttttatttttaaagttttttgaggagattaagaatgattagtaaatttaaattaggtggaagaatttgatttaagggaagtggttataagatatatttattttatttgtagggtatggttttagaaaaaattggaggtggaaagttgtggtttttgggattaattttggaattgttttggagagaatgttttttgttttagttaaaaatatttgattaataatttttatttgttgtagatgatggtgttcggtttgggtagatagggttgtttggtgtaaaattttagatatgtttgaatttagtaatataatttaggaatattttttaagtgtttattttggtttttttgatgagtgtttggggaaaagggtgggttgattgttttagttttaggtttggttttgaatttgatatggttttgggtatgttatttagttttatttttgttgttgtttttagaagtgtatgattgaaagatgttttataatttaaaattttttgattttttaatgttaggaaaagtagattgttattttaagtttattttataattattttaaggtgtgtaaaacgtaaaagatttgtagatgagaagaaaagatgaaaagttgttgttcggtggtgataatttgttaaaatttagagaggttagaattgaaaattggtaattttatgaagatttatttggagaggttttagtcgggttttatgttttttgtttttgtttttacgttttttgtttagttagttgtttaatgaaaatatatatagagtgttttggtttatttgtttatttatttagttgtgtatttttttaggagttttttgatttggtattagataaggatagatgtggaaagttcggtgttgtaagggttaaggagattgtttttatttagttagagttatattggaattagagtagtattaggttttttttaggaaatagtttttattttttggtattgtagaataaagtaaggagatagattaaaaaatttatttgagatagaggtagtttttttaatagttttatataagaagttttaattagaatgttggagtggtttagagatttgattggtaagatattgttagtgtggttttattaatggggttaatttttttttttttttgagatgaagttttgttttgttgttcgggttggagtgtaataggcgttgttttagtttattgtaatttttgttttttgggtttaggagatttttttgttttagtttttcgagtagttgggattatagtatttgttattatgttcggttaatttttaaattttgagtagagataggattttagtatgttggttaggttggttttgaatttttgattttaagtgattcgtttgttttagttttttaaagtgttgggattatggttgtgagttattgtattttgttttaatggggttaattttgatggtattaggtggagagattttgtaatgatttttattgttggataattttttttggtataattatttgaggagtggtgaaaattgtttttatttgtttttttaaacgtttttaagtggtttttaaggttaggttttagaagttttagaaagttttttttagttaggttttatttatattaagtagttttattttttttaatattatggtaatttgaatgggtgatgtttttgtattttttttttgtaaatagtggaaaaaagtattttataatagtaaataaaaaggaagaaaggtattagttttaaaatgttttgttattgtatttaagttagttttttgaatttatgttaattagaattattatattatatattagtaatttgttttttggtagtttagatataaaagtaaatttgggttatattgtagggagattttttaattattgggaagtttagcggaataggagaatgagtacgtgtgtgttagttttttttttgacgtgttttttttgtgtgtttattgtattgtttattgtattgtgttattttgtgtttggttgttgatagtacgtttttaagtttttttagtatagtggtaggtttttgttttgtgttgtagggatagagcggttttttgttttgattttttattttttttttttttttagttgaaatattttttttatgaagggtggtttgatatttttgagaatttgttaattttggtttatgtggtaatttgggtagatacgttgttagtgagttaattagtatttttgtttattttttttttatttttttattatattaaaaaaatattagttttaattggggttagagagtaattatttaatattttattttgttttttatagg

SEQ ID NO: 1500 - DNA, 9965 bp, Artificial Sequence
  chemically treated genomic DNA (Homo sapiens)
tttgtaaaaaataaaatgaggtattagataattattttttaattttaattaaaattggtatttttttaatgtaatggagaaataggaaagggatggataaaaatgttaattggtttattggtaacgtgtttgtttaaattattatatgaattaaagttggtaggtttttaaaggtgttaagttattttttatgaaaagaatgttttagttagagaggaaagaaagatgaaaggttagaataggaaatcgttttgtttttataatataaaataaagatttgttattgtgttaaagaaatttgaaaacgtgttgttagtagttaagtatagaatgatataatatagtggataatatagtgggtatataagaagggtacgttagggagggggttaatatatacgtgtttatttttttgtttcgttgagttttttaatgattagaaaatttttttgtaatatagtttaggtttgtttttatgtttaaattgttaaaaagtaagttattaatatgtagtataatgattttaattgatataagtttaaaaagttgatttaaatgtaatggtaaaatattttaaaattaatgtttttttttttttttatttattgttatgaaatgtttttttttattgtttataaaaagaaggtgtaaaagtattatttatttaggttattatgatattggaagaaataaaattgtttagtgtaagtagaatttggttgaaggaagttttttggagtttttaaggtttggttttagaagttatttgaaggcgtttgaaggagtaagtagaaatagtttttattattttttaagtgattatgttaaaagaaattatttagtagtaaaaattattataaaatttttttatttgatattattaagattaattttattaggatagagtgtagtggtttatagttataattttagtattttgggagattgaggtaggcggattatttgaggttaggagtttaagattagtttggttaatatgttgaaattttgtttttatttaaaatttaaaaattagtcgggtatggtggtaggtgttgtaattttagttattcgggaggttaaggtaggggagttttttgaatttaggaggtagaggttgtagtgagttgagataacgtttattgtattttagttcgggtaatagagtaagattttattttagaaaaaaaaaaagattaattttattaatgaaattatattgataatgttttgttaattaagtttttgaattattttaatattttagttaaggttttttgtataaagttgttgggaagattatttttattttagatgaattttttaatttgtttttttgttttgttttataatgttagaaggtaagggttattttttaaagaaaatttagtgttgttttagttttagtgtggttttggttgggtgagaataatttttttggtttttataatatcgggttttttatatttgtttttgtttgatgttaggttaaagaatttttggggaaatgtataattggataaatgggtaggtaagttagaatattttgtatatatttttattaaataattgattgagtaagggacgtaaaaataagagtaaggaatataaaattcgattaaagtttttttagatgggtttttataaagttattaatttttaattttgatttttttaaattttagtagattgttattatcgaataatagttttttattttttttttttatttgtaagttttttacgttttatatattttgaagtggttataaaataggtttaaaataataatttgttttttttagtattaagaaattagaaaattttgaattgtaaagtattttttaattatgtatttttaggagtaatagtagggataaggttgggtaatatgtttagaattatattaagtttagaattagatttgggattaaagtagttagtttatttttttttttaaatatttattagaggggttagaatagatatttaaaaaatgtttttggattatgttattaaatttaggtatatttagaattttatattaagtagttttatttgtttagatcgggtattattatttatagtagatggaagttattgattagatatttttaattaggataagaaatattttttttaggataattttagagttaattttaggagttataattttttatttttaattttttttaagattatattttataaatgaggtggatgtgttttatagttattttttttgaattaaatttttttatttgatttaagtttgttaattatttttgatttttttaagaagttttaaaaatagagttttgataaggtattgtattatttaattttgttcgatattttatttgtattgtttaataatttatttattgtttttaggataaagtgtagattcgtatatatagtaggtaggatttattaaatttgttttgtttatttttttagttttatgtaaatttatttatttgttgatggtttggttagaatcgtttttttgttattttataaataaatgtaattttataataatttaggtttgtatagttatggttttattttagttataggattaggaatgttttttgttttttatttaattggttaatttttagatttaatttatataatgttttttttttttgatggaaattagttttatttttttttgtgttttttttttattttaaatttttttttattagagtgtgagttttttgtgataggtttgaattttttgatagtaatttttttaagtaatggtcgatggtattgtataagaagtgttatggtttttaaatttttgtttaaaaaggtagaattttattaaaatggttttaacgttttaaagtttttagtaggagagtattgagtatatggttgaaggtgtttaagtgaaagagatagagagttatcgtaatgtttagttgatgttggggagaaataaatttattttagaaattaaaggttattatttaagtaaatatttaagttaagtttagggtttagtaattaaaattttaatgtaaaaaaaaagatattttatcgtaagttattaaggagttatataataagatttagattgggttagagttatatttttttggttacgaggtttagagttagtatgagttgtttaatgagaaggaattggagtgtattaaaatttatagtatattttttcgagttgtttataattttttagacgtttttataaaatttttatttaaattttttatgaaatattaaatataaataaataaattgtaggatttaggtatttatagtggtgaaaaattaataagtaattttaaaaataaatttaaaattgtatttattaaattatagaatgggtaattttttatattttgatttttaagaattagaattaagagagttatttggttttttattattagtttggaatattgtagagttagattgttatatgaatgaatgaatgaatgataatatttttattgtagaagtaagtaagttttatggttagtttaaatattttttatatgagaaaaaaggtttataataggtaaaagagttgttaaaagttatttaattagtgaatgatagaattagaattagcgttttggtttttttatttagtttagtttttttttttattttagtaggattattttatttttatatttaaaggaaataatttttaaattataggaatagagttttttgagttgttagggtaaatttaataagtaagtagttgagtagattgagaaaatatggttattagatggttattggttaaagaaattatgaatgaatgtattagtgttatttggaagttttaatttaaaatagtatgttttttatttcgaagcgttagtattttttattttaatgtagtacgtgttttaaagtaaatattttttggtataaattgggaaagtaaatagaaaaatattaaaattgtattatataaatatatatttattttgattatattttaagtaatttgagaaatgtagttattagtaagagaattacggttataatatgtggatgtaatttagtttttaagtcgttaaatttacgtttatataaaaaaggtgtttgtttagaatttcgtttattggattttaatagttattttgagtttatttgtagtttaggtaaatggtggttaatttcgttattagataaaatttatttattttgaaaaaggttaattttttttttttttaagatttttttttatttttttttaatttttttttttgtttaagaaaatatggattagtacggttatattatggggttattgtttcgttttttttatttttgttcgggtttttggtatttttagggtttagtgcgttttattcgatttgggatagggtaggcgtttaatatattttttaaaatcgaacgaatatgttttaattttaaggattttaaagtgtaagttttaaaagtttgttttcgtttttaaatgtgatattatatatatatatatatatatatatatataaatatatatatatattttagcggatatttttttttattattatatttaagtaagaggtttcgttagttaaaaaagtagtgatatcgtttgtttttttattttttgaagatatttattttattcgggcgtttgtttttgattttattgattttaggaagcggtcgggcggcgttgtttataggtttcgtcgttagtattagtagagtgatcgttcgcgggattttagcgttgtagaggagtttcgcgttttcggtttaatttttttaaataaaggtcgagggggaggggagggacgcgggggtcgaaggtttataggaagaggagttgcgggtgttacgggttaggtaggttgggtatttttgttcgggagttttttgggcggaggtagagatatttacggcggtttcgtcgcggtatacgtcggggtattgaagggatagtatggtcggggataggtagggggtagcgtggaggggcgcgggtttcgggagcggatttgagttagtcgggttggtcgcgaggcgcggttggggcgtaggtagttgcggggcggtcggcggtagcgggcggtcggtttacggttagagttagtataaacggattggcggcgcggcggcgaggacgtgtagaaagtaggaagtcgttgtttgcgaggtcgggagttttttttcggcgggcgggtttagcggcggcggcggcggtaagagggagcgggcggtatcgagcgtgcgttaaggtcggcgtatagttttttttgtaggatcgtcggtcgcgttcgcgtcgttcgggcgtacggaggagtacgtcggttacgcgttcgtttacgttcggtcgttcgtttgttttatgcgtcggggataagtttttttatcgaggtcgggttttcgcgttttttttagcgttttgtttttttttggtcgcgttcgtaggatcgtttgtaggagagtgaagttttagggtttttttgttgatggagttttttattttttttagtttttttgttttcgggttggttacggcggcgaagggagattttgtttttttttagttttggaagtagagggttggaggtggttttatgtttattgtttgcgattttggatttgaagggaagaagtaatcgattatgatgatcgtgaaagaaatacgtttttttttattttaggatttttggtggatattgggtggtttagtattcggattatggagatgttttggaggtgttggtaggattacggttgagtttttatttgatatttatcgattgagaaagaattaagattaagaggtttggaatttattaggggtattttatttattttgttttttttttatttttttttttgttgttatgtttgtttattgagtatttattgtttatgggaagaaaagataatagataagatatttgattttaaatttatgaaaatttaatagttatatgttattattttcgggttagtagcggtatgtgttttggttttgttttttggattatttagaagagattttatagttttagttattaggggtatagtgtgtgtttagtgtgttttttatttttggtttttaaaaagttttggaagaaagaataggtgtgattagaaagttttttattttcggaatttaagtggatatggtaattattataaatttgtgtttttcgttttttttgtgatatggttttaattttatgttttatttttagtttattatttttgtttatagtgatgtgttataattattttttgtatttgattttagatatttttttttggggtaatttgagaatttttaattttgggagaatttacgttattgataataaattttgtgtaaatacgggggtatagtttattatagtttagaagttttaattttagtttttatttcgtgttttttttggttgttatttgacgtagggattggtaggtattgttttttttttttgttattgtgagggattttttaaagagtaatttaggagtatttgatttagtagattttttaatgataatattaatgtttatggagtgttttttttagtgtattaggaaattatttagaattaatgtttttattttatagttaaggaaaacgggttgatttttgtttaggattttataaaaagtgaaaaagtagagttaggattttaatttaggtttttttaatattaatgtttatttttaattattttgacggtttttttatttataaataagtagagatattttagagtttatagggtatttatttgtagggaaaattttaatttagtaggatttaaagaaaatgtgggaattgtggtatttaaaggataaattaaatttaggtattattttttttttttttttagttagtcgttttggtgtttagtttttttgggttttgagaggtaaaggtttgtagtggtatagatagtgtaagaggtttttagtagtaggttgtttgtatttggagtgagatggagtgggagggaagatgggagagtattttttttttttttattgattacgttagttgtatttttgtttgttaatgtgttgttttttttaatttttatagtaaagattattttatagatgaggaaaaagaattttagtagttttaagggaatgagtttaaagttattatatagttaagataatataagatttatatttataagttgattgtaaagttaattttttttatagataatgtagagaaaggaagtatttgaattattttagaatggaagtgttatttttagaataaatattagagtattttttgatttttgatattgtagattgtttttaggggaattgtagaatttatattgtgataatttatgttttaatttagaattttaggtttttgggagaatgagggtgagtagagatatagaaggatttttagggtagtttttagttttttttttgattttaaattttgtgttttatttagttaagaagagttattttttgaagaaggtaggttagtgattatttattgttgtttggttgtttttattttattttaagttgtttattaaagtaatttttatttatatatggtttttaagagaggatttttggtaaatgtataaggatgtttatttaaggggcgaagtggggattgaaatttattttattttttatttgttatattgtagataggtgttggtatatttatttggaggaaggggtgttttatttttaagggattgtatttttttgggtaaaggatatttttttaatttatataagggtgttgttttgttagtattttttagagatggatgttttgagtgttgtttggataatttattttttaatttgattttggtttttaggtagttagttaatatattgattaattggtggagtgtagttattttatattatgtttttttaaagatttatgttgttttttttagtgtgatttttaatggaaatttttatgtatttttgtatatttaatttttgtaaggtattatgaagtgtgaaatagtatttaggataagagtaagatttttttttaggttttgttattaattggttttttaattttgaatgagtttattatattattaatatttttatttagaaattgagatagttgggttaggtggttttaaaagaatttaagattttttaattttgagtgggaataggagatataggaattttaaaattaattttgaattaagaataagattattttgagggagaattgtttaaacgttatggatagatgtaggtaagattgggtagtaattgtttgtttattgaaaagattttttttataatttttttttgtttttaaattatttataagagaagatttggttttagggattattgttgggtttgtagtttatattaaatgtatggatttgatttttttaggagttataattgtttttttttaatattttttttttaatatgggtatatggttaaaaggagatgtgaagtgtttggaattatagttgtgaaatttaggtttttattttattttttttttttttagtttaatgtttggttgaattaagtattaatatgagaggatagggttgagtttaatttagattaaaaatgtgggtagagaaagtaaattaagaatgaatttgaagtatttttttattttagtttatggaatttatttaaagtatttttaatgaagtttttaagataggaatgtttttaaattaggagagaggaatatttttttttaggtcgattgtaggagaaaaattaggtgtggttttttgtatgaaaaatgttttatttaagtagaaaaagatgaaatgatttatttatttattgttttaaatggagaattgagaatttaaaattatttaataaatataatatgtaatagaaaatgtgttagtttaaaatgattgggtataaagttagagaggtaggagattaggaaggaaaagaaagggggaaagcgagatagatatagtaagatggatatatagtattatagatttgtttatattaagaaaagtaaagataagtattaaaagatagtatggagatagataagtatatgaaaatatgtagaaaattagggttggataattgtaaagagttttatggagttatattttattttgtggtttttaggatattgttataaattttaagttttattggaatttgtaaaattttaggataattaatgatattatcgatattattttttggtgtttttttttttttttttttttttttttttttgagatagagttttgttttgttatttaggttggagtgtagtggtgtaattttgggttattgtaatttttgttttttagtttaagcgatttttttgttttagtttttcgagtagttgggattataggtgttattagtgtgtttagttaatttttgtatttttagtagagatagggttttattatattggttaggttggtttcgaatttttgattttaagttatttatttattttagttttttaaagtgttggaattataggtgtgagttattgtatttagttttttttggtgtttttttaattaatgtaaattaagtaggatatttgatttatatgttttaggttttttattttgattagtatttttagttttttttggagttaattgggtagtaattagattgtttttttatttgttgttgttttttttatgtagtatttattgttattttgatttagaaagaattaagtttatattaaagtttattttgttggttttatttggtatttatagtttaattatttatttgtaaattataatgtagtattatagtttttgcgaagtaatatgttttgggaagttttagtttttatttagtttattattttttgtattgtggagagttagtgttttgtaaaatttaaaaagtttagtgttaagtcgatttagggatttgttttaatttttaagataatgtaaagtatttaa

SEQ ID NO: 1501 - DNA, 6721 bp, Artificial Sequence
  chemically treated genomic DNA (Homo sapiens)
atagatagggttttgttatattgtttaggttggttttgaatttttggatttaagcgatttttttattttggttttttaaagtgttggtattatagatgtgagttattatgtttggttaaaagtaaaatatttttatattttaagggtatttttaagaaagtgaaaagaaagataattgttaaaataggaaaaaatatttgtaaattttatatttgataagggtttagaagttaaaacgtagaaagagttattataatttaataataaaaagataatttagtttaaaataggggtaaaggatttgaatagatatttttttaaagaaggtgtataaatggttaataagtatatggaaagatgtttaattttattagttattggggagatttaagttaaaattataatgaggtacgattttatatttattaggatggttataattaaggtttggtaaggaattagtggaattttggtttgatttggaaaggaggaattagaatttttataagttgttggagaaatgtaaaataatgtaattacgttggaaaatatttttttaaaaagttaaatttatagttattatatgttttagtaagtttatttttagatatatatttaggagaaatggaaatatatgtttatatagtaatttgtatataaatgtttataatagtattatttataatagttaaaaagtagaaataattaataaatttattagttatgaatgggtaaataaattgtgatatgtttatataatataatattatttagttatgaaatggattaaagtattgatatatgttataatatggatgaattttgaaagtattatgttaaatgaaataagttagatataaaaggttatatatgttatgattttttttatatgaattgtcgaaaatgggaaaattaatagagagataaagtagattagcgttatgaagaaatgagaaatggttaggtacggtggtttacgtttgtaattttagtattttgggaggttaaggtgggttgattatttgtagattaggagtttaagattagtttggttattatggtgaaatttcgtttttattaaaaatataaaaaaaaaaaaaaaaaattagttaggcgtggtagcgtatgtttgtagttttagttattggggaggttgaggtgggagaatcgtttgaatttgggaggtagaggttgtagtaagtcgagattatgttattgtattttagtttgggtgataaattaagattttattttaaaaaaaaaaaaaaaaagaaaaagaaaaagaaaaagaaatgagaaatgattattagtgggtataggttttatttttggaaagtgatgaagatgttttaaaattgattgtagcggtggttgtataattttgtgaatatattaaagttattgaattatatatttgaaatgggtgaattatatggtatgtgaattatatttaaagattgttgttattaaagaaaattatatatatggtgtttggtgattgaataaattacgtatttgttgaaatttgtgtttttgaggaaaaattttgtttaatgtatatttaagtgttaagttttagaaggatagttgttattagttaaacgagttaaaaatagttattatttttaatgttatttcggttttttaatggattttttaataattattagtattttttgggtattagttattttataagttatttgaaatttgttaagtgtatattttattattagttggaaggatgtgtagaattttaaagttttttttttgattttataggtgaggaaattaacgtttagaaagggggttgatatttatcgtcgtgaggtatacggtaagtttttggtgaagttgggattagaatttgtttagattttgttttttttttttcgtagatattttgtaggatttttatgttttttaaatcggtttttttgttatggttaggaaagaaattttttatagttttagtatttaagttaggttatgggtgatagttggaaagtgattaggaggttgtagtttttagaagagggtggggatattgcggagagaagatggggttagatttcgagaagatagtataagtttttgtttttgtaagagtagggacggaagtagggatataaacgtaagggatgagttttaaagtgtgatttatgagatatgatgttatatgtggtttggagtttgcggttatttttttttattatatatatagttatgagaataagttgtgagaattatttttttttttatttagttgtttttattttagaagtcgtgtgattttgttttttagtgttttgtgagttattttatttatggaaattttattttattttgattttaagtaaggtagagtgtagaagatatgtttttcggtgttattagattatttttattagtatttacgattttagtagggttggagttagcgtggaggttattggttgtttttataaagcgaggagtaggagtttttgttcgaggaatatgtttggagttcggagtttgggttagggtgggatgtaggttgagtaggaagtggatggtaagattagagtaatatttttttttttttatttagggaggagggaatggttataggttttgatatttaagaagggttaggtatagttttaagtattttataataatttttagggtttatatgatttataattttaattgtttagtgaagaaattgaggtatagtgaggttgaagaattttattagtttatattgttggtgtataatcgagttgtttaagtttcggcggtttggcgtgtaggtttatgttttgagtcgtcgtttttgtttgttttttatattttatatatgcgatgttgtgtattagaagtaaggagatggttttgttggtttgtttattaatattagggtcgagttttaaagtttttagcgtttcgttttttttcgtttgtgtgttttgagttttcgagttttagtagttttattcggtagatgagtttttggttttgttgttcgttttttgagggttgttagtggggagtcggatgagggttgaggatagggtgggtgtttgtgggaggggagagtataaaggatttgtgattatagttgggggcggggtaggaagtagaagtgatgtgagtggtggttggtgtaaggagttatagtgggttgtttggggggttgatgttattattttaggagtttcggtgaagagaggatatttatttgtgtagtcgtttttttatacgggattttaggtaaggagagagtagggattggggggtttggggttttgggtggaggggaagaggttgatggagtaggaagtgttgtgatttataagataagatatttgggttatagacggtgtttattattaattcgttgggtagttttgtgtttattttgggttttagtttttttatgtatgaaatgaagaggtagcgtgtagtttttaaggttttgtaagtgttgatattaaagtttttaagaaagttggaaagaggttttttgggatagaatattatgagagttaggatgagggttgagtttattggattagggttatgattgtgttcgttttttagttgggatgagtttagggtttttgaagatttttttggtttttttgtttttttggggcgagttacgttgtttgaaattttattttttaagttatatttttgggtagggtaggaggttttagttataatgggggttttttatagtttttttgttttagaatttgtggtatttaagggtaaaggtttttgaagagtttagtttggataaggttaggtttgggtaaggttagagaaaggaggttttagattataaataggtttaggtaaggttttagaaatattttaaaattaggaagaattttttagataattattgtttatagtaggtaataggggggtttttgttattgtcgaaggttatagagtttggtagggagtggtaaagaggggaggggtagtaagaaaggatttgaagagtaattatcgaggtttttttttatataaaatttaagggtgtggttaggtttgtttttttttttttttttttttgaggtagagttttattttattatttaggcgggagtgtagtggtacgattttggtttattgtaattttcgttttttgggtttaagcgatttttttgttttagttttttaagtagttgggattataggtattcgttattatgtttagttaatttttgtatttttagtaaagagggggttttattacgttggttaggttggtttcgaatttttgatttttagtgatttatttgtttttgttttttatagtgttcggtttataggtgtgagttattatatttggttaggtcggtagattttattttagaattcgggttgatgttattttataaagtttagagggagagttttaaagggaaaatgagaagaataggtgtaatataggattttattttttttttaattttgttaagggtttagtgggagggagagaggttagagagagtgatagagataaagaaatagagtgagagttagggtgggtaaagggtggtttgttttggggttaaaaatgatatttttttagaatgaaggtttttttaggtttttagatttttttttaaatttgttatagttattttgtttttttttttgtggttatagttttttttttattatttatagttgtgttttggggatagagttatttatttagatttttattaggttttagggaaattttaaaaaggggttttttttggttgggttttttttttttttgggtttatttgtataatgtgggggttgaattaggtttataagggatatattagttttgatatttattgaataatgatttaagagatattttagtttttttttttttatgtgttttgataatttgtggttgtggggaaagggagtagttattttttatttttttatttatggttttttagagtttaagtgttttttgtttttgtagttttatggtagttcgtttgttttttttgggtattttttttttgttgttgtttttgttcgtttttgtttcgtgttatatagtcgtacgtttagagtgtaagcgtagttataagttcgtgtttggtgtatgttggtcggggagggtgtggacgtgattagttttcgtcgttcgggtttttttttagtggatatataaaggtttttgcggttcgacggtatttgtattttttgtgaaaatgttttataggagggtattttttagcgtttgtttttggcgtttattaattggcgggtttagggttttggttgttagcgttatgtaattagggttaaagttagttttattgaagttgtggttcgggatgcggttcgtagtattcgtaacgattggaaggtcgggttggacgtgatttttaagtttattagtaatgtgtatgtgtttgtggtcggtttatatttataggtagttaattttgtagtttagaagatttattaggattagtatagttttagtattgatacggtggagtgtcgtttttataggtgagagttggggttaggggtggggggttggaaaaggcgcgggaaattttgggtggtttaggagttttggaaaggtagagttttttaattaaatttggaggttgtttttattaggaagaaattgtaattttggtttttagattttaggtgatttagttttgtggtttttttttatttaggaggttttaaatttgggagtgtttagtgagatattaagtagagagaaagtgagtgagattatgtttgagagttttagtagggtgttatttaggtttagtgagtattgaattttgttttttttgggtatagttagttttttatagagttttttttggatagggatagaggtaggagatttggtcgggttatttttttttatcgttgtgtgattttgagtattttatttttttttgagttttaattatttatttaattaatatttatatttgtttgtggtagggttatattgttgagcgatagtagttattattttagtttttgggagtaggaagtatgggatttatattttacgtttgagaaaggtatagtgtttgtaggttagatttaagttatttggtttgatttattagatttgggggttacgttttttttatagagaggtcgagtatggtttaagttgttaggatttcgggtatgtgggatttatttagggggacggatggatgaaggttatatgattagttttaaagttcgatagatattattagtgtaggattattgtttttatgtttttttttatttttttttaaaaaaaaaatagagatggggttttattatgttgtttaggttggttttaaatttttgggtttaagtgattttttcgtttcggttttttaaagtgttggggttataggtatgaattattgttttcggttaggattattgtttttataataagaaaattaaaaggaaagaaaaaaatgttattttgaaaaggaaaagagaaaatatttatatagagtattgaggtttttgaggggtgagagcggaggtatttttgttagtttcgtgttattgtgtttgtgttttggagtcgggtttttgggttttagttttagttttgtttatttatatgtgattttgagtagttttgaaggagttatttgattgaatgggggaaatatttttttgggtttagttgaggttttttttttttcgtagt

SEQ ID NO: 1502 - DNA, 6721 bp, Artificial Sequence
  chemically treated genomic DNA (Homo sapiens)
attgcgagaagagagagattttagttgggtttaggggagtattttttttatttaattaaataatttttttaggattgtttaaggttatatgtaagtgggtagaattaggattggaatttaggggttcggttttagagtataagtatagtggtacggggttggtaggaatgttttcgtttttattttttagggattttagtgttttgtataggtattttttttttttttttttaaaataatatttttttttttttttttaatttttttattataaaagtaatgattttggtcgggagtagtggtttatgtttgtaattttagtattttgggaggtcgaggcgggaggattatttgagtttaggagtttgagattagtttgggtaatatagtgagattttatttttattttttttttaagaaaaagtaaaaaagaatataaaagtaatgattttgtattgatggtatttgtcgaattttggaattagttatgtggtttttatttattcgtttttttggatgggttttatatgttcgggattttgatagtttgggttatgttcggtttttttgtggaggaaacgtggtttttaggtttgatgaattagattaggtgatttgggtttggtttataaatattgtgttttttttagacgtggaatatgggttttatattttttatttttaggggttagggtagtgattgttgtcgtttagtagtgtggttttgttataggtaggtgtgagtattggttgagtggatgattgaagtttagagagaagtgagatgtttaaggttatatagcgatgaggaaggatgattcggttaggttttttgtttttgtttttatttaggaaggattttgtggaaggttggttgtgtttaggaaaggtagggtttagtatttattagatttaaatggtattttgttgggatttttaggtatggttttatttattttttttttatttgatgttttattgggtatttttagatttgggattttttggatgagaggaggttatagggttgaattatttgaagtttgagagttaggattgtagtttttttttggtggaagtagtttttaagtttgattggaggattttgtttttttagggtttttagattatttagagtttttcgcgttttttttagttttttatttttagttttagtttttatttgtagaagcggtattttatcgtgttagtgttgaagttgtattggttttggtgggttttttgggttgtaaagttggttgtttgtgagtgtgagtcggttatagatatatgtatattgttggtgggtttaggagttacgtttagttcgattttttagtcgttgcggatgttacgagtcgtatttcgggttatagttttagtggagttgattttggttttggttatatggcgttggtagttagagttttgggttcgttagttggtgagcgttagaggtaggcgttggagggtgtttttttgtagggtatttttatagagggtgtaggtgtcgtcgggtcgtaggaatttttgtgtgtttattgggaaggagttcgagcggcggaggttggttacgtttatatttttttcggttagtatgtattaggtacgaatttgtggttgcgtttgtattttgagcgtgcggttgtgtggtacggggtagggacgggtaggggtagtagtaggagaaggatgtttaggaggagtagacgggttgttatggagttgtagagatagggggtatttgggttttgggaagttatgggtggagggatggaggatgattgttttttttttttatagttatagattattagggtatatggaaggggaggggttgagatattttttaagttattatttaatgaatgttagagttggtatgttttttataggtttggtttagtttttatattgtatagatgggtttagagaggggaaaagtttagttaaggggagtttttttttagaatttttttaaggtttaatggggatttaggtggatggttttgtttttaggatataattgtgggtggtggggagggggttgtggttatagaagaggggatagagtagttgtagtaggtttagggaggggtttggggatttgaggaagtttttattttgaagaagtgttatttttggttttagaataagttattttttgtttattttgatttttattttgtttttttgtttttgttattttttttaattttttttttttttattgagtttttaatagaattggaagagaaatgaggttttatattgtatttattttttttattttttttttggggttttttttttgagttttatggaataatattagttcgaattttagaataaaatttgtcgatttggttaggtgtggtggtttatatttgtaaatcgaatattgtgggaggtagaggtaggtggattattggaggttagaagttcgagattagtttggttaacgtggtgaaattttttttttattaaaaatataaaaattagttgggtatggtggcgggtgtttgtaattttagttatttgggaggttgagataggagaatcgtttgaatttaggaggcggaggttgtagtgagttaagatcgtattattgtattttcgtttgggtgatagagtaagattttgttttaaaaaaaaaaaaaaaaaggggtagatttgattatatttttggattttgtgtggggagaggtttcgatggttgttttttagatttttttttgttgttttttttttttttgttattttttgttaagttttgtggttttcggtagtgataggggtttttttattgtttattatggataatgattgtttggaaggttttttttaattttaaggtgtttttggggttttgtttgggtttgtttatgatttggaattttttttttttaattttatttaagtttaattttatttaagttgagttttttaaaggtttttgtttttgggtattataggttttgagataagagggttatggagagtttttattatagttggagttttttgttttgtttaaaggtgtgatttgaagggtggaattttaggtagcgtggttcgttttagggaggtaaagaggttaggggaatttttaaaggttttgggtttattttagttaggaggcgggtatagttataattttaatttagtgaatttagtttttattttgatttttatggtattttgttttagggagtttttttttagtttttttagaagttttaatgttagtatttgtagggttttagaaattgtacgttatttttttattttatatatgaggaaattgaggtttagggtggatatagggttgtttagcgagttagtgatgggtatcgtttgtgatttaggtgttttgttttataggttatagtattttttgttttattagtttttttttttttatttagggttttaggttttttaatttttgttttttttttatttggaatttcgtatagagaagcggttatatagatggatattttttttttatcgaggtttttggaatggtggtattagttttttaggtagtttattgtggttttttgtattagttattatttatattatttttattttttgtttcgtttttagttgtggttataggttttttgtgttttttttttttataagtatttattttgtttttagtttttattcggttttttattgatagtttttaggaagcgagtagtagggttagaggtttatttgtcgagtagagttgttggggttcggggatttagggtatataggcggaggagggcggggcgttgaggattttgagattcggttttggtgttgatgaataggttagtagggttatttttttgtttttgatgtatagtatcgtatgtgtgggatgtaagaggtaagtagaggcggcggtttagagtatgggtttatacgttagatcgtcggggtttgggtagttcggttatgtattagtagtgtggattggtagggttttttagttttattgtgttttagtttttttattgaataattgggattgtaggttatgtagattttaggggttgttgtgaagtgtttggaattgtgtttggttttttttgagtgttagagtttgtggttatttttttttttttgagtgggagaagagagatgttgttttaattttgttatttattttttgtttaatttatattttattttagtttaggtttcgaattttaagtatgtttttcgaataggggtttttgtttttcgttttgtgaggatagttagtggtttttacgttggttttagttttgttgaggtcgtgggtgttggtgagagtggtttggtagtatcggaggatatgttttttgtattttgttttgtttgaggttagggtggggtgaggtttttatgggtggagtgatttatagggtattggggggtaaaattatacggtttttggggtgggggtagttgggtaagggaggaggtggtttttataatttgtttttataattgtgtatatgatgggaagaagtggtcgtaggttttagattatatgtgatattatgttttatgggttatattttggggtttattttttgcgtttatgtttttgttttcgtttttgtttttataggaataggggtttatgttgttttttcggaatttggttttatttttttttcgtagtgtttttatttttttttagaaattgtagttttttgattattttttagttgttatttatggtttgatttggatgttgaggttgtgaggagttttttttttgattatgataggaaggtcggtttgagggatatagaagttttgtaaagtatttgcgggaaaagagaggtaaagtttaaataggttttgattttagttttattagaaatttatcgtatgttttacggcgatagatattaattttttttttgagcgttagtttttttatttataaaattaaagagaggattttggaattttatatatttttttagttaatgataaaatgtatatttggtaggttttaagtggtttatgaagtggttaatgtttaagagatgttagtggttgttaggggatttattaaagagtcgaaatgatattgagggtgatgattgtttttgattcgtttaattgatgatagttgtttttttgaaatttgatatttgaatgtgtattaagtagagtttttttttagagatataagttttaataagtgcgtaatttgtttaattattagatattatgtatatggttttttttagtaataataatttttagatgtaatttatatattatataatttatttattttaagtatatgatttaatggttttagtatgtttatagagttgtatagttatcgttatagttaattttagaatatttttattattttttagaaataaaatttatatttattggtggttattttttatttttttttttttttttttttttttttttttttttttttgagatgaagttttgatttgttatttagattggagtgtagtggtatgatttcggtttattgtaatttttgttttttaggtttaagcgatttttttattttagtttttttagtagttgggattataggtatgcgttattacgtttggttaattttttttttttttttttgtatttttagtagagacggggttttattatgatggttaggttggttttgaatttttgatttgtaagtgattagtttattttggttttttaaagtgttgggattataggcgtgagttatcgtgtttggttattttttatttttttataacgttaatttattttatttttttgttaatttttttattttcgataatttatataaaaagaattatagtatatgtggttttttgtgtttggtttgttttatttaatataatatttttaaggtttatttatgttgtagtatgtattagtattttagtttattttatggttgaataatattatattatatggatatattataatttgtttatttatttataattgatggatttattggttgtttttattttttagttgttatgaataatgttgttatgaatatttgtgtataggttattgtgtggatatatgtttttattttttttgagtatatatttaggagtggatttgttgggatatgtggtaattataggtttaattttttgaggaagtgttttttaacgtgattgtattgttttgtatttttttagtagtttatgagagttttaattttttttttttaaattaaattaaggttttattagttttttgttaaattttgattatagttattttggtgggtgtgaagtcgtattttattgtggttttgatttggatttttttagtggttaatgaagttgaatatttttttatatgtttattggttatttgtatattttttttggagaaatgtttatttaagttttttgtttttattttgaattgagttgtttttttattgttgaattgtaatagttttttttacgttttgatttttagatttttgttagatatagaatttgtaaatatttttttttattttggtagttgtttttttttttatttttttgagggtgtttttgaagtataaaaatattttatttttggttaggtatggtggtttatatttgtaatgttagtattttgggaggttaaggtaggaggatcgtttaagtttaggaatttaagattaatttaggtaatgtggtaaaattttgtttgt

SEQ ID NO: 1503 - DNA, 13712 bp, Artificial Sequence
  chemically treated genomic DNA (Homo sapiens)
atgtttagttagttattatattttataatttgaatttaattatttatgaattacggttaaatagattgtaaatttgtgagtttataaggaaatgataaaaatatatattaaatgttatattaaaggtcgggtatggtgttttacgtttgtaaatttagtattttgggaggttgaggtgggcggattatttgaggttaggagtttaagattagtttgattaatatgatgaaattttgtttttattaaaaatataaaaattagtcgggcgtggtggtatgggtttgtgatattagttattcgggaggttgagataggggaattatttgaatttaggaggtagaagttgtagtgagttaagatcgcgttattgtattttagtttaggtaataagagtaaaatttcgttttaaaaaagaaagaaagaaaaaaaaaaaaattatattaaaattgaataatttaagtataatgttaagagggtagattttatgttatgtgtttttaattattaaaaagattaaaaaaaaaattttaaataaattttagtatgttataattttaattatttttatataaaattattataattaaatattaatatatgttagaaatttaagaagttaatttttaatagttaggtttgaaaaattatttttatttatatttttatttatgaggtttttttattatagtagaatttatataatttaaagtatttatataaatttaaatgtattattataatgtattatttattgtaaaatttattgttatatttggtttgaataggatatgttatattgtgaaagtttttgtagtaaaattggttataatgaaggaaaataaaatttttgtgaatttttttaaagaaaatttataagttttgttttataaattttgaatatgataaatataagggataaagattaattgtttattaatgttaaaatatattagttggtaataatatagaatttattagtaattttgatattggatatagttatggattattttagttataatgaaatttagttttttaatttttttaagtttatatagagaatagttttttattatgttattttatatttttttatattttgttttatataataattagaatgattttttttttgagatagagttttgttttgttgtttaggttgaagggtagtggtgtaattttggtttattataagtttcgtttttcgggtttatattatttttttgttttagttttttaagtagttggaattatagttatttgtaattatatttagttaatttttgtatttttagtagagatagggttttattatgttagttaggacggtttcgattttttgatttcgtgatttattcgttttggttttttaaagtgttgggattataggtatgagttatcgcgttcggtttagaatgattttttttaaaaaaatttttgtagagatagggttttattttgttgtttaggttggttttaaatttttgggtttaagtaatttttttgtttcggttttttaaagtgttgggattatgggcgtgagttattgtatttggttttgaatgatttttaaaaaatatatttggttgggcgcgttggtttatatttgtaattttagtatttttagagattaaggtaggtagattatttgaggttagtagttcgggataagtttggttaatatggtgaagtttcgtttttaatataaaaattagtcgggtatggtggtgtatgtttgtagttttagttattcgggaggttgaggtaggagaattatttggatttagaaggtagaggttgtagtgagttaagatcgtattattgcgttttagttcgggtaatagagtaagaatttgtttttagaaaaaaaatgtttataagtgttatttataatagttttaaatagaaataatttaagtattaattaataagagaatggatatatgtaatttagtatatatttatataaatgggaatattaaatagtaatagaattagaggagatataattatatataagaatgaattttatatatataatgttgagtgaaagaggttagatataaaaggaatatataaaacgtacgtataattttatttatatagtaagtaaaaaatatgtaaggtatattatggtgttataggttaggtagtgattgaaagaaagtataaagggagtttttggttgttagtaatgttttggttgttttttttataattgagtatttgatatagaggtattttatttggtgaaaatttattaagttatatatttattcgtgtatttttttatagttattttattttagttgtgattttaaaaatagatatatatataatgtattttttaatgtggtttatatatatttgatattagttatttttttaattatttagtttttaacgtttagagttttttttttaatagttttaatttgttagtgttttttttgttttagagttaagtaaagtatttttaatttaatttattttttgagttttagtttgattttttttttatgagattttttttgattttttaattaaaattggattttttaaatttaggttttataaggtttatttagtatttgatttttttattgaattgtaaattttatgaggtttatttaaggtagcgtatggtatttagtagaaggtattaaaatatttattgaatgttaattttgaataaatatatattattttaataatagaaaataaataaatatataagagaaattaattgaaatttggaatagttaataatattagtttttttgagtaaattagtattggtatagtagtaaattatattaatggaatttatattaaattttagttttgtttttatttaggagagttattagtttgttttttgttagtttgttttgtggttatgtagggtataaggtgatgttatatttaaatgagatgtttttttaaattttgtattaataaaagggattataattttaagtaattaattaaaagaattattagattagtatttttgatatatgtagtaaattttttttttgggttaggcgcggtagtttatatttgtaattttagtattttgggaggttaaggtgggcgaattataaggttaggagttcgagattagtttggttaatacggtgaaatttcgtttttattaaatatataaaaaattaattgggcgtagtggtatgtatttgaggtaggagaattatttgtatttaggaggtggaggttgtagtgagtcgagatcgcgttattgtattttagttttcgggatagagtgagattttgtttaaaaaaaaaaaaaatttttttttttttttgatacgttttaattttttttggtaaaattataaataataaattcgaattttaattagaaaattaattttaattagaaaattattttgaattaatttagaaaaaagagaatgaaaattattagtgataggttatatatattgtttatttttaggtggttttcgtattttaagttttaaatttaaaatggtaaattttgaaatattgtagtatattttttttaagggttatagaaatgagaatgtatagtagtttaaaattatgtagtttatatttattaatcgaatatgtgttgagttagtagggtataggggttgtgtgggaggagtaattatgaaagggtagaagataatatttttaagtagtagtttattttagatggaaaataaaattagttatattgaaggataatgttaattggtagagagagtaataagaatgagttttttttttttatgatatttatatttataatttatttgagttataaaatagagatagaaaaattaaaattaatttttttttttttttttttttttttttgagatagagttttattttgttatttaggttggagtgtagtggtatgattttagttgattgtaatttttgttttatgggtttaagtaagttttttattttaagttttttaagtagttgggattataggcgtgagttataatatttggttcgtttttatattttttgtagagatagggtttttgttatattgtttaggttaggcgtaaatttttgggtttaagtgatttattcgttttagttttttaaaatgttgggattataggcgtgagttattttgtttggttttaaaattaatttttttattttttttgatattttttagagttatttaaaagaaaaaagagatttgaaaattaaaaaattgttttatagagaaaattttgttttttagtttgggtgatagagtgagattttattttaaaaaaaaaaaaaaaaaaaaaaaaaagaagaaaaagaagaagaagaaattgtttatttgaaattcgataatttatttttgaaggttagagtttagttttgaagttttattttacgagtttggtttagtgaggtatgttatttttcggtgaaaaagaaaatgaagagaatgttttatgttgaaagtgtttggtgacgaaaaggtagtatttagattttttattttataaaaaatgtagtagatttttaatattagtaatttagtgtttagattgttatttgaagaaaggaaaaataaattgttttaaatgttgattttattgtttcggtgggaaaaaaaaatgttttgtaggtaagtggtaaataataaaatttttgaaaaagtaggtttggggggagtttagtatagttttataatgggtatgaatagttattttattgtgttttttttattttttttttttttgggttttgatgtggatgtttttttatttgtttaggaaattgtgacgtgtgttttgggtagggtttgaggttttggaatattttttaaaagggatagagagtattttgttatattttttaattaagaagttggcgtgtagttgggagagttagattaagttggttatgatgtagaagttatttaaatgtagtcggtttgttttggtttttgtttttattttggttttggaatttttagtttaaggtaagatttaggagttttgttttttagttattttttttgtaagttttgtggtttatgtaagttattatatttattttaaggtatagaatgtataatattgtgagaaaggaggtaaagaagaaggatttggggtcgttgaattttttaatatgagttttgttaagtttggtattatagaaaaattaaattttgtggcgtgtgtagttttgtaaatttttataatgattgaaatgtgttattttgggatgaaaatgtgaggtttataaattttaaaagtttaaaaaaggaatttagaaaatgatttttgtgtttgttgtatggaggagatggtatttttgattgttggggggtgtttgtttatttttaagtgtttatattagttttaagttttagtgcgttgtgacggtgttattgttattttaatattgggagacgttatattttaattggggtgaatttgattgtgtgtattttttttttttttttttttttttaaagataaatttggtttttattgaaaatttaattatggttagatatagtttatgtaaaattttttagattttaaagagaaggttaaataatttggtatttgtgtttttgtttagagaagtattatattcggaaatatttttttaggtttatttattatttagtgttgtttagttagattgaaataatttaaaatttgtaatgattaagataatgaaaatgataggtttgtaagaaaaatataatttgttattttttggtaaataaggaattatgtttaaataagacggaggttatggtttgatagagagatggttgaatttatagtagaaaaatattaggtttcgttaaatggtaagggaaatgttgagttataatgatatatatgttttagatttgtttcgttaaagcgatttttggttgttatgattttattttcggtggagatgaaattttatagatgatcgtagagatatttattttatgttggaaatttataaaattatttttttttagttatgttaatgttgaaaaaagagtaagtaatgtttttggaacgttattaatttatgtatttttaaaatataaaatattgttaattgtagggaataggttttattgggattttttagggaatatttttagtttgatgaaataattttcgaatagttaagtggtttgataagatcgagagtaatgaggtttatattttagtatagttttgaatggttagatggtgttgggtatattttaattagagatatgtaagtttttatgttgttaaaattttttagaaatatgaattttttattaagatttattaaggaaaattagaatgaaaataaaaacgttttttgtataatatttattagaaagaaatgaagaaggtcgggtatggtggtttacgtttgtaattttagtattttgagaggttaaggtaggtagattatgaggttaggagtttgagattagtttggttaatatagtgaaatttcgtttttattaaaaatataaaaaaattagtcgggtatggtggtatatatttgttattttagttatttaggaggttgaggtaggagaattgtttgaatttgggaggtggaggttgtagtgagttgagattgtattattgtattatagtttaggtgatagtgtaagattttgttagaaagaaagaaagagagagagagagaaagaaaggaaagaaagaaagagaaggaaagaaaataatttattatgaaattgtatagaatattagtatttatgttatgatttcgtaggtttagttttttgttagaaaaggaaattatagaaagagataagggagaaattgataaattagggtgttttcgaaaaaaggtttttagtatcgggtttaagggtttgtgtttatatttgagtatgtagggaaatagatgttttttattggttgtatatgtgagtgattgcggtataaggttgtgatgtgaagagtcgtgatattatttttttatatttttacgtaatgttagatatgattcgataatattttttttgttttataaaaagtgtttatttagttcgttggtttggtagatgaaattaattaggtttttggtttgtttttattgagtatatttaaaattattttaggttattatagtggtttgttcgggttgttataataaagtattacggattgagtggtttaaataatagaaatgtatttttttatagttttggagatgggagtttaagattaaggtgttggtagggtcgatcgtattttgaggtttttttttttggtttatagatggcgtttttttttttgtttgtatatggttttttttttatgtattcgtgttttaatattatttttttagagggttattaggtattggattagggttattttaatggttttattttaattatttatatttgtaatgattttatttttgaataattttatattgtgagattttgtgggttagaattggaatatatgaatttggtggtggtatatttttattataagttaaatttaagtaaagatgtggggtaagattgtgtttattaagtataaagaaatggaaatttggggatgtgtaattttggagagtatagatgattaatttatttaatgtagggttttaggggatttgatgaggtttgtgaattttttatttttattgttttttttttttaatgatatttataaagaaaaaaaatggaatatttatgaataggtgtagttaaggaggttaggttcgttatgtgtttattgtatattgttttttagtttataggaatgatattgatttattttttgtgttgttttttgtaaagtgattttatatttattttttggtaattattattatattttttgtgatgaggaattagtattaattatagaggagaaaattggatttgatattttttattttatttgttttatatattaattttttgtaaaaaatttgtgagttttgtttaagatttattataattaattaacggttgaattggtcgtttgattttaaggttagaattaattttttattgtagtttatggattagaggttttttttatttaaataaataaataaaaaattttttgatcgtagtttttgttataacgttttttattgagttgagggagaaattgaaagtaaatttaggagttttttatagtttgttaaattatgtaagagtgggggaagtttatttattttgtggaattgatagattaggaggaagtaatttcggtttagataatgttattattttgaataaattaaatggttttttttttttttttatggtagttgttgtttaagtttttttaatatgtttgtagtaagtttttattaagaataggaaattaggttcggtatagtggtttacgtttgtagttttagtattttgggagatcgaggagtgtggattatttgaggttaggagtttaagattagtttggttaatatggtgaaatttttatttttattaaaaatataaaaattagttaggtatagtggtatgtatttgtaattttagttattcgagaggttgaggtaggagaattatttgaattagggagatggaggttgtagtgagttaagattatgttattgtattttagtttgggggatagattgagattttgttttaaaaaaaaaaaaaaaaaaaaaaaaaaaaggaaaaagaaaagaaaagaaaaaaaaaagaaattagtatattgtgattatgttgagggaaaagttagtattataatataaaaaggtatggattattggagaaagttgtttgttttggtaatatttatttatagaaagtattttggtaaagtaggatttagggtggtgggggaggtgggtagtgagggataggatttaaataaaaattatttttttttttggaatttattatataattaattaataaattttataagtggattttttaggaagataatatttttatttatgagtatagttattataattataagatatttattttaagtaagatagagttaagatatttttataattttaggggttggaattgtaaatttttatattttgttaatatttttgaatagttatgttaagaatttagtgtttgtaatttgttttttattttaaagtatatttaatattatcggttttaaattagataggtttttggagtgggattttttttatttttgatttttttataaaattttaaaatagttttgttgagatagtgtttatatattatatagtttatttattaaaagtgtttaatttagtgattaggttaggtgtggtggtttatgtttgtaattttagtattttgggaggttaaggtaagtggattatttgaggttaagagtttgagattagtttggttaatatggtgagaatttgtttttattaaaaatataaaaattaattgggtatggtggtgggtatttgtaattttagttatttgggaggttgaggtaggagaattatttgaatttgggaggtggaggttgtagtgagttgagattgtattattgtattttagtaaggatgacggagtaagattttgtttttaaaaaaaaaaaaaaaaaagtgtttaatgttttttaaaatttttttattaatatgttatagttgtatttgttatgttggtgaaaagagtggttttttatttggatgtttttttattaagtattatttttttgtttagttttttgtgtgagtaaatatttttttagtttgatatttagtgtattagcggtttgtagaagagattgtttaggtttgttttgtttagtacggtagttataagttatttgtggttattgaatatttgaaatgtggtaaggttaaattgggataggttgtgaatgtaaaatatataagatttggaatttttagtatgaagaaaagaatgtaaaatattttagtaataatttttatattgatgatatgttaaaggataatatttgaatatgttaggttaaataaaattaattttatttgtttttttttatttttaaaaatatggtcgttggaatatttaaaattttttatgtggtttgttttgtgtttttattggataaagttggtttagatagtataaggtgtgaagatatcgttttttgttggagaagatgttggatttttattttatttataggaagagacgtttaagtagtaattagatgttaaattaatgttgttttaggaaagaattaaaagagaaagagtgaaattaggtcgggcgcggtggtttacgtttataattttagtattttgggaggttaaggcgaggggattacgaggttaggagatcgagatttttttggttaatttcgtttttattaaaattataaaaaattagtcgggtatggtggtacgtgtttgtaattttagttagtcgggaggttgaggtaggagaatagtttaaatttaggtggcggagggtgtagtgagttgagatgtgttatagtattttagtttgggtaatagagttagattttattttaaaataaggaaaaataaaaaagaaaagaaagaaagtttataaattgagatttttagagatattaaatggtagaatgggaatttgaatttaaatttataagatgtttattttcggagattataggttattgttgttttttttttttttatgataggaattagtaatgaagagttttgattatgtgttaggtattattttgagaatttaatatttgtatttttttattaattttattattgttttattttatagatgagaaaattgaggtataggaagtttaagttggttaagattatatagttagtaaggggtagatattgaaaggttattttgtttgttttatttttagtttttaggtagtggtagagttagtttattttggataaatagtttttttagattagatattgtaagttatatttaggaattataggaaagattatgatagaataatatatagttataaagaaaagaaagaaaatttaatgggagaatatttattgttttttatattaaagtgtttaatgtttatgtttttagaggaatattgtttattatagtaatttagaaaataaaatgagaaaaaaaattattaaagattttatttttagttatttttgtgtatttttttttatttttttttttatgtttgtttatataattgaaattattatttatgtaaagaggtattttgatttttttagttatttttatttatttttaattttgtaaataaattttttttttttgagatagtttcgttgtgttatttaggttgaagtgtagtcgtgtaattttggtttattgtgattttttagttttaagtaatttttttgttttagttttttaagtagttgggattgtagatgtgtgttattatatttagttaatttttaaaatttttttttttttttttggtagaaatgggagtttttttatgttgtttagtttgtattgaatttttgggtttaagtgatttttttattttagttttttaaagtgttgggattttaggtatgagttattatatttaatttaatttttatttttattttattaaaaaaaaaagtttttgtttattcgttttttatttttttatttatttttaagtataggtttttttataatgttatattgttttttttataaaaagtattttcggtcgggtgtggtggtttatatttgtaattttagtattttgggagattgaggcgggtggattatttgaggttaggagttcgagattagtttggttaatatggtgaaattttatttttattaaaaatataaaaattagttggatatgattgtgggtatttgttattttagttattcgggaggttgaggtaggagaatcgtttgaatttgggaggtagaggttgtagtgagtcgagattgtgttattgtattttagttagggtaatagagcgagattttattttaaaaaaaaaaaaaaaaaagtatttttttttatttggttagtatttttttatgagttgatgttttgtaatttatttgaatgttttttattattttgtggtgagttttaaaattattttttttgatttttaagaattttagatatgtttttttttgttaggtaattattagttgtatttattagaataaagtatatgtttggagtggggaggagatgaattttttgaagggcggtgaagtattttttattattaggtttttgtttttgttaaattgaggaaggaagattttattttattagttaataaagaattttttatataggtcgggtatggtggtttacgtttgtaatttttatatttttagaggttaaggtgggtggattgtttgagtttaggagtttgagattagtttgggtaatatggtaaaattttatttttattaaaaatattaaaaattagttgggcgtggtggtgagtgtttgtaattttagttattttagagggtgaggtagaaaaattgtttgaattcgggaggtggaggttgttatgagtcgagatcgtgatagtgtattttagtttgggcgatatagtaagatttttttttaataaaataaaataaaataaatatataaataaattttttatataattttataatattagatttggagttttttttatagaaatgaaatttagaagaagttgagatttagatattttaagttgtttggtgttttgtgaatagaggagatttgtttttgtgaaatttgagtgtaaagatataggataaattgttatttattttttatttttaaggatattgtatggttttaaaatataagaattagaattttgtgatattaggggtattttatagtgtgtttttttttttttttgaatttgatttgatttatttttatgaaaagatgtgggttttggggttagatgtgggttggaattttagcgtttgtgtggttgtaatttttttttgtgtaaaattgagataatagtataaaagtaataatagttaatattattaagtgtttattgtgtgtttggtattgtgttaaattttttaagtgtatttttttatttaatttttgtgataggtttatgatattattagtatttttatattatagtgagggtttagagaagttaaggttttataattagttagtagatttgggattttattttaggtagttgattttaaagtttattttaattttaaattgttattttttggagtgttgtaagaaggataatttatataaaatgttggtatatagtgggtgttgttgttatatgaatgggtataaaatttgtttatattttgttttttattaaatttagaatttatttagttaaaatttttttagggcgggtggggtgtagttgtttatttcggtaattttagtatattgggaggttaaggtaggaggattgtttgagtttaggtgtttgagattagtttgggtatatagtgagatttttatttttttaaaaaataaataaataaataaaaataaaataaaattagttgggcgttgtggtgtttttgtatttttagttatttaagaggttggggtgggagaatggtttgagtcggggagtttaaggttgtagtgagttatgattatagtattgtattttagatttgggtagtcgattgagattttgtttcgaaaaaaaaataaaaataaaaattttttaggatagagtgattagaagttgtgtagtagatatttagtaataatgtgggtttttcgggtagg

SEQ ID NO: 1504 - DNA, 13712 bp, Artificial Sequence
  chemically treated genomic DNA (Homo sapiens)
tttgttcgaggaatttatattgttattaagtatttattatatagtttttaattattttgttttaagaagtttttatttttatttttttttcgagatagggttttagtcggttgtttaagtttggagtgtagtattgtgattatagtttattgtaattttgaatttttcggtttaagttatttttttattttagttttttgagtagttgggaatataggggtattataacgtttagttagttttgttttgtttttgtttgtttgtttgttttttggagagatgggggttttattatgtgtttaggttggttttaaatatttgggtttaagtagtttttttgttttggttttttagtgtgttgagattatcggaatgagtaattgtattttattcgttttaagaaggttttaattaaatagattttaaatttggtaaaaggtaaaatgtagatagattttgtgtttatttatataatagtagtatttattatgtgttaatattttatataaattgttttttttataatattttaaaaagtagtagtttaaagttagaataggttttggaattagttgtttggagtgaagttttaggtttgttgattagttatggaattttaatttttttgaatttttattgtaatatgaagatattaatagtgttataagtttattataaaaattaaatgagaaaatatatttagagaatttaatatagtgttaggtatatagtaagtatttgataatattaattgttgttatttttgtattattattttaattttatataaaagaaaattgtagttatataggcgttaggattttaatttatatttgattttaaagtttatatttttttatagagatgagttaaattaggtttagaaaggggaaggaatatattgtggagtatttttggtattatagaattttagtttttgtgttttagggttatatagtatttttaggaatgaaaagtagataataatttgttttgtgtttttgtatttagattttataagaataagttttttttatttatagagtattaggtagtttggaatatttgagttttagttttttttgaattttatttttatggaaaaggttttaaatttgatattatgaggttatataggagatttatttatgtatttattttattttattttattgagagagagttttgttgtgtcgtttaggttggagtgtattgttacgatttcggtttatggtaatttttatttttcgggtttaagtaatttttttgttttattttttggagtaattgggattataggtatttattattacgtttagttaatttttagtatttttagtagagatggggttttgttatgttgtttaagttggttttaaatttttgagtttaggtaatttatttattttggtttttgaaaatgtgaggattataggcgtgagttattatgttcggtttatataggaggttttttgttagttaatgaaataaaattttttttttttagtttagtaaagataaaggtttggtggtgagaaatattttatcgttttttaaaaagtttattttttttttattttaagtatatattttattttaatgagtgtaattaataattatttagtaagaaggagtatgtttaggatttttgaaagttaggaagggtagttttaaagtttattataaaataatggaaaatatttagataaattataaggtattaatttataagagaatattaattaaatgaagaaaagtatttttttttttttttttttgagatgaagtttcgttttgttgttttggttgggatgtagtggtataatttcggtttattgtaatttttgttttttaggtttaagcgatttttttgttttagtttttcgagtagttgggatgataggtgtttataattatatttagttaatttttgtatttttagtagggatggggttttattatgttggttaggttggtttcgaatttttgattttaggtgatttattcgttttagttttttaaagtgttgggattataggtgtgagttattatattcggtcgaaagtattttttatggaaaagataatgtggtattgtagaaaaatttatatttaaaaatgagtgagagggtgagaggcgggtaggtaaaaatttttttttttaataaaataaaaataaaaattaggttgggtgtggtagtttatgtttgaaattttagtattttgggagattgaggtgggaggattatttgagtttaggagtttaatataggttgggtaatatagagagatttttatttttattaaaaaagagaaaaaagattttaaaaattagttggatgtggtagtatatatttgtagttttagttatttaggaggttgaggtaggaagattgtttgagattgggaggttatagtgagttaagattgtacggttgtattttagtttgggtgatatagcgagattgttttagaagaaaaaagtttatttataaaattaaaaataaataaaaataattgagaaaattagaatatttttttgtatgaataatagttttaattatataaatagatatggggggaaaaatggaaggaaatatataaaaataattggaggtagaatttttggtgatttttttttttattttgttttttaaattgttataataaataatatttttttaaaaatataaatattaaatattttaatatagaaaatagtaaatatttttttattggatttttttttttttttttgtaattatatattattttattataattttttttatgatttttgagtatagtttataatgtttggtttgggagagttgtttgtttaaaatgagttaattttgttattgtttggaggttggggataaggtaggtaaaatgattttttaatgtttgttttttattggttgtgtgattttggttaatttaaattttttgtgttttaatttttttatttgtaggatggggtagtaatagagttaataaggagatataaatgttaggtttttagagtagtatttagtatatagttagagttttttattgttagtttttgttatgaaaaggaggaggataataatgatttatgattttcgagagtgaatattttataaatttaaatttaaatttttattttattatttagtatttttaggagttttaatttatggattttttttttttttttttttatttttttttattttgagatagagtttggttttgttgtttaggttggagtgttgtggtatattttagtttattgtatttttcgttatttgggtttaagttatttttttgttttagtttttcgattagttggaattataggtacgtgttattatgttcggttaattttttgtagttttaatagagacggggttagttaggaaggtttcgattttttgatttcgtgattttttcgttttggttttttaaagtgttgagattataggcgtgagttatcgcgttcggtttggttttatttttttttttttgatttttttttgaggtagtattagtttagtatttaattgttatttagacgtttttttttgtaggtgaaataaaaatttagtattttttttagtagagggcggtgtttttatattttgtattgtttagattaattttgtttaatagaaatataaagtaaattatatagggagttttaaatgttttagcggttatatttttaaaagtaaaaagaaataggtgaaattaattttatttaatttaatatatttaaatattgttttttaatatattattaatgtaaaagttattattgggatattttgtatttttttttttatattaagggttttaaattttgtatattttgtatttatagtttgttttaatttggttttgttatattttaagtgtttagtagttataagtgatttgtggttatcgtattggatagagtaggtttaggtagttttttttgtaagtcgttgatgtattgagtattaagttgagaaaatgtttgtttatataggaagttaaatagaaaaataatgtttaatgagaaagtatttaggtgaaagattattttttttattagtatgataaatataattgtagtatattagtaaaaaaattttaaaaaatattgaatatttttttttttttttttttggagatagagttttgtttcgttatttttgttggagtgtagtggtgtaattttagtttattgtaatttttattttttaggtttaagtgatttttttgttttagttttttaagtagttggaattataggtgtttattattatgtttagttaatttttgtatttttagtagagataagtttttattatgttggttaggttagttttaaatttttgattttaagtgatttatttgttttggttttttaaaatgttgggattataggtatgagttattatatttggtttaattattgaattgaatatttttaatgggtgaattgtatggtatgtgaatattattttaataaagttattttaaaattttataaagaaattaaaagtagaagggattttattttaaaagtttatttaatttggggtcgatgatgttaaatgtattttaaaataaagaataagttatagatattaaatttttgatatagttatttaagggtgttggtaggatgtgaaaatttatagttttagtttttgaggttgtgagagtattttgattttattttgtttgagataaatgttttgtgattatagtggttatgtttatggatagaaatgttatttttttaaaaggtttatttatgggatttgttggttaattgtgtagtggattttaagggaaagaatggtttttatttgaattttattttttattgtttattttttttattattttgagttttgttttattaaaatattttttatgagtaaatgttattaaagtaaataattttttttaatagtttatatttttttatattatggtattaattttttttttaatataattataatatattaattttttttttttttttttttttttttttttttttttttttttttttttttttttttttttgagatagagttttagtttattttttaggttggagtgtagtggtatgattttggtttattgtaatttttatttttttggtttaagtgatttttttgttttagtttttcgagtagttgggattataggtgtatgttattatgtttggttaatttttgtatttttagtagagatgggggttttattatgttggttaggttggttttgaatttttgattttaagtgatttatatttttcggttttttaaagtgttaagattatagacgtgagttattgtatcgagtttaattttttatttttaatggaaatttattgtaggtatgttagagaaatttaagtagtaattattatgaaggggaaaagaagattatttgatttatttaaaatggtagtattatttaagtcggagttatttttttttggtttattaattttataagatggataagttttttttatttttgtatggtttgataagttataaaaagtttttaagtttatttttaattttttttttaatttagtgggaaacgttatagtaagggttacggttaaaggattttttgtttgtttgtttaaataaagaaaatttttgatttatgagttgtagtagaaagttaattttggttttgaaattagacgattagtttagtcgttaattagttgtaatgggttttgggtaagatttataaattttttgtaagaggttaatgtatagagtaaatgagatgagaaatgttagatttagtttttttttttataattggtgttaattttttattatagggaatgtgatgatgattattagagaatggatgtgaaattattttataaagagtagtataaggagtggattagtattatttttgtgagttaggagatagtatatagtggatatatggcgggtttggtttttttggttgtatttgtttatggatattttattttttttttttatgggtgttattggaaaagagaggtaataaaagtggaagatttataggttttattaaattttttggagttttatattaaatagattagttatttgtgttttttagagttatatatttttaaatttttatttttttgtgtttggtaaatataattttattttatatttttatttgggtttgatttataataaaaatatattattattaaatttatatgttttagttttaatttatagaattttataatgtgaaattgtttagaaatagggttattgtagatataggtagttaagatgaggttattagggtggttttgatttaatgtttggtgattttttaagaagatggtattaagatacggatgtatggaggaaaggttatgtgtagataagggagaaggcgttatttataagttaaggagagaggttttagaatgcgatcgattttgttagtattttgattttggatttttatttttagaattgtgaggaaatatatttttgttatttaagttatttagttcgtggtattttgttatggtaattcgagtaaattattatagtgatttgaaatggttttgaatatgtttagtaaaagtaagttaaaagtttagttgattttatttgttaaattaacgggttagataaatattttttataagataggaagaatgttgtcgaattatatttggtattgcgtggaggtgtgaggaaatggtgttacgattttttatattatagttttgtgtcgtagttatttatatgtgtagttagtgggggatatttatttttttgtatgtttagatgtgggtataagtttttgagttcgatattgagagttttttttcggaaatattttagtttgttagttttttttttgtttttttttatggtttttttttttaataaagagttaaatttacgaggttatgatataaatgttagtattttatataattttatgatgaattatttttttttttttttttttttttttttttttttttttttttttttttttttttttttttttgatagagttttgtattgttatttaggttgtagtatagtggtgtaattttagtttattgtaatttttattttttaggtttaagtaatttttttgttttagttttttgagtagttgggatgataggtgtgtgttattatgttcggttaatttttttgtatttttggtagagacgggattttattatgttggttaggttggttttaaatttttgattttatgatttgtttattttggttttttaaagtgttgggattataggcgtgagttattatgttcggttttttttatttttttttaatgaatattatataaggaacgtttttgtttttattttagttttttttaatgaattttagtgggaaatttatgtttttgggaaattttgataatataaagatttatatatttttggttggggtatgtttagtattatttggttatttaagattgtattaaagtatgggttttattattttcgattttgttagattatttggttattcgggaattattttattaagttgaagatattttttaaaagattttagtgaagtttgttttttataattgataatgttttatattttaaaaatatataaattaataacgttttagaaatattatttgttttttttttagtattagtataattagaagaaaatgattttataaatttttaatataaaatgaatgtttttgcgattatttgtaagattttatttttatcggaagtaagattatgataattaaaagtcgttttgacgaaataaatttaggatatgtgtgttattgtgatttaatattttttttattatttggcggaatttagtgtttttttattataggtttagttatttttttattaagttatgattttcgttttatttagatatgattttttatttgttaaagaataataaattgtattttttttataagtttattatttttattgttttagttattataggttttaagttgttttagtttgattaaataatattaaatggtagataaatttaggaagatattttcgaatatgatgtttttttgagtaagagtataaatattaaattatttggttttttttttaaaatttgagaggttttatatgaattatgtttaattataattgagtttttagtaagaattaagtttatttttaaaaaaaaaaaaaagaaaagaaaatatatatagttagatttattttaattggaatataacgttttttagtgttaaaataataatgatatcgttatagcgtattaaaatttggggttgatgtagatatttaggggtaggtagatattttttaatagttaaaggtgttattttttttatgtaataggtataggagttattttttagattttttttttgagtttttaaaatttataaattttatatttttattttaaaatagtatattttaattattgtaagagtttataagattgtatacgttatagagtttaatttttttgtggtattaaatttaatagaatttatattaaagggtttagcgattttaaattttttttttttgtttttttttttataatattatatattttatgttttaaaatgaatataatgatttgtatggattatagggtttatagagaagatggttggggaataagatttttgagttttattttgaattgaggattttagaattaggatgagggtaagagttaggataagtcgattgtatttgagtagtttttgtattatgattaatttagtttagtttttttagttgtacgttaattttttgattaggaaatgtagtagggtgttttttgttttttttagaaaatgttttaaaattttaaattttgtttagaatatacgttataattttttgaataaatagaaagatatttatattaaaatttagaaagaaagggggtggggggaatatagtaaaataattatttatatttattatgaaattgtattggattttttttaggtttgtttttttaaaagttttgttgtttgttatttgtttgtaagatattttttttttttatcgaaatagtagaattagtatttgggatagtttgttttttttttttttaggtaataatttaaatattagattgttaatattaagaatttgttgtattttttatgagataagggatttaggtgttgttttttcgttattaagtatttttaatataaaatattttttttatttttttttttatcggggagtaatatattttattgagttaagttcgtgaagtgaaattttaaagttgagttttaatttttaagaatgagttgtcggattttagatgaatagttttttttttttttttttttttttttttttttttttttttttttttttgagatggagttttattttgttatttaggttggagagtagggttttttttgtaaaataattttttagtttttaaatttttttttttttttaagtagttttgggaagtgttaggaggaatgagaaaattaattttaaggttaagtaaggtggtttacgtttgtaattttagtattttgggaggttgaggcgggtggattatttgagtttaggagtttgcgtttggtttgggtaatgtggtagaaattttgtttttataaaaaatataaaaacgagttaggtgttgtggtttacgtttgtagttttagttatttgggaggtttgaggtgggaggtttgtttgagtttatgaggtagaagttgtagttagttgagattatattattgtattttagtttgggtgatagagtgagattttgttttaaaaaaaaaaaaaaaaaaaaaaaagaattaattttaatttttttatttttgttttataatttaaatgagttataaatgtggatgttataaggaaggagagtttatttttattgttttttttgttaattagtattattttttaatataattgattttgttttttatttaaaatagattgttatttgaagatgttgttttttatttttttatgattgttttttttatataatttttgtattttgttagtttagtatatattcgattagtaaatgtgagttgtatgattttaagttgttatatatttttatttttgtagtttttagaggaaatgtattatagtattttagaatttattattttgagtttaagatttggagtacgaaagttatttaggaatggatagtgtgtgtgatttattattgatgatttttatttttttttttttaaattagtttagaatagttttttgattaaaattagttttttggttaaaattcgagtttgttatttgtaattttgttagaaaagattaaaacgtgttaaaaagaaaaaaaaattttttttttttttaaatagagttttattttgtttcgagggttggagtgtagtggcgcgatttcggtttattgtaatttttattttttgggtgtaagtgatttttttgttttaggtgtatattattacgtttagttaattttttgtatgtttagtagagacggggttttatcgtgttagttaggttggtttcgaatttttgattttgtgattcgtttattttggttttttaaagtgttgggattataggtgtgagttatcgcgtttggtttaaaaagaaaatttgttatatatgttaaaagtattaatttggtaatttttttagttggttgtttaaaattataattttttttgttaatataggatttaggaaaatattttatttgagtatagtattattttgtgttttatatagttataaagtaagttaatagaaagtaaattaatgatttttttaagtgaggatagaattgaggtttaatataaattttattgatatagtttgttattatattaatgttaatttgtttagaaaggttaatattattgattattttagattttagttaattttttttgtatatttgtttattttttgttattaaaatggtatgtgtttgtttaaaattaatatttaataggtattttaatgttttttgttaaatgttatacgttgttttagatgagttttatggagtttatagtttagtaggagagttaggtattaagtaagttttgtgaaatttaaatttggagaatttagttttgattaggaagttaaggaaggttttatggagagggagttaaattgaaatttaaagggtgaattaggttaagaatattttgtttggttttaagataagaaggatattagtaaattggaattgttgaagaaagagttttgaacgttggaggttgagtagttggagagatgattagtgttagatatatgtagattatattagagaatatattgtgtgtgtgtttgtttttaaaattataattgaagtaaaataattatgaaaaagtatacgaataggtgtatagtttgatgaatttttattaagtgaaatatttttgtattaaatgtttagttataaaaaaaatagttagaatattattagtagttagaagttttttttgtgtttttttttagttattgtttgatttgtaatattataatgtattttatatgttttttgtttattatgtgagtggagttatacgtacgttttgtgtattttttttgtgtttggttttttttatttaatattatgtgtatgagatttatttttgtgtgtagttgtattttttttaattttattgttgtttggtgtttttatttgtatgaatatatattaaattgtatatatttatttttttgttgattgatatttggattgtttttatttggggttattatgaataatatttgtgaatattttttttttggagataaatttttgttttgttgttcgggttagagcgtagtggtgcgattttggtttattgtaatttttgttttttgggtttaggtgatttttttgttttagtttttcgagtagttgggattgtaggtatgtattattatgttcgattaatttttgtattaaagacggggttttattatgttggttaggtttgtttcgaattgttgattttaagtgatttgtttgttttggtttttgaaagtgttgggattataagtgtgagttagcgcgtttagttagatatgttttttaaagattatttagagttaggtgtagtggtttacgtttataattttaatattttgggaggtcgaggtaggaggattgtttgagtttaggagtttgagattagtttgggtaatagagtgagattttgtttttataaaaatttttttaaaaaagattattttgggtcgggcgcggtggtttatgtttgtaattttagtattttgggaggttaaggcgagtggattacgaggttaggagatcgagatcgttttggttaatatagtgaaattttgtttttattaaaaatataaaaattagttgggtgtggttgtagatggttgtagttttagttatttgggaggttgaggtaggagaatggtgtgaattcgggaggcggagtttgtagtgagttaagattgtattattgttttttagtttgggtaatagagtaagattttgttttaaaaaaaaaattattttggttgttatgtaggatagaatatgaagggatgtaggatgatatgataggagattgttttttgtgtaaatttaaaaagattagaagattaaattttattgtggttaaaataatttataattatatttagtattaaaattgttaatggattttgtattattattaattgatgtgttttggtattgataagtaattgatttttgttttttatatttgttatatttaggatttatagaataaggtttgtagattttttttggaaaaatttatagaaattttatttttttttattatagttagttttattataagggtttttatagtgtaatatattttgtttagattaaatatagtagtagattttatagtaagtagtgtattatagtagtatatttggatttgtgtgagtattttgaattgtgtaaattttgttataataaaagaattttataaataaaagtataaataaaggtaattttttaagtttagttgttaagaattaattttttagatttttgatatatgttaatatttgattatagtggttttgtatggaaatgattgaaattatagtatgttgaaatttgtttagggttttttttttggtttttttggtggttaaaaatatataatatgaaatttatttttttaatattgtatttaagttgtttagttttgatgtagttttttttttttttttttttttttttttgagacggagttttgtttttgttgtttaggttggagtgtaatggcgcgattttggtttattgtaatttttgttttttggatttaagtgatttttttgttttagtttttcgagtagttggtattataggtttatgttattacgttcggttaatttttgtgtttttagtagagatagggttttattatattggttaggttggttttgaatttttgattttaggtgattcgtttattttagttttttaaagtgttgggtttataggcgtgagatattatgttcggtttttgatgtagtatttgatatatgtttttattatttttttatgaatttatagatttgtagtttatttaatcgtagtttataggtaattaaatttaaattataaaatgtagtgattgattaaatat

SEQ ID NO: 1505 - DNA, 6160 bp, Artificial Sequence
  chemically treated genomic DNA (Homo sapiens)
gaaatttaggtattttaagaaaaaaagaaaagttagaaatttaggagaatttttttttaataaatttatttttaaataatagttaaatgaagttttttaaatataaaggaaagaatagaagagaaatttgtggaatattaagaatgaagtaaaaataagagaaagggggaaagtgggtaaatataatatattttttttttttatttgagttttttttatatgttttaattagttattgttagtattgaagatggaagagagataggaaatgtggaaaaatgatatttttttttagagtttttaggaggaaatttagttttgatatatggatttaatttagtgaattttagtttagatttttgatttataaaattgaaaaataataaatttattttgatttaaaaattataaagggatgtaaggtttttatattttattaaaattggtaaaaagtgtatattattagattataagttatgtatatgtaaagtaaaatatagaagaattattaaaaatattgtttagagagatatatttaaaaattatacggattaattaaaatagaattataaaatatttttagtggttttataggagattaggaaaaagaaaataattaaaagtagtataaataaaaaataaaaaatatgatagttttaaaatattaaaaaatgtattaagtgttaatggttattgaaagtaaatttttgttattttagtttgtgatttacgtttttgtatagatatatattttaagttataaatatttgtataataattaattatatataaatttatttatatttttatgtaaatatttggaagaagtttgggtgagtttttttaatttttattgagttaaattaggtttagatgggtaaggtgtttattttgtgtgttttatgaagattaatagttttttaaagttatatattttttaatttttagataagtgaatatattaatttatatgataaagggaaattatatttgcgaattaattgatttgaatttagaaaggttattttggattatttaggtggatttaatgtaattataaggttattaattgtagaagagggaggtagaagagttagtgtaagggcgacgtgatgttatgtgatgggaggtttaagtggttattgttggtattgaagatggaagaaggttaaggaatgtggataaaaaatgggtgtttttttagagattttagaaagggatttagttttgataggtggatttaattgagtaagatttattatatatattatgtttttttagtttgttataattatttaattttttgtaatttagtgttagttttgttttaaaataagcgtttttttagaaagtggtggatagtagagtgatatttatggttaatgaataatttgttatattttttaaattgaaaataatatcgataatattcggttaaattggaattataaagagaagagaaaattaatttaatttttttttatttattatagtgattttagttatgtgatttaatttttttagatataattttttttttgtatttttagtagagatgggaaaaaattagttagttatggtggcgagggatttgtaattttagttatttgggaggttgaggtaggagaattgtttgaattcgggaggtggaagttgtagtgagttgagattatgttattgtattttaatttgggtgatagagtaagatattattttaaaaaaaaaaaaaagaaatatgttaaattaattgtgaaatatatatatttatggattattaatattaaatttaaaaatatagaagatatttttaatagttaattggttataatagtgttattaaattttttagataagttaaagtaagttgaagttttagagattattgtgtttatttgttaattgtattattagaatgtttagttggtgtaattaatagaataattttgttaatttataatattgttagattatagcgatttaatgaaatttattgatttttagagaagtttattttttttgttaatgtttattttttttggtaaattatttttagtgttttaggtaaattagagtatggtgaagtcgaagaagattttattttttgttttatttagagagttttttggtttttaaaaaagagtgaggtatgtgggtgtgaaagagttgaggtatgaaatttggattttattataagtgtagaagaaaaaataggagatttgaagtataaatgtgatataatttaatttttatttttaaatgattattttgattgttgtgagggaattgatatgggatgagttgggggaagaatattattaagattagttggaggttggtaaagttttttaggagagagtattatggttgaataattattttttagtaaagattaggtaagtggttatatttgggacgtattttgaaagtggaggtaattagatcggttaatgtataagtttttggagggagcgaggatttttgaattattaggtaaatatttgttagtgatcgagaaaatgttgggatgtgttatgagagatgaattttaaaattttatatgttgaagattggttttttagggttttagaatatgaatatttatagtagaaggtaagtgtggtgttgagggttgttatttatttttaggtatttaagtttttgtagtagttttgcgttttttttttatttatttttatttatagatagtgttttttttagtttttttattatttttgtttttgatgtgtttagtgagagtatagttgatatttatgtttttttgatatattagtttttcgttgattgttgatattggagtaggttagggagtaggtttgagttgagtgatttttaggaggattttttgttttttttttgtattttgttgttaaggagaaatttgttttgtattaggtttgtagtttttttagttttttatattattaggtaatatttgtttggtatttttttttgttttttttttttgatttttttttttgatatgatggttgatttgaagttatcgaggtaggattgtttatttttaggttttatgggaaatagtatttggtgaaattagagataataatttttataacgtattgggagttgttgggtttaagtaattattttgtgtttgagatataatttatacggtttagttagagttgatttattttttatagggttagagaagaattgttaattaagaatgtatttttttttgaaataggtttatatttattttagggaaaatattaatttgtttgggttttttataagaataatgtcgtttgtagtaaaatttaatttattaggaagtttttttgtattattatttgtaattttttagaagagttatattagatttttatatgtttagtataggatttatttatgtatatttgtttagggttttgtttttatgattttttgttatttggttttttagttatgtttttaattaagttatttttaaataaagattaattatgtataaaaagtgaaaaattatataagatttatttaaggtttgaaatggaaagtgtagttggtgattttgagtagtatattttatgaattgatgagtagggaatttttaggtattatagagtaattagtagttgaggagagagcgataaaattaggattttgatagggttttttggaaatttaatttttggagtaattagtagttgaggagagagttattaaattaggattttgatagggttttttggaaatttaattttttattgttaaattatatagataaaaatgaaagtaaaggtagtgaggagtattatatatttttatttagaaggataaataaaggatatttttgtagggagaaaaaaaaagatataggacgaaaagtaaatatggtaaggtagatttagaatataaaattttaataaataagtgcgagaaaaagaatgagaaagaatgagtattggaatattatagataaaaatttttggtgagaaagaatattttgatgaaataggtgatataattattgagtaaaagtagaagattaattaaggtaattgaggtttggataggtattataaattattttagatgaatgtataattgtggttatttaattattagtgatgataattataatatttattagaagaaataaagtagaggatgaattttatggaatattttggagaaagtggaggttttagttatatgatatcgtgtggtttatttagggaattatatatttagtttgtttaggtttagaaattttttggtggtttttgagtttagttttgttttaataaattttaaagatatttttaaaatataaatattttagtttgtttgtgttgtatagtattaaggtttgtttgagtgtagtgagatttatagaagtttggataatttttgtagtttgagtaggttgttagtattttttttttatatatgtgtgtttgggagtgtgttgtttttatatattttatagataagtaagattatttttgttatatgaaaaatttagttaaatgtgaaaatatttacgtatatatattatgagagatggaaagaggttattaaaatagttagagatattgattatttttattgttagttgtaggattagtgtttatttttcgatatatttatataaatttatatatatagaaatgaaaagtatagtgaaaagtagaatagtagtttttttaaatagattgaaaattaaaagatgtttaaagtttaattttgatattgtgtcgattgtttggatatagtttcgttaaaatatttgtttaagttatagttgtgttttttaggaattagatataaataatattttatttaattttttttgttgagttagagttttaaaagaaatgagggatatatttgatttgaagtaagtaaagtagaagttagtttttgaggcgaggaggtttatttggtagggagtttaaatgtattattgttttgtttgtttttataaagggagttgatacgttttttttagtataaagttgggagtgatattagagttttttgtaagatgtttttgattttgttgttagtggttttgttggtttttagtttagtttaggatttaaatgaaggtaagatgaattgggggaagatattgtgattttgattggggtttataggtaaatgttatagaggaggaaagtggagggaagagaggaggatgagaaaatagatgggattgtagagtttttatgttgaggattagaagatttattgtatttttattttttattaaggttttatagtttatttgttgtataaatagaatttaataaagaattcgtattaggggtgtgagagagtgagatttgtattatatagagatatgggattgttgtgaaggatgtggagaatgtaagatagatttagggaagtatagttgtgaagattttgtattgattttagtagatagggatgatggtggttttgttgtatagtggatgagtattaatgaaggagataaatatatgttagagttattgtcgaggtagagaattgggtaaatatttgtttttgtttatatagagttagagaataattagagtgaaatattgttatttttttgttttttgaatgtagtattttaatgtgttgggaatggtatgcgtaagattatatttaagtggttatgtttggtggtttttgttgagaaggtttgtaaatataaataatatatttatagatgaaagagggtagaagaatttttaaatatgttattgaaatatttagagtagtttaattaaataagcgttaagggtttataggtaaatgttatagaggaggaaagtggagggaagagaggaggatgagaaaatagatgggattgtagaatttttatgtcgaggattagaagatttattgtatttttattttttattaaggtttggggaattaaaagaggataaataggggtttttttatgttgagtttttggttgacgtttagtgtagtaataatattgtttttttttatatttttttttatttttagtagtattagagagtggttgatgagattataaaggggatgtatagggtgtgattagaggttttttattttcgtagaatattatgagttttgaatgatttaggaagtaattttttttattattttgtattttttttttaga

SEQ ID NO: 1506 - DNA, 6160 bp, Artificial Sequence
  chemically treated genomic DNA (Homo sapiens)
tttagaaaagaagtataggatgatgggaaaagttattttttgaattatttaaggtttatagtgttttacgaggataaaggatttttgattatattttgtgtattttttttgtgattttattagttattttttgatgttattggaagtggaagaagatgtaagggaaagtagtattgttattatattgagcgttaattaggaatttaatatagaagggtttttgtttgtttttttttgattttttaagttttgatgaggaatgaagatataataggttttttgattttcggtatgaaaattttgtagttttatttgtttttttattttttttttttttttttattttttttttttatagtatttgtttgtaaatttttagcgtttatttagttaaattgttttgagtattttaatgatatatttggggatttttttgtttttttttatttgtaaatatgttgtttatgtttgtaagtttttttaataggagttattagatatagttatttggatataattttacgtatgttatttttagtatattgaaatattatatttaggagatagaaaaatgataatgttttattttggttattttttaattttatgtagatagagataagtgtttatttaattttttgtttcggtagtagttttgatatgtgtttattttttttattaatgtttatttattgtatagtaaggttattattatttttgtttattgggattagtataggatttttatagttgtatttttttgaatttgttttgtattttttatattttttatagtagttttatgtttttatataatgtaaattttatttttttatatttttagtacgaattttttattggattttatttgtgtaataaataaattatgaggttttgatgaggaatggaggtataatagattttttgatttttagtatgagaattttgtagttttatttgtttttttattttttttttttttttttattttttttttttatagtatttgtttgtaaattttaattagagttataatatttttttttaatttattttatttttatttaaattttgagttgagttgaaggttagtagggttattgatagtagaattagaagtattttgtaggaggttttggtgttatttttaattttgtgttgggagaaacgtgttagttttttttataaagataagtaggataatggtgtatttgagttttttattaggtgggttttttcgttttagagattggtttttgttttgtttattttaggttaagtgtattttttattttttttgggattttagtttagtaggaagggttgggtaggatattgtttgtgtttaatttttaaaaggtataattatgatttggataaatgttttgacggaattgtgtttaagtagtcggtatagtgttaggattgaattttagatattttttggtttttaatttgtttggaaagattgttattttgttttttattgtgttttttatttttgtgtatgtgagtttgtgtgggtgtgtcggggggtggatattgattttatagttaatagtgaagatggttaatatttttgattgttttgatagtttttttttattttttatgatgtgtgtgcgtggatatttttatatttagttaaattttttatgtaatagagatggttttgtttatttgtgagatgtgtgaggatagtatatttttaggtatatatatatgagagaaaggtgttggtagtttgtttaggttataagaattgtttaaatttttgtgaattttattatatttaggtaagttttggtgttatataatataggtaagttaaaatatttgtattttaaaaatatttttagggtttattaaagtaaaattgaatttagaaattattaaggaatttttagatttgaataaattgaatatatggttttttaagtgagttatacgatgttatatagttaagatttttattttttttagaatattttatagaatttattttttattttattttttttaataaatattgtaattgttattattgataattaaatggttataattatatatttatttaagataatttgtaatatttgtttaagttttaattgttttgattggttttttgtttttatttagtaattatgttatttgttttattagagtgtttttttttattaaggatttttatttgtaatattttaatatttatttttttttattttttttttcgtatttatttgttgaaattttgtattttgagtttattttgttatgtttatttttcgttttatatttttttttttttttttataaaggtgttttttatttatttttttaagtaaaggtgtgtggtattttttattatttttatttttatttttgtttgtataatttgataataaaaaattaagtttttaaaaagttttgttagggttttggtttggtagttttttttttagttgttgattgttttaaaaattaagtttttaaaaagttttgttagagttttggttttgtcgttttttttttagttgttgattgttttgtgatatttagaaattttttgtttattaatttataaaatatattatttagaattattagttgtattttttattttagattttgagtaggttttgtgtaattttttattttttgtgtatggttagtttttatttgaggatagtttggttggaggtatggttgagaagttaggtgatagaaaattataaagataaggttttagataggtgtgtatgagtggattttgtgttgggtatatgagggtttggtatggtttttttgaaaagttgtagataataatataagaaggttttttagtagattagattttgttatagacgatattgtttttgtaagggatttaggtagattggtattttttttggaataaatatagatttattttaggggggaatgtatttttaattggtaatttttttttggttttgtgggaagtagattagttttagttgggtcgtatgagttgtattttaggtatagagtagttgtttgagtttagtagtttttaatgcgttatggagattattgtttttggttttattaggtattgttttttataggatttggagatgagtagttttgtttcggtgattttaggttaattattatgttaaaaaggaaggttagagaaaaggaataaagaggagtgttaggtagatattgtttgatgatgtgggggattgaggaagttgtaggtttggtgtaagataggtttttttttggtagtagagtataggaaaagaataggaaatttttttaaaggttatttagtttaggtttgttttttaatttgttttaatgttagtaattagcgagagattagtgtattaggaaagtataaatattagttatgtttttattagatatattaaaaatagaggtaatggaagagttgaaagggatattgtttgtgagtgaaggtgggtgaaagggagacgtaggattgttgtaggagtttgggtatttagaggtgggtggtagtttttagtattatatttgttttttattatagatgtttatattttgaggttttgaagggttagtttttaatatatgaaattttaggatttattttttataatatattttaatattttttcggttattgataggtgtttatttagtggtttaaaaattttcgttttttttaggaatttatgtattagtcgatttaattgtttttatttttaaaatacgttttaaatatgattatttgtttgatttttattagaaggtgattgtttagttatgatgtttttttttggaggattttattagtttttagttggttttggtaatgttttttttttagtttattttatattagtttttttataataattagagtgattatttaaaagtagaaattaggttatattatatttgtgttttaaattttttgtttttttttttgtatttgtgataagatttaaattttatgttttagtttttttatatttatatgttttatttttttttgaaaattaggaagttttttgaatggaatagaaagtagaatttttttcgattttattatgttttagtttgtttggaatattaaagatggtttgttaggaaagatgaatattgatagagggaataaatttttttgagagttagtgagttttattgggtcgttgtggtttggtagtgttatgaattggtagaattattttattaattgtattaattaagtattttgataatatagttagtaaataaatataatagtttttgagattttaatttgttttgatttgtttaaaaagtttggtgatattattatggttaattaattattaaaaatattttttatatttttaaatttgatgttagtggtttataaatatatatattttataattaatttagtatattttttttttttttttttgagatggtgttttgttttgttatttaggttggggtgtagtggtatgattttagtttattgtaatttttatttttcgggtttaagtaatttttttgttttagttttttaagtagttgggattataggtttttcgttattatgattgattaatttttttttatttttattaaaaatataaaaaaaaaattatatttaaagaaattaagttatatggttagggttattgtagtaaatgaggaaaaattaagttgatttttttttttttttgtaattttagtttaatcggatgttgtcgatgttgtttttaatttagaaaatatagtaaattgtttattagttatgagtattattttgttatttattattttttaagaaggcgtttattttagaataaggttaatattaaattataggaaattaagtaattgtggtaaattagagaagtatagtatgtataataggttttatttagttagatttatttgttaaggttgagtttttttttggagtttttagagaagtatttattttttgtttatattttttggtttttttttatttttaatgttagtaatagttatttgagttttttattatatagtattacgtcgtttttgtattgatttttttgttttttttttttgtagttaatgattttatggttatattgagtttatttagataatttaggataatttttttaaatttaggttaattgattcgtaaatgtaatttttttttgttatgtaagttaatatatttatttgtttgagaattaggaagtgtgtgattttgggagattgttaatttttatagaatatataggatggatattttatttatttagatttggtttggtttagtgagagttggagagatttatttaggttttttttagatatttgtatgagaatatgaatgagtttatgtataattagttgttatataaatatttgtgatttaaagtatatatttatgtaaaagcgtaaattataaattgagatggtaaaaatttatttttaataattattgatatttaatgtattttttgatattttagagttgttatattttttgttttttatttatattatttttgattgtttttttttttttgattttttatggggttattgaaagtgttttataattttattttagttgattcgtataatttttgagtgtatttttttgaatagtgtttttagtgatttttttatgttttattttatatgtatatagtttataatttagtggtgtatattttttattagttttagtgaagtatggaaattttatatttttttataatttttaggttaaaatgaatttattattttttagttttgtaggttagaaatttgaattgaggtttattgagttaaatttatgtgttaaggttgagtttttttttagaggttttagagaagaatgttatttttttatattttttgttttttttttatttttaatgttagtaatggttggttaaaatatatgaagaaaatttaagtgaaaaaggaagatatattgtgtttgtttatttttttttttttttttatttttattttatttttgatgttttataaattttttttttatttttttttttatgtttagagaattttatttggttattatttaaagataggtttgttggaaagaaatttttttaggtttttagttttttttttttttttagaatgtttggatttt

SEQ ID NO: 1507 - DNA, 8964 bp, Artificial Sequence
  chemically treated genomic DNA (Homo sapiens)
agagtcgaatgcgtgattttattgtttagataaggggtttatggggggatttagtttttgttttgttcggaatagtttggttagttagtttttttgtgtatagattgttgttataaagtatgagattattatgtgttatataatagattattaggatggttgaatagtagaaaagaattttattggtaatattagtttgtatatcgggaagagatagtttttggcgtgtatggaaggtgttttttttttaaagagggaaagtgtaggttggttttatgttttttaggttttatattatataatagagttagatatatttagaaagttttggggaaaaatttatatatatttatgaggggagttaagtgtaggtgttaggggtaaatatatgtttaatatatattttatgtttattttggggtatagttgtagtattaaaattagattttaaatttggttttttatattaaaaggtaaatgataggatataatgatatttagtgtgtagtatttgtaagttgttgaaattggtttggggtttgtatttgtttatcgggaaagaatgtttggaagtttggttttttgtttaattagagttgtaggggtttgggttgtaaattagagttaggaagagttttaaatttcgtttgattatttttgttattagggagattaataagggtgtggttttttttgtagttgtaggaatttaggaggttgtgatgttagttaagttttgaattttcgatttttgggtaatttttgtttttttaattttagaatttattttagttgatgaaggggtaattgttttggttttttagattatacgtgaatggagagtgaagatgagatcgattgaaatttagagtgtatagaggatagattatatagtttagttttgaggtaggttattttagtatatatttttgtttatagaaatttttatttttggttaaatatttagggaaatttttttttttttattatttgtttcgaatattaaaaggtaatttatgaaaattttttatgttaattttttttttgtgtatttattatatatttttttggtttttaatatagatggatagatacgtatatttttatatttatatatatatatatataaatatatatatatatatttatatatatataggtgtgtatatttgttaaatgtggtaatttatatatttagtagtattgtatgaaagtgtatgatttattttgtttttattaatattaagtaatagtattttaaaaatatttgataattgtatgggtaaaaatatattattgtttttattatatattttttttttttttttttttttttttttaagatagagttttgttttgttgtttaggttggagtgtaatgatatgattttggttttttgtaatttttgtagggagtaaagcgatttttttgttttagtttttagagtcgttgggattataggtgttttttattatgtttggttaattgttgtatttttgtagagagggggttttattatgttggttaggatggtttggaatttttgattttaagtgattttttcgttttggttttttaaagtgttgggattataggcgtgagttattatgtttagattattttattatatattttaaatattataattttttttatagtttaaattaggatttaaaatgttaatttttttttaaataaaatgtattattaatttttaatgttattttatttttagttgtgtttgtttaattgtaaatgtttaaaagagtttaaatattatagaattaaagttattttaattttttaaaagatttgattatttttttttagtaatttgattattttaagattttaatttaatatgtagtttttttatatatattttttttattttatttttataatttttgtatttataatatatgttttaaaatattaattgtatatatttttttttttttggtttttgaattattatatagtaaaattgatttttggtttggtgtagttttgtgaatttaagtttagatttttgtgattattagaataattaagtcggagaatagttttgtttttttttaaaatttgtttatgttgtttttttttgttgtaatttttggtaattattgatgtttttttttatatagttttgtttttttaggaatggtatatgtaattatatagtattttattttgtatgttttaaattgtttatttggttaaatatttttttataattagttggaattatgatttttgtattttgtatagtttgtgtttttgtaatttatttttttgggttataaatagtgttttttttataaatttgtatatttatattatgtaagaatggcgtttatttatttttgttatattaattatagttatttttttgggtaggtttttattgttaagtttggttattttttttaaatgtataagattttattaataggaataatatttgataaataatattgtaatattttggtgatttagtttgatgtagtatttttaaatttgggaaaggttgtaaaaaaaaaaaaaaaaaaaaaaaaaaaaaaaaaagatgttattttaaagatgtatttttttttggtatgtagaagttggaaatagattaaatatgtagttatagattttagtaacgtagatcgtagagttattgttaataggatgttatgtaagaatgataaggaagtttgagaaaatgttagagaaatttgaaaaaaattttatagtaaaatgttaatttaaaaagttaaatataattttatatttataggatgattatagtatgtaagaaaaaaaaaaatataaaatttgttaatttaaaaagattagggaaaatagattagaatagtaattgattttttttattggtggaaatttggagagattttttattaattttgtgtgttttttttattttttattatgattatttaaaaagtgttttgaattatatagagaaaagtattttgtgtagttcgggtgtaaaacgttgttatttgtttgaaaaatttatatttgagtttgcggttttattgaatgatgtgtgaagattattatataaatatttattttgttttttagatgttaggtgtatgttaggttatgtttgatatatatttttaaaggtttgtgagtagatttttatagaatagtgtaagtgaatttggtgaaacggtcgtttaatttgtattgtttattaagtaagaaattattgtttaggaagatttttagggggatagagggttttgttttaatttttttttttgttgtaatggaagttttggttattttggaggtttttattttttttttttggggtagtattttttagacgtttgttgggttattgttgtttgattagaaatttattttgggaatagtagggtgatattagaaaaggttagggtgttttaattttggttttgtgagttagtgatttttttagatttaaatagaattaaggaaatttttagaaagttttaatagggtaaaaattttcgtaattgaagatgatttttagtgattttttttgatttgtggagaaatgaagttttgtttaaaagatttaattggtttaggaaagaagggatttttaaagaaattttttttagagaatttatagttgttagtttcgtttttgtttgggaattttaaatttatagggtaaagggcgttttttaaagataaatttgtaagttatttatttgttaatttagtaacgtgatagatacggaatttagtaaattatgatgtttatttaattattttttttagataaaatttttaaattttgtaggaaattaggattttattaatatttgtgaaattaatgttcgttaaaagtttttaatttgttttttttgtggagttaaagaatattggtatttagtatattggagattttttttgttttagttagatgaggtattataggtttaagatttttaggtatgttattgattttttttttaggtttttattattttaaatagttttttttttttatataaaggtagaaaagataattaatgttttgttttttatttttggtttatttatgaaagtttagaaaaaattataagtataaattattaaaaagagagacggagtaaggaagtaatttttttgttgaatattagatgatagttttagattaatgggatttcggaaaagtaggtaaaaaagaagaggtatttagtttatataagtggttagaatatttaataatggaataatagatgaagaattagattagatttttggatttgtagttaatattttgataattattatttaaattttttggaaagtataattattgatttttgggtttttatgaagtattttgtttatttttatatgagaaagttttattttatagtagttaattagtttggagttttttacgtggtttgtgatgtttaaaggtttagagtgtgtgtgtgtgtaattgtgaagaaagtagatttttttgaaaatgtttagagtaaataaggattagttgtcgaatgttttgggttaattttattatatatataaatagattatgtaagaattttgcggtgttatatttaattagtgtgattaaaatagattcgttttatataaatttattttttgattattgtgtgttgttttttgggtatttatttgaataatagaagatataaaatattggaaaatttttgttttattttttaattattgggtttaattttattaggttgaatggaattaatttttgagttattttttaaaagtaaggttgagtgtagatttttagaaagtttttttttttagtaagttagtgtgtggttttgggtgagtttagtagtgttttttgtagaaggggaagtgaaaatatttgtttatatggatagtggatttatgtgaggttttggttgtttatgataaagtattggttaagtagatatggggtattaaaaataatattttttatagtttttaaatagcgtttgttttttgtttttttttagggcgtaattatgtcgttattttttcggattggtttgtttaattttgattgcgggttttgttagttttgttagggcgaggttgttaatttttattgtgttgtgttcgttaaagagtatgtcgaattaggtaagtttgaggggatttttaaagcgggggaggaggaggagaattttgttatgaattgtgtatgaagtaaggttttttaggatatttgatattatttggtggaattaaattttgttatttaggacgttgatgtttagtaaagttaaggatttttttatggatatatatttcgtgatggattttaaattaggattcgatggtttatcggtgttttattgtattgtattattttttttatatatataaagggaaagagaaagttgggttgaggaaattatataaggagttaatgggaaggaattttaatgagttgaagtagaatatagttttatgtggttaagtttggttattttaaataagtttaggtagattaagattgtataattttttaattaattttaaagattgtttattgttgttttggcgaatttttagtggatattataaagtatttataattagttattagaatttaaattttagaaaacgtatttttgtatttattaaggttttggttgaatgaaagaatagtgatgttttattaagtttaaatataggtagtttaaggtgagggggaaagtgggatagttatttaacgttttgtttgtgggtttagaatgttttattttaatagttttatgtgtagggaatgtttttgtggttacgtcggtcggtttttattttttaagatttttatttttgtattggaagtttgttacggatttttaaaggaaaagtaggagggagtttagattttataatttttttgattgtatatttttttttgtttttttacgtgtattttgattttagtagatattttgtagggaatgataatgatgatggatgtaggtttgtagtaattatggaagttattatagtttatttatataaaagtgtttacggagagattattgtaagagtgttgggattagagtatagagggaaaaaaagttaaataagtaagttgaaggaatttaggaagattgttttttttttagagtatttatttttgtagaagaaagtggtaataaataaaaatataaatagtaggtaatgaaggaataaaaagtagtgtaaagaagagagggattgggggtagggatgtgtgttattttatatagggttgttttgtaaaggtttgtgagcgagggatatttgtagatataagaagaaattgatttagattttgagaattttttgttagatgtttagagtttagattttggggtttttaaatttattattttgtattttttattaaaagtttttttgttttatagttgattttgtttttttagttattttgaatatattaaagttagagagattgtttgaattattttgattttttttttgtttagagtttttttttgtttagttaaaagtgtgaatgttatttgtttttaatttaaaattttttagatgttatagatatttttgaagtgtaaaacgtttgagttttttaaagtcgtttttgatttaatgggttttttggatttagttttttttattattttaggtttttttgatatttgttttttgagggtttttttttttttttttttttgtatttggttttgtttttgaatttggtttaatgagttatgtggatcgagagtttttgttagaaaagaaggaaattggtttttttaaatattagtttgtggagttggagggagtttagagatttttgtttttgattttattttgggtttgttttgaaaagaaattattttgaatattattatttaatatttatttttataggatttaaatatattttagtttttggggtgtaaggttgtattttttataatgagttaatagaataaggataaataggttacggggttgcggggttgtgagtcgttaaaacggtaatattttatatagatagggttttttgtttaggtgattataaacgtggcgaatgaaaatgtaaaaagtgttttgttttggggatttttgtttttttttagggtatttttggtttttttttttaggtatagagaatggttattattaaaaggaagtatcggaaagggaagttttaggtttgtggaagtaaaatgttatcgtgattattaatattgtcgttggtttttaaaaagtttaatttttagtttaattttttttttattaatttataaaaaatgttttttttttattttacgtttagtagttttatggtttatgttttttttagttaagtttatttaatatttgagttttaagtttatttaattttttgtatattttcgaaataaatattaatttaataaatgttaaatgtttgttttgtttagttttgtgtgttggatagaaggggttttcgaaagttagaagggttttattttttggttttaagtagatttttttttttttgtttaatcgatatttttgaattgttaaatttgttatttaatgtgtttatgttataagaaataaatatttaaatgtaggtttttgtttttgaaatgattaaagaataaatattagagaaaatttaatgtgcgtgaaagataagaaaaaattttttaattagtaaattttttgttaattatagagcggttttagggaggttttttttagattgatttttttgtttatagatttgttattatttttagggtttttgtttatttgtttttatttatttgtaggttggtagtcggttttagttttgttggttttatgggtaaagattagtattatttttttgatttgtttattagtttttgttgagggtgtatggtatatgtaaaatgtatttttatttaagaattagagaaggaaataatggtttattatgttttaaagattattgttttttattgtatttatgttaaatggaaaaaaatgtaaatattttttaaaggagtatttattatgcgttgaaattacgttattatgttttttagatgaatatatagtagttttgtattgattatgtttaagttggggttagtgaggttaattagttataggattaatattatagattaataaaggagaattttaaaggtataaaagattttttaaaaagtttgttgtttaggtgtttaaatttagagtgaagtaattaattgttgaataggaaaataatattttgaaattaatttaatagttttatagatagttgtttttggttgattatagaaatggatttttttgattttaaagtttggaatttatatttgttttatttgagttttttttttaagaaaggatttttatattttttaaaaaaaatattaaagaattgaaatttattagattatggtatttagagattgaagcgttaggtttttggtttattatgattgtttatttattttttttaagtttttgtttttttatataaagttatattttttttttgttatataaatttttagttttagttggttatggagatggattttagattgagtttttattttttcggttgtagtatttaattaaagtttttttttttggtaattttcgttattttagttattggttttttgtgcggtgagtagtagaatttagaatgtttggtgttttggtaataatttttagtttaaggtattagtagattgttgtttgaattattaacgttggatttataaggtttaatgtattattttgtatttggattcggggattgttttattttgttttatattgtttttgattgtttatgtgttatttttgtttttttaatagaattttatattttagagaatagagggagtaggtgttattgttgagttgaattgaattattttttaggtttggttgaaggaataatgagattttacgtttttgtttttaga

SEQ ID NO: 1508 - DNA, 8964 bp, Artificial Sequence
  chemically treated genomic DNA (Homo sapiens)
tttaggaatagaaacgtaaggttttattatttttttagttaggtttggaaaataatttagtttaatttaatagtagtatttgttttttttgttttttgggatatagaattttgttgggaagataaaagtagtatataaataattagagataatatgggatagaatgagatagttttcgggtttagatgtaaggtgatgtattgaattttataagtttagcgttgataatttagataataatttgttaatgttttggattggaaattgttattaaaatattaggtattttaagttttgttgtttatcgtatagaaagttaatgattgagatgacgagaattgttaaggaagaaggttttagttgggtgttgtagtcgaggagatgagagtttagtttgaagtttatttttatgattaattaaaattagggatttatatagtagggaagaaatgtaattttgtatgagaaaataggaatttgggaggggtaagtaagtaattatgatgaattaggggtttggcgttttagtttttggatgttatgatttggtgagttttagttttttaatattttttttgagaggtgtggggatttttttttgaggaagaaatttagataaaataaatgtaaattttaagttttaagattagaagggtttatttttataattagttaaaaataattgtttatgggattattgggttggttttaaaatgttatttttttatttaatagttagttgttttattttgggtttaaatatttgagtaataaattttttaaaaaattttttatgtttttgagatttttttttattaatttgtagtgttgattttatgattgattaattttattggttttagtttaaatatagttaatataaaattattgtgtgtttatttgaaagatatagtggcgtaattttagcgtataatgaatgtttttttaagaaatatttatatttttttttatttgatataaatatagtaagagataatgatttttaaaatataatgagttattatttttttttttaatttttgggtgaagatatattttatatgtattatgtatttttagtaaaagttgatgagtaagttagagaggtggtgttgatttttatttatggagttagtaaggttgaagtcgattgttagtttgtaagtgagtaaaggtaggtaggtaggagttttggaaatagtaataaatttgtagataggaaggttagtttaggggaaatttttttaaagtcgttttgtgattggtaaagagtttattaattaagaagtttttttttgttttttacgtatattggattttttttggtatttattttttaattattttagaagtagaaatttgtatttgagtgtttgttttttgtgatataagtatattaagtggtagatttagtaatttagagatgtcgattaagtaaaaggggaaaaatttgtttaaagttaggaaataaagtttttttaattttcgagggttttttttgtttaatatataaagttaaatagagtagatatttagtatttgttaaattaatatttatttcgggggtatataaggagttgaataagtttgaaatttaaatgttagataaatttggttaggaaagatataaattatgagattattaaacgtggaatagaaaggggatattttttgtgggttggtaaaaaaaaaattggattggagattgggttttttagaaattaacggtaatattaatgattacggtaatattttatttttatagatttgaagttttttttttcgatatttttttttgatggtaattattttttgtgtttggagaaaagggttaaaaatattttgagaaggggtaaaagtttttaaagtaaggtattttttatatttttattcgttacgtttgtaattatttaaatagagggttttatttatgtagagtgttatcgttttaacgatttataatttcgtagtttcgtagtttgtttgtttttgttttgttggtttattgtggaaaatgtagttttatattttaagaattgaaatgtgtttaaattttgtagaagtaaatattgaatgataatatttagagtgatttttttttagaataagtttaaaataaaattaaaagtaaaaatttttaaattttttttaattttataggttaatatttaggaaaattagttttttttttttttgataaggattttcgatttatatggtttattagattaagtttaaaggtaaggttaaatgtaaaaaaaaaaaaaaaaaaaagtttttaggaagtaaatgttagggagatttgagatggtaaagagaattggatttaggagatttattaagttaaaggcggttttgaaaaatttagacgttttatattttaaagatgtttgtgatatttgaaaggttttaggttgggagtaagtggtatttatatttttaattaaataggagagaattttgggtagaaaggaaattaagatgatttagatagtttttttggttttgatgtgtttagagtggttggaaggataaagttagttgtgaagtaaaaaggtttttggtgggggatgtaaaatagtaggtttgggaattttagaatttgaattttgagtatttggtaggaggtttttaaagtttgagttagtttttttttgtatttgtaaatgtttttcgtttataggtttttgtaggataattttatataaaataatatatatttttgtttttagttttttttttttttatattgttttttgtttttttattatttgttgtttgtatttttgtttattgttatttttttttgtaagaatagatgttttaaagggaaggtagtttttttgagtttttttagtttatttgtttgattttttttttttttatgttttggttttagtatttttgtagtggttttttcgtaaatatttttgtgtaagtgaattgtgatggtttttatagttattgtaagtttgtatttattattattattattttttataaagtgtttgttaaaattaaaatgtacgtagggaaataagaaaaggtgtgtagttaggagagttgtgggatttaaatttttttttattttttttttggaaattcgtggtaaatttttaatgtagaggtgaagattttggagagtggaagtcggtcgacgtgattatagagatattttttatatataagattgttggaatggaatattttgaatttataaataggacgttgggtggttgttttatttttttttttattttgagttgtttgtatttgaatttgatgaaatattattatttttttatttagttaagattttagtgagtgtaaaagtacgttttttgaaatttggattttaatggttaattatagatgttttgtaatatttattgaagattcgttaaagtagtagtaagtagtttttagagttggttggaagattatgtagttttaatttatttagatttatttaaagtaattaggtttaattatatagggttatgttttattttagtttattagagtttttttttattaattttttatgtaatttttttaatttagttttttttttttttttgtatatgtgggaaaaatgatatagtgtaatagagtatcggtgggttatcgggttttggtttagagtttattacgaaatgtgtgtttatgaggaagtttttggttttgttgggtattagcgttttaaatggtaggatttggttttattagatgatgttaaatgttttggaagattttgttttatatatagtttatagtaggatttttttttttttttttcgttttgaaaatttttttaagtttatttgattcgatatattttttgacgagtatagtatagtaagggttaatagtttcgttttgataagattggtaggattcgtagttaaagttggataagttaattcgaagaaatggcgatatggttgcgttttggaaaaagataaaagataaacgttgtttgggggttataaaagatattatttttggtgttttatgtttatttaattagtgttttattatggatagttagaattttatataggtttattatttatgtgaataaatgtttttatttttttttttgtagaggatattgttggatttatttaaaattatatattgatttgttgaggggagaggttttttggaagtttgtatttaattttgtttttgagaagtaatttaagagttagttttatttaatttaatggagttaggtttaatggttggagagtgaggtaaaagttttttaatattttatgttttttgttatttaagtaggtgtttaggaaatagtatatagtaattagaaaatgagtttatatagagcgagtttattttagttatattagttaaatatgatatcgtaaaatttttatatggtttatttatgtgtgtaatgggattggtttaaggtattcggtagttgatttttatttattttggatatttttaaaaaggtttgttttttttatagttatatatatatatattttaagtttttgaatattataaattacgtagaaaattttaaattaattgattattataaaatagggtttttttatataaggatgaataaaatattttataaaagtttaaaaattagtaattatgttttttaagaggtttagatgatagttattaaagtgttagttataaatttaggaatttagtttaattttttatttattgttttattattgagtgttttggttatttatgtgaattagatatttttttttttttatttattttttcgaggttttattaatttgaaattattatttgatatttagtaaaaaagttatttttttgtttcgtttttttttttgatgatttatatttataattttttttaagtttttataagtaagttaaagataagaaataaagtattgattgttttttttgtttttgtataaagaaagaaaattatttgaaataataaagatttggaaggagaattagtaatatatttggagattttgggtttgtaatattttatttagttaagataaaagggatttttagtatgttaaatattagtgttttttgattttataagagagataaattaggagtttttgacgggtattaattttatagatattaatgaagttttaattttttgtagagtttggaagttttatttaaaggagatggttgggtaaatattatgatttgttgggtttcgtatttgttacgttgttgaattagtaggtagatgatttataaatttgtttttaggaggcgttttttgttttgtgagtttagaatttttaggtaggagcggggttaatagttgtgagttttttggagagagtttttttgagaatttttttttttttgggttaattgggttttttagataaaattttatttttttataaattaggaaaaattattaagaattatttttagttacgggagtttttgttttgttgggattttttgaagatttttttaattttgtttgagtttagagggattattaatttataaagttagagttaaagtattttgattttttttggtgttattttgttatttttagggtgggtttttaattaggtaatagtagtttagtaggcgtttgggaaatgttgttttaggaagagaagatggaaatttttagggtgattagggtttttattatagtaaggaagagagttggggtaaaattttttgtttttttgaaggtttttttagataatgattttttatttaataagtaatgtagattaaacggtcgttttattagatttatttgtattattttgtaaaggtttgtttatagatttttagaaatgtatgttagatatgatttgatatatatttgatatttagaagatagaataggtatttgtgtggtaatttttatatattatttaatagaatcgtaagtttaggtgtgagttttttaggtagatggtagcgttttatattcgaattatatagagtgtttttttttgtgtagtttagagtattttttaggtgattatgatgaaaaataaagaagatatataaagttagtaaaaagtttttttagatttttattaataaaagaaattagttattattttgatttattttttttagtttttttaaattagtaagttttgtgttttttttttttttatatgttatgattattttgtgggtatggaattatatttggttttttaagttaatattttattataaaattttttttaagtttttttgatatttttttaggtttttttgttatttttgtatgatattttattgatagtagttttacgatttgcgttattaaagtttgtagttatatatttagtttgtttttaatttttatatgttagaaaaaaatgtatttttaagatagtattttttttttttttttttttttttttttttttttttataattttttttagatttagggatattgtattagattggattattagagtattataatattatttattaagtgttatttttattggtaaggttttatatatttaaagaaaataattaaatttaatagtaaagatttatttagggaaatagttatggttagtgtaatagaagtaagtaaacgttatttttatataatatgggtatataaatttgtaagaaaggtattgtttatgatttaagaaaataaattgtaaaggtataagttatataggatataaaaattatagttttaattaattgtggaaaaatgtttagttaggtgagtaatttaagatatgtagaataagatattatgtaattgtatgtattatttttgaaaagataaaattatatgaagaaaaatattagtggttgttaggagttgtagtagggaggagtagtatgagtaaattttggggaaagatagaattgtttttcggtttgattgttttagtggttatagaagtttagatttaaatttatagaattatattaagttaaaagttaattttattgtatgataatttaaaaattaaaagaaaagaaatatatgtaattggtattttaaggtatgtgttataaatatagagattatagaggtaaagtaaaaagaatatatatgaaaaagttgtatattaaattaaaattttaaagtaattaaattattaaagggaaatgattagattttttaaaaaattaaaatagttttggttttgtggtatttaagtttttttgaatatttgtagttaggtaaatatagttgagaataaaataatattagaaattaataatgtattttatttgaggaaaaattaatattttaagttttaatttaagttgtaaaaagaattataatatttaaaatatataataaaatagtttgggtatggtggtttacgtttgtaattttagtattttgggaagttaaggcgaggagattatttgaggttaggagttttagattattttggttaatatggtgaaattttttttttataaaaatatagtaattagttaggtatggtggggggtatttgtaattttagcgattttggaggttgaggtaggggaatcgttttgttttttgtagaggttgtagagagttaagattatgttattgtattttagtttaggtaatagagtaagattttgttttaaaaaaagaaaagaaaagaaaagaaaaatatataataaaaataataatatgtttttgtttatgtaattattaaatatttttgaaatgttattatttaatgttggtaaggataaaatgaattatatatttttatataatgttgttgggtatgtaaattattatatttaatagatatatatatttgtgtatatgtaagtatatatgtgtgtgtttatgtatgtatatgtgtggatgtaaaaatatgcgtatttatttatttatattaagagttaagaagatgtgtaatgaatatataagaaagaaattaatataaaagatttttatgggttgttttttggtgttcggagtagatagtagggggaaggggatttttttgggtgtttaattagaaatgagagtttttgtagataaaaatatgtgttggaatagtttgttttaggattaagttgtgtgatttgttttttgtgtattttaaattttagtcggttttatttttattttttatttacgtgtgatttgagagattaagatagttgtttttttattagttaagatggattttaaggttaaagaaataaaagttatttaggggtcgaggatttagggtttggttggtattataattttttaaatttttatagttataggaaaagttatatttttgttagtttttttaataataagaataattaggcgaagtttgagattttttttaattttgatttataatttagatttttgtaattttgattggatagggaattaggtttttaggtattttttttcgataagtaaatgtagattttaagttagttttagtagtttataggtgttgtatattaaatgttattgtgttttattatttgttttttgatgtaaagagttaaatttaggatttaattttaatgttataattgtgttttaaagtgaatatgggatgtatgttggatatatgtttatttttggtatttgtatttaattttttttataaatatgtatagatttttttttaaagttttttgaatatatttgattttattgtgtaatatggaatttgggaggtataaaattagtttgtattttttttttttgaagagagagtattttttatatacgttaaagattgttttttttcggtgtgtaaattgatattgttaataaagtttttttttattgtttagttattttggtggtttattgtgtaatatatggtagttttatattttatgataataatttatgtataagaagattgattggttaggttgtttcgaataaggtaggggttaggtttttttatagattttttgtttgagtaataaagttacgtattcgatttt

SEQ ID NO: 1509 - DNA, 7695 bp, Artificial Sequence
  chemically treated genomic DNA (Homo sapiens)
ttttttgttttagtttttcgagagtagtcgggattataggcgtgtgttattatgttttggtaatttttttatttttagtaaaggagttttgttatgttggttaggttggttttaaatttttgattttaggtgattcgtttgtttcggttttttgaagtgttgggattataggcgtgagttattgtgttcggttaatagttatattttttatattagaaattttaattaaatttaaaaagtatagggggtttataagtatataggataattgaatttatattattgttaatttataattcgttattttgattattatcgttaattattttttttataattttttaatgaaaataaggttatttttatgtaaggtatttttttttaataaaagtaattttatgaaaaatatattattttttggatttaggttttttatatttttagtttttaatgcgttgaatggttttatttgaatttgatgttttaagattgagttagggtaacggttaaagaagattttattgatagttatgttaaaagttggaataattttttgtaaaaataaatatgaagatgtatttgtatttatattttagtgttaaatataataaaggtatgttagattagtaaagtataaaaagataatatgttatgtttttaaagtattattttatagaattatgtacgtgttgtttttaaatttaggtatgttgaattatttatttttgtatatttttaattgggttaaattttataatttatacgaaagtgtttttttgatgtatattggtatattttttgttttttattagaagggaaaaagattttgattttatattttattttttttttataatgaagtgatattaaagtaagttttttatttatttatttttaatttttgaggtagagttttatttttgttgtttaggttggagtgtaatagtatgattttggtttattgtaatttttgtttttgggatttaagtaatttttttgttttagtttttcgagtagttgggattataggtatttgttattacgtttgattaattttgtatttttaatagagacggggtttttttacgttggttaggttggttttgaatttttaattttaggtgatttgtttgtttcggttttttaaagtgttgggattataggtatgagttatcgtgtttggcgatattaaagtaagttaaattatatttatttaaattttttaatatatggtttttattttatagatgaggaaatagtttttggttggttaaggaatttgattaaggttatgtagttagtaattagtaaaattaagatttaaaaattaagtttgtttgtttttaaagattatatttagagttaatagagttgatattttattaatagaaattgatttgaggtttagaagtaaaagtttatagtataatatatttttttaaagtagtaggaagtatgtaatttatttaaagtatttttatttaagataatttattttatgaaatttaagaagttattagttttaagatttattatttttttatatgaaaaatattgttaagtaaattataatttgttattgatagtaatataagttttatttttaggaatattaaaatgtgaaaaaaaaatgtttattttaaaggagatgatatatagtttttttttgtttgtttgagatggaattttattgttgtttaggttggagagtagtggtgttatttcggtttattgtatttttgttttcggggtttaagtgattttatcgttttagattttcgagtagttgggattataggtatgtattattatgtttggttaatttttgtattttttagtatagatggggttttattttgttgtttaggttggttttaaattttcgattttaagtgatttatttgtttcggcgttttaaagtgttgggattataggtgtgagttattatatcgggttaaaggagatgatatttagttttttaaagtgtttgcgtatattatttttattattgaagaatttttgttatttggaaatattttttttagattgttattaaaatttattaaggttaaagttaaatttttatttgtgggtaagagatgagttgtttgtataaatttttgttaaatgatttgatgtgtttatagtttatatttaaaaatggtttattaataatattaatttagaaaataaaaatgaataagttatattttgttaatttaattattttaaaatacgtaatttgaatttaaagagtatttgattatttttttaagtcgttgtatgtatagaggtttagtaatatttatgttaatattttttttttttttagttagagggttaataaaacgttgaagaaatttttttaagtggagagaaaattgtattaggtatatagtatttgggaataggtaattattaaaaatatataaagttatgagtatgttattattaggagatagaaataaataatattttttttttttttttttttttaaaatttaatttggagatggagttttattatattggttaggttgttattaaatttttggttttaagtgatttttttattttggttttttaaagtattgggattataggtgtgagttattataggtggtttttttagttattatggttatttagatatagattataaatacggttttttaatatttttagagtttaaagtaagaattttaatatatgtagtttatttgaaagttttttttgtatgttgttatatttatatttgttttttagattataagtttttggtttagagattgtttatttgttattatattttttgttgttgtttatatagaaaaatatgatagaattatgaaaatagagttatttatatgatattcgttataagatggttttaggagattgtatatttatttcgttagattgtagatttatttgtaggtttttttgtgtagagtttaggttaggtttttgttttataggtgtgtttttaatattattttttggggttttttttattcgagagttgggagtgtcgtatgttagtggtgaattaatattaaagttaagagggatagttataaaaataaaattaggaaattttggtggtatattaaatttgaaattatagtatgttgtttgttgatttatattatttaatcgtaatagtaaattgaatatttattgtaatttgcggtggttgagattttgagtatttttaaatgttttattaaaaaaaagtattagagaagttgttttttttgtttattaagttttaaaattattattttttgtatttcgtttagtttttttggttaagaatatgtttagttacgtgtagaggggatgttttaggcgttatgttaattgttataaagttagtaaatttgagtagataaagtattagttgtgtattaagtatagtaaaattaagatttttagatacgtatttgaagaatgtatttggggagggttggaaaatagtacgttttgcgtagtagggttttgtaggtttattttaggcgaggttggtatcggttgtaattttttcgtggaggtggaattttcgtttttacgtttttgagagggagatgatttggtatttttatttcgagtttgtgttatataaaatagaaaagatagttattaatttttagggtcggtttttttggatttgttttttttttggggtattatgatttattattgaattaaattaaatagaggtaaatggtaatcgaattaagtagtatttaggttatagtttgttgtgggtgtttgtgcgtattaagcggtagcgtttagttcgaggttgagcgttcgggtttcgcgtatttatttagcgttgttagttgcggcgagagggtagacggggcggcgtcgggggttgtagtgggttcggttcgggggatttacgcgtttgggcgggggtggtttttttacgtcggttgtcgcggcggttcggggtcgacgtcggggacgatatagtgttcggagtatttgcgcgataaggataagttcgggtcgggttcgtttttcggtttttttgttttgtttcgtagcgcggacgttttcgtcggtttcgcgttacgtttttttcgtcggcgcgcggttatcgtggaaaggcggtcgtttgtcgacgacgttcgcggatttcgagtttatttggcgagtagcgtttttaaatcgcgagatttagagttttcgtcggcggtaaggtcgttttcgtttttggcggggttttattaattatagcggcgttcgtacgtggtttcgttttcgggaggcgttattgcgtatcggtagggggggatagtgtcgttttttttagcgttcgtgcgtaaattagaagtaggtttcgttcggttttttttggtttagatggtttgattttttgcgcggtagcgttttcgcgggaaaattgggttttatagtattagttttcggggtgtgtttttttagcgttggttagggagcgtgtgtttttttattttttaggcgtttttggttaataaggatattatagatgtattttttatttaaagattttttttattaaaaaaaattaaggacgggaggtggtggggatggttttattatgttgtttagattggtttcgaatttttgcgattttttcgttttagttttttaaagtgttgggattgtaggcgggtattatcgttttcgatcgcgtttgtcgttttttatcgaggaataaatttggaatttttgatttaggtttttcgtttgttttatttgtttttggtatttatttagttaagtttaatattaagtagttatttaaattattttcgtaggttagacgtttttttttaggtttttatgttgattcgggttaaagaggcgcgtttattggttaggttttttcgtaggggttttcgggaaagtttttgtcgtcgcgtttcgtagtttcgttttcgcgcgtaggggtattttcgggttcgggtcgagcgggcgtacgcgcgggagcgggattcggcggtatggcgggtttcggagtcggtgtgcgttgttttttgttgcggttgtaggagattttgttcgttgcggatcgttgcggtgttgttttggtcggttattaattgattcgcggtttggggtaggaatgcgttttgagtagtagtttcgcggtgttgggtgggtatcggttcgagttgggtcgcgggtgggttttggtttttcgagtcgttttggagtcgggtagttcggcgtttttttgtgtttagatgacggtattttgaagtatagtaattagatttttgggggaatttttgtgtatgtgtataaagggatttgttatattgttttttattttttagtattagaggaaagatattttaaagttaaagttggtgaaaacgatttttaatatggtaattattgttatgtagagtggggggtagggtaagagaaataattttttttttttttgagacggagtttcgttttgtcgtttaggttggagtgaagtggcgcgatttcggtttattgtaattttcgtttttcgggtttaagttatttttttgttttagtttttcgagtagttgggattataggcgcgcgttattacgttcggttaatttttttgtatttttagtagagatggggttttattatgttggttaggttggtttcgaatttttgatttcgtgattttttcgtttcggttttttaaagtgttgggattatagacgtgagttatcgggttcggttaagagaaagtatttttttttatttgaatttcgtttaattttattagtattttttttaaatttttttatttgtcgtttttattttgagaaaaattgaagaaatgtaattgaagttatgtttttttaattttttagtaatgtttgggtgggaatttttttttttttgtagtaaaagtgtttttttttagtattttaaatatttaaatatttaattatgtggattttttgtattttttttttaaaatacgagtatgtagattttgatgttgtgttttattaaaaggtgagattttttttcggagggtttagtagtgaatatggtgtaggaataatttaaatagtttaaattagatgttatatgtggtacggtgcggtggtttatgtttgtaattttagtattttgggaggttgtggtagttggattatttgaggttaggagatggagattaatttgattagtatggtgaaattttgtttttattaaaaatataaaaattaattgggtatggtggcgagcgtttgtagttttagttattcgggaggttgagataggagaatgttttgaatttaggagaaggagattgtagtgagtcgagattgtgttattgtattttagtttgggtaatagagtacgatttcgttttaaaaaaaaaaaaaaaagatgttatatatatgtattttatatgtattttatttgttgttaagaatatattaataatggggaaatattaaataaaaaattaatattgcgtgattattttttttttttagggttttaaatttagaatttatttttgttcgtttagtaatttgtttttaaagtatttttaagtttattttttatttatgttatatttttttttatttgagagattttaggggaagtgtattagttttttattgttgttgtaataattattataagtttagtggtttaaaatagtataggtttgttatttttatagtttttattgtaagggggattttgtgagttagaattttatataggttttattaagttagaattaaagtattagatagggttgttttttttttgaaggtttttggggaggatttattgttttatttatttaggttatataggattgaggtttttgatattttatattttttgaagttgttttttttttttggattatagttttttttttttggtttttaaggttagtaatagtatgttaagtttttttaattagaggtttggaatttttcgtttttttaattttttgtttttttgatttatttttttttatttttttattttaagggtttgtgtgattatattgggttttttggataatttagtatgatttttttattttaaggttagttgattagttattttaattttatttgtaagtttaatttttttttgttatatatatttaatatatttataagatgtgattttagggattgggatgtaggtatttttggggttattattttgcgtattgtatttttgtggaatattgtttagaattttttgttttgttttaatatagtaattttgggttagtgttttatatttataaggttgttttgaaaatcgttgtaattttggttaggcgcggtggtttacgtttgtaattttagtattttgggaggtcgaggcgggttgatcgtgaggttaggagatcgagattattttggttaatacggtgaaatttcgtttttattaaaaatataaaaaaaaaattagtcgggtatggtggtgggtatttttagttttagttatttgggaggttgagataggagaatggcgtgaattcgggaggcggaggttgtagtgagtcgagatcgcgtcgttgtattttagtttgggcgatagagcgagattttattttaaaaaaaataataagaaaattattgtaatttttttaggagtggtttatatgatgtttttggtatttttttaatttgtttatttatttttttgaatagt

SEQ ID NO: 1510 - DNA, 7695 bp, Artificial Sequence
  chemically treated genomic DNA (Homo sapiens)
gttgtttaaaaaaataagtaaataagttaagagagtgttaagagtattatgtaaattatttttaaaggggttgtaatgatttttttattattttttttgagatggagtttcgttttgtcgtttaggttggagtgtagcggcgcgatttcggtttattgtaattttcgtttttcgggtttacgttatttttttattttagttttttaagtagttgggattaaaggtgtttattattatgttcggttaattttttttttgtatttttagtagagacggggttttatcgtgttagttaggatggtttcgattttttgattttacgattagttcgtttcggttttttaaagtgttgggattataggcgtgagttatcgcgtttggttaaggttgtaacggtttttaaggtagttttataaatataaaatattaatttaaggttgttgtattaaaataaagtagaaaattttagataatgttttatagggatgtagtacgtaaaataatggttttaaagatgtttgtattttaatttttggggttatattttgtgaatatgttaaatgtatatagtaaaaggaaattgagtttgtagatggaattaaggtagttaattagttgattttaaaatgggaagattatattggattatttagagagtttaatgtaattatataggtttttaaagtaaggagatgaagaagagtgggttagagagataggaagttgggaaagcgggagattttaaatttttagttagggggatttgatatgttgttgttggttttgaagattaagggaagggagttgtgatttaaggaaaggggatagttttaagaagtatggaatgttagggattttaattttatataatttgaatgaataaggtaatggattttttttaagagtttttagaaagaaagtagttttgtttggtattttggttttagtttggtgagatttgtgtgggattttgatttatagaattttttttatagtgggaattgtaagagtaatagatttgtgttgttttaaattattaagtttgtggtaattgttatagtagtaataaggaattaatatattttttttggaattttttaagtgaaaggagatatggtataaatggaaggtaaatttggaagtgttttagaaataagttattaaacgaataaaaatgaattttaaatttgaaattttgagaagagaaagtaattacgtaatgttagttttttgtttgatatttttttattgttaatatatttttgataatagatagagtatatataggatatatgtatatagtattttttttttttttttttgggacggagtcgtgttttgttgtttaggttggagtgtagtggtataatttcggtttattgtaattttttttttttgggtttaagatatttttttgttttagtttttcgaatagttgggattataggcgttcgttattatgtttagttaatttttgtatttttagtagagataaggttttattatattggttaggttggtttttattttttgattttaggtgatttagttgttatagttttttaaagtgttgggattataggtatgagttatcgtatcgtgttatatatagtatttagtttaaattgtttaagttatttttatattatatttattattagatttttcggaagaaaattttattttttaatagggtataatattaaggtttgtatattcgtgttttaaagaaggaatataggagatttatataattaagtatttgaatatttaaaatgttaaaaagaggtatttttattataaaggggaaaaagtttttatttaggtattgttaaagagttaaaagaatatgattttaattatatttttttaattttttttaaagtaggaacggtaaatagaggggtttggaaaaggtattggtgggattaggcgagatttaggtgaaagaaaatatttttttttggtcgggttcggtggtttacgtttgtaattttagtattttgggaggtcgaggcggggggattacgaggttaggagttcgagattagtttgattaatatggtgaaattttatttttattaaaaatataaaaaaattagtcgggcgtggtggcgcgcgtttgtaattttagttattcggggggttgaggtaggagaatagtttgaattcgggaggcggaggttgtagtgagtcgagatcgcgttattttattttagtttgggcgatagagcgagatttcgttttaaaaaaaaaaaaaattattttttttgttttgttttttattttgtatagtaatgattgttatattaggggtcgtttttattaattttggttttaaaatattttttttttaatattagggggtaaaaagtagtatgataaatttttttatatatatatatagaaatttttttaagaatttaattgttgtattttaaaatatcgttatttaaatatagagaagcgtcgggttgttcggttttagaacgattcgggaagttaggatttattcgcggtttagttcgggtcggtatttatttagtatcgcggggttgttgtttaggacgtatttttgttttaggtcgcggattagttgatgatcggttagggtagtatcgtagcggttcgtagcggataaggttttttgtagtcgtagtagggagtaacgtatatcggtttcggagttcgttatgtcgtcgagtttcgttttcgcgcgtgcgttcgttcggttcggattcggaaatgtttttacgcgcggaggcggggttgcggggcgcggcggtaggaattttttcggggatttttgcgggaaggtttggttagtaagcgcgtttttttggttcgaattaatatggaaatttaaggaaaaacgtttgatttgcggaggtagtttgggtggttatttggtgttggatttggttaaataaatattagaggtagataaaataagcgaggggtttaggttaagagttttaagtttgtttttcgataaaaaacgataaacgcggtcgggggcggtgatgttcgtttgtagttttaatattttaggaagttgaggcggggggatcgtaggagttcgagattagtttgggtaatataatgagattatttttattatttttcgtttttaattttttttaataaaaaaaatttttaagtgagaaatgtatttgtaatgtttttattaattaaaaacgtttaagggataaagaagtatacgttttttagttaacgttagaggaatatatttcgagagttggtgttgtaggatttagttttttcgcgaaaacgttgtcgcgtagggggttagattatttggattaaggggggtcgagcgaggtttatttttggtttacgtacgggcgttgaaagaagcggtattgtttttttttgtcgatgcgtagtggcgtttttcggaggcggagttacgtacgagcgtcgttgtgattggtgaggtttcgttaggggcggagacgattttgtcgtcggcgggaattttgggtttcgcggtttgggagcgttattcgttaggtggattcggagttcgcgagcgtcgtcggtaagcggtcgtttttttacggtaatcgcgcgtcggcggggagggcgtggcgcggagtcgacgggaacgttcgcgttgcggagtagggtagggaagtcgggaggcgggttcggttcgagtttgtttttgtcgcgtaggtatttcgagtattatgtcgttttcggcgtcgatttcgagtcgtcgcggtagtcggcgtggaagggttattttcgtttagacgcgtgagtttttcgagtcgggtttattatagttttcggcgtcgtttcgtttgttttttcgtcgtagttggtagcgttgggtgggtgcgcgggattcgggcgtttagtttcgggttgggcgttgtcgtttggtgcgtatagatatttatagtaggttgtggtttgggtgttgtttaattcgattgttatttgtttttgtttggtttggtttagtggtgagttataatgttttaaggaaaagataaatttaggaaggtcggttttgaaagttaatggttgttttttttgttttgtgtgatataagttcggagtgaggatgttaggttattttttttttagagacgtagaggcgaggattttatttttacgggggagttgtagtcgatgttaatttcgtttggagtggatttgtagagttttgttgcgtaggacgtgttgttttttagttttttttaaatgtattttttaggtgcgtgtttgaagattttggttttgttgtgtttgatatatagttgatgttttatttgtttaggtttattggttttataatagttggtataacgtttaaagtattttttttgtacgtgattgagtatgtttttaattagaggagttgaacggagtgtagaaaatagtagttttagggtttagtgagtagaggaagtagtttttttggtgtttttttttaatagaatatttaagagtgtttagaattttagttatcgtaggttgtaataaatatttagtttgttgttgcgattagatggtatagattaatagataatatgttgtaattttaggtttgatatgttattagaattttttaattttgtttttatagttattttttttgattttgatgttagtttattattgatatacggtatttttagttttcgggtagagggaattttaagaagtggtgttaggggtatatttgtgagatagaggtttgatttgggttttgtatagaagggtttgtaagtggatttgtagtttgacggggtgagtatgtagttttttgaaattattttatggcgggtattatgtgggtaattttgtttttatgattttgttatgtttttttgtgtaggtagtagtagaagatatagtggtaagtgagtagtttttaggttaaaaatttgtgatttggggaatagatgtaaatgtggtagtatgtaaagaaaatttttaggtgagttatatgtattaaaatttttattttgggttttgaaaatgttgggagatcgtgtttataatttatatttaagtagttataatgattagaagggttatttgtggtggtttatatttataattttagtattttgggaggttaaggtgggaggattatttgaggttaggagtttgatagtagtttgattaatatagtgagattttatttttaaattaaattttagaaaagaaaaaggaagaaaaatattatttatttttgttttttgatagtgatatatttataattttgtgtgtttttagtagttgtttgtttttaaatgttatatgtttaatatagttttttttttatttaaagagatttttttagcgttttattgattttttggttaaagaagaagaaaatgttggtatagatattattgaatttttatatatgtaacgatttggggaggtaattaaatattttttaaatttaagttacgtgttttaaaatagttaaattagtaaaatataatttgtttatttttattttttagattaatgttattggtgagttatttttaaatgtgaattgtgaatatattaaattatttgataaaaatttgtatagataatttattttttatttataggtaagaatttagttttgattttgatgaattttagtaatagtttagaaagaatgtttttagataatagaaattttttagtaatgaagatagtatgcgtaaatattttaagaaattgagtattattttttttggttcggtgtggtggtttatatttataattttagtattttaggacgtcgaggtaaatggattatttgaggtcggaagtttgagattagtttgggtaataaagtgaaattttatttgtattaaaaaatataaaaattagttagatatggtggtgtatgtttgtagttttagttattcgggagtttgaagcgatagaattatttgaatttcggaggtagaggtgtagtgagtcgagatggtattattgttttttagtttgggtaatagtgagattttattttaaataaataaaaaaaaattatgtattattttttttaagatgaatattttttttttatattttaatgtttttgaaagtgggatttgtattattattaatgataggttatggtttatttggtagtgttttttatgtagaaaaatgatgaattttaaaattgatagttttttgggttttatgaagtaagttattttaaatggaaatattttaaatgaattatatattttttgttgttttgaaagaatatattgtattgtagatttttatttttaagttttaggttagtttttattaatgaagtattagttttgttgattttgggtgtagtttttggaggtaagtagatttggtttttgaattttggttttgttgattattggttgtataattttggttaagttttttagttaattaaaagttgtttttttatttgtaaaatgggaattatatgttaagaaatttgaataaatatgatttaatttattttggtatcgttaggtacggtggtttatgtttgtgattttagtattttgggaggtcgaggtaggtagattatttgaggttgggagtttaagattagtttgattaacgtggagaaatttcgtttttattaaaaatataaaattagttaggcgtggtggtaaatgtttgtaattttagttattcgggaggttgaggtaggagaattatttgaattttagaggtagaggttgtagtgagttaagattatgttgttgtattttagtttgggtaataagagtgaaattttgttttaaaaattaaaaataaataaataaaaaatttattttggtattattttattatagaaggaaaataaagtgtgaggttaaaattttttttttttttaatagaaagtaaagaatatgttagtatatattaagaaggtattttcgtataaattatgaaatttaatttaattgaaaatatgtagaaatagatagtttagtatatttaaatttgaaaatagtacgtgtatgattttgtagggtaatattttggggatatgatatgttgtttttttatattttgttaatttgatatgtttttattatatttaatattgagatatgaatataaatatatttttatatttgtttttataggaagttattttaatttttgatatggttgttaatgaaattttttttgatcgttattttgatttaattttagaatattagatttaagtaagattatttaacgtattgaagattaagaatatgagaaatttgaatttagaaggtaatgtattttttataggattatttttgttgaaggaaaatgttttatatgaaaatagttttgtttttattgagaaattatgaaagaagtaattggcggtggtagttaaggtgacggattataaattgataataatatagatttagttattttatatatttatgaattttttatattttttaaatttaattgaagtttttgatataagagatgtgattattggtcgggtatagtggtttacgtttataattttagtattttaggaggtcgaggtaggcggattatttgaggttaggagtttgagattagtttggttaatatggtaaaatttttttattaaaaatagaaaaattattagggtatggtggtatacgtttgtagtttcggttattttcgggaggttgaggtaggaga

SEQ ID NO: 1511 - DNA, 17738 bp, Artificial Sequence
  chemically treated genomic DNA (Homo sapiens)
gaaaatgtttttaacgtttaagagaagattatataaatagattagttgttttttttttttgtttgaagtgttatgttatgtgatgttttaaattgttatagttgttaatattagtttgggtagggtagagtggaaatagggaagaaacgaggtttgtgaagatataaatatattattgaatgtattttgattcgaagaggattttttagtatttaaaatattttttttagcgtttatttttttttttagtttttgtttatttttttgtttttcgtagggtaaaatttagaaatgttgtcgttatttttttattttttattttttttttaatttgtttttgtttttattaatttattgaaattgttttttttaagtttttaaaaatttttacgttattaaatttagtgagtattattttgtttttatatgatttggttttttagtagttggttttgtttttttgaaatattttttttttagtttttagaatttttttattttattggttgtttttttttagtttttttttttggtttaaagtgtggtttttggtttagtagtattagtattatttaggtatttgttagaaatgtaggtttttggattttattttagatttgttgaattaaatttttggttcgggaggggcgaggtagtaatttgtgttttagttaagttttttaggtgatgtatattagagattgagaaggattaattcgaaattgtgggtattttttattacgaaattttgattttttttttttttttggttatatttttttttatgatgatgttatttaagttcgtgattggaaattatttatattttgatagtttttaaatgtgtatttttagtatttatttggggattatatagttattttaaatttaatatgtttaaatggaaggaaggaattttagatgttttttttaaaatttggtcgttatttatttttttttatttaagaaaatagttttattatttttttagttgtttattaaaaaaatttaagttatttacgagttttttttttttttaattttttattttattagtaatagtatatttagagggtttatttttaaattgttatgaatttgttttttattattattataggttaagttataattttttttttttagtttattgtaaaagtttttagttaggtattgtttatgtttataaaataattagagtggatttttaagaaggtaaattaggttaagtatggtggtttatatttgtgattttagtaatttgagaggtcgagataagtagattgtttgagtttaagagtttaaaattaatttggataatatagtgagattttcgtttttaaaataaatataaaaattagttaggtatggtggtttacgtttgtggttttagttatttagaagattgaggtaagaggatagtttaagtttaggaggtagaggttgtagtgagtcgagattattttacggtattttagtttgggtaatagagtgagattttatttaaaaaaaaagaagaaggtaaattatgtcgtattatttttttttttaaatttttaagggttttttattatatttaattattaaaatttaaatatttgttatgggttgttaggttttatggttattgtttgtatggttttttgtattttttttgaggtttgaagttagagattgtaattatttaatttatattaagtgtttaataaagtggaggaaataattttttttttgtgagaagatgaatttagagtttaatttttttagtttttttttatttgttgaggaggatttatatgatgtggttaaattatttttagttaggatataggagatgggaagggagatttttaaagaatgatttgatgatgttgtgaattttagtataatagggttttgtgggtaaatatagtagggtttgatttttaaggataaattttatattttattttttatttagttcggaaaacgatttttattgtttatagtgagatatgggtggttgtggttatgggagaggtaatgggagtgagtttggaatgaggaattatgtagggttatttgaatagttattttttgtgggttgtttatttttggagtggtttataaggttaataaaaatttttaagaatttataggttagattattaattttattgtggtagtttttaaaattggtaataaggtttttgatattttttttattgaggagtgggttttatgttttttgtttttgaatttgggggttatatgatttttttttttttttttttgagatagagtttcgttttgtcgtttaggttgaagtgtaatggtgttattttggtttattgtaatttttgtttttcgggtttaagcgatttttttgttttatttttttgagtagttgagattataggtgcgtattattatgtttggttaatttttgtatttttaatggagacggggttttattatgttgtttaggttggttttgaatttttgattttaagtaatttatgggtttcggttttttaaagtgttgggattataggtatgagttatcgcgttcggtaatggggttatataattgttacgttaatagtatatagtggaagtgatgttatttgattattgagtttaggtaggaagtggtattgtagttttttgtttgttgaaatttttatatttggagttttgagttaatatgtaagaagtttatttaagtcgagattattagattatgaggaaattaggttatatagagaagtcgtagttaggtatcgtaattagtatatttgatttttaagtttttttagtttaggtgttatttaggtaagtgtataggttttagatgattgtaattttcggttattaaggtatttttagatttagagtttttttaattgatattttaaatataatggggtagaattaagttttcgttgtgtttgtttagttttttggtttaaataatttattggtataataaaatggtagttgttttaaattatttaagttgtggggtatttgtagtatattagtaataattagaataggttataagttaattttttttggttttttagttttttttttttaagaaattttaggttatttgagtttttttttgatgggaggaaagtagtcgattagaaaatataatttttttgaggaaaagatgggttttagcgttttggaattaagttttatagagcgttttttgttagtgggtagttagttttttgtttaggttgatttggttatttatttttagttttattttagttttgtttttttatttagttttgttttttttgtaggttttgagtttttaggagatttaaagagatattgtgttgttcgttgaatttattttttagtgagttatttttgaggaaaggaggtaaggttttgaatgcgatgttaatttaagtattatataatattgataggttgtaaaatggtttcgttgtttagtgtttattttaattggttataatttagttttttttgttgtattgagttagttttttttaaaggcggcgttttttaggttttttggttgtttttttttagtagattttttaagtgtttatttatatttatataaatatggtttaggtattgtttatagtagtttttttttgtgtatttttttggttttttttgtttttcgttatttgtattttttttttgtaatttgagtgatagtgattggttttgagatgtaaatatttgatgtatatatgtttataatgtagttttagtttttttttttttttttgtaaagagataaagagtgagatagggttttggtttatagttttgtggtttaggttggagtgtagtggtataattaaagtttattgtagtttttattttttgggtttaagtaatttttttattttagtttttttagtagttgggattataggattgtgttatcgtttttagtaattttttttattttttgtagaaatggggttttattatgttgtttattttggttttaaatttttgagtttaagtaatttttttgttttggtttttgaaagtgttgggattataggtttgagttattgtatttggttgttaatatttttaaatttttttttttatatgttttttaaattttttatttaaaattaggagattagatgttttattttttttagggtatgtttggtttacgtttattttattttaaaagtgtttaatttgggtaataatttataagatttttttttttttaaattttgtttttttattattttatttttcgtttttttttaaaatgagatagttgttagtaggaattttgcgtaagaatatattattttgttttatagaagatattttaggtaatgtgtaaatacgggtttttaaacggagcgtattttttttatttgttaatattattatttaaattattttttgtttaaaataaggagtagaaagtgaatgaaggaaggaataggtgatggttagtgttttttttacgttttaaaatttaagagtttatgtgaaaatttataaatattaattttaatttaggttaagtaaaattttttgtttttttttttagaaatttttggttgttaaagttttagaaattgtttttttatttttgagttttttattttttcgatttttttattatgtaacggggagttggagttttgggtcgaatttttaattaaagatgatttttatagttaatgagttacgttagggagcgatggtattcgtaggcggtattaattgatgtaagtgtttaagcgaattttaattcgtttttttcggtgatttattttcggttttgtttggtagcgttgtattttttaatttaaatttcggtcggtcgttcgtcgggggtatagagtgtgcgtcgggtcgcgcggtaattggttttcgcgtcgattttcgttcgcgagcgtcgtcgtttttttttttcgtttcgcgtttttttttttcggtttcgcgcgtcgtttgtttttcgagttagtcgttgatagtcgcggcgtcgcgagttttttttttttttacgatcgaggtaggtaaacgttcggggtgggaggaacgcgggcgggggtaggggagtcgcgggggtcgagtgaggatttcgggtttcgggttttaggcgtaagggtgttcggtcgggcggggtcgggattttagtgaggaggggtcgggggttgtttcgcgggcgcgtgacgcgtttcgggtttgttcggttgcgttggttttcgttcgggtgaggcggtttggtttcgttttttaggttaggaaagttttttttattgcgcgttggggggttgggggagttggcggagtttcgttagggaggtcggtggcgtcggggtgttttagcgttttttgtatttcgcgcgggttcggtttagcgggcgatcgttggcgtttagggaatttcgggagggtcgttagcgggtttcgtagggcgcggggcggggaggggcgtttgggggtcgcggggttcgcgtttttcgttcgttggtcgtttttcggaggtcgagatcggggtttagaacgttttttggtaaggtttggcgttttcgcgatgtttagagggtgtttggggggatggagagaggggcgttcgtcgggggagtttcgggagtttcggtgtttttcgtcgtagttgtagcgtttttttcgggaggcggtttagttttttattttcgtcgtttgagttttttcgaggggggttgtagttttgcggtcgttgttatcgtttggagaagcggtttacgcggattgacgggcgggggcggggtttcgggtttcggcgggggcggggttcggggaggttttattttttgttttttaggggcggggagagaggagttgtaggtttgcggtttggttttaggtgcgatggcggattttagtttggttagttatattttttttagtttttttggagggagaacgttggttatggggggttttaaggaataattagtttcggatgacgatttttgggttatcggtttttttatttgtgcggtaggcgtttttacgttttattattaaataatggggagaaatttatgtttattgttttttttaaggaattttttgtttttttttttgaggtggttgtaggaaatagattttttttttaatttcgtaattttattacggttatatttattttcgttatcgtagagttatagtttttcgtttttgttttttagtttttagatttttatataatatagtgtagttttattgttgtaatgatgaggatttttatggtcgcgttatttttttgttttgagagtattacggtttaattagtagttttttatatgatttgaagtgtttttcgtttttttagggaaaatttttggtagaataggattaaggatttttataaatataattattaaaaatataggaatagggaattggataaatatgttaaatttttggaaaaattaataacgtttttagatttgtagaagaaaggaaaaaattattagtggaaaggagtaattttatttatataaatatagagaaggttttatagtgaaaaaaagttaattagtaaggggaaaagtaggtagaggggtaggatgtgatttgtatgttatttatatttaatataagttttttatatcgaaaggaaaatattaagattataatagataaatggtaaaatgatgagttatttatataataaaatgtaaattagagtatgtttgggttattattttatatttattaaaataattaaaataattaatagtaatagtaatttttgttggaaggttgtttaaaatttggtatttttaagtgtttggggaggtggtagggttttggggttataaagatggttttgtagttaattttgtgattttggataggttatttaattttttgattttttttttgtttatttatagaatggaggaaatgatagttattttttgcgtttgtatgtatgagttattgggggtatttcgaattagtgataaatattttgttaagtaatttggtgatgtattaagaagttggaagttgtgatttagaaattttatttttgagaatttatttgtaatggaagaaataaataaataaaaataggtatgtatttttagtagaatgatttaaaattagaatatttggaaaagagtttaaatgtataatattagggtagtagttaagaaaattatgatatattaattgaaatgaatattatgtaattattaaaaattatgattttggagtttgtgatatgtggggaaaaattgataagtaaaaaagtgggttattaattgtatttgtttattttaacgtgaacgtatatgtgaaaaatttgaaaggaaaagtatagaaaatggacgtttttattgaaattgtcggtgattttaatttttttttggtgaatatattgtttttattaagggcgtttaaaaaatagtttataggttttaattttttagatgaaatggatttatagttttttgtaagagaaaggagagattgttatatttgttatttagaataaaagatttttagttaacgttgtttttttttttaaatatttttttatttttttagttgattaatgatttagtaatttgtgtattgggtttttttaagaattagtttttagatttatttattaattttagttttttgttgttgtttttaaggatttttgaatattttttaaaattgaataattttagttatgtttgagtttttcgtttttttggaggtataaatttagtttagttgaattataatagattgtatatattttgtagaatttttgtggttttaggaaggttgaaagttattaaatgttatagaaaatgagggttaggaaaggttgtgattataagtttttgatttagaggttattcgggtgtatttgtgtgattgatattttattgtattattattttttgtaaaattagtttaattttgtagagaaatggttatagatttttagaattatgttgaattatgtaagggagtagttattttaaaaataatgtaattaaataataataataatataatagaagtttttgtattatattgatattgaatatggttgttaattaattagttaaattaaggtgaaagattttttgaattttagttttaatttatttcgtttattttttttttttagattttatttttttttttaaggtaattatatttattgtgaattgttgtatattaaatatttaaaatatgtttgtatttaatttagtgatggttatagtattataaaataatttttaagtgaatagtgtgtgtagtaatttttatagttaggagaattttttttgtcgatgtgttaattatttttttttttttaattgtattttatttaaattgttatagtattgtgtgattattttaagggaggtaattttttagtgaaaagtattataaatgttgaagattagatttttgaggatttagtattgaagtttgattacgggtgttaattttttgagaagtttttatagatttttaaattttatcgttaggtattttttgattggtttgtgatgggttttagtaatgttgttttttaaaagttttttaggtaattttgattatggattaggttggggattttttgttttgtttagtttgtggtttttaggtgttagtgagaaatttttatttttaatttttgtgtaaaattttttttagtttatattaagttttttatgaattttagaaaattaaaatataataagggaatttatttagtttagaagagataagggatattatggggtgaaggtcgggggttgtttgatatttgttttttttcgatgtaattaattaagttttaagttgtaatgtgttttatgggttagaaggttttagtgtttatatttggattttagttttaatattttggatttttataattttgggataagtttttattagttttgatttttattttttatttataaatgggaataagatgaacggggtaatttatagattttttagtattttttttttagtttcgttgttttgttattttgtttatgtattaatgttatgtgattttattgtagttttgtattttgatatttggtaggttaagtgtatttttgattatttttttattaaaaattttttttagttttttaagttttgagtataattttataatgttttttaaaattttttttgaatttttttttaaatttatttattttttttttgatagataagattatatgtattgtgtataaaattagaaagagatttttttttttaagatttgaaataagataagaatgtttatacgtattagttttatttaatatatggtattgtaagttttagttaggatagttagataagagaaagaaataaaaagtatttaaatttgaaaggaaaaagttaaattgtttttatttggagacgatatgattttatatttataaaattttaaagattttattagaaaattattagaattaataaatttagtaaagttgtaggatataaaattaatatataaaaattagtagtgtttttatatgttaatagtgaattattaggaaagaaataaaaagaaagtgttatttataatagttataaaataaatattttagaataaatttagttaagaaggtgaaagatttttatattgaaaattataaaatattgatgaaagaaatttaaggagatataaatagaaagatagtttgtgtttatggggggataattaatgttgttaaaatgtttatattatttaaagtgatttatagattttatagaatttttattaaaatattaatgatattttttatagaaatagaaaaaataattttaaaattgggtgaaggtggtatttttgtttcgttttagatttaagaggaaaagtttttaattttttattattaagtatgatgttagttgtgattttgttatatgtggtttttattgtgttgaggtataatgtttttatatttaatttattgagagtttttattatgaaagaatgttgaattttgttaaacgttttttttgtatttattgaaatgatcgtatggttattgttttattttgttattgtgatgtattatatttattgatttgtgtatgttgaattatttttgtagttttgggatgaattttattgtattatagtaaatgatttttttaatgagttgttgaatttgtttcgttagaattttgttaagaatttttgtatttatgtttattagggatattggtttatattgttatttttttgtgtgtttttgtgggattttgatattaggataatgttggttttttttgttattaatttttagttttatattattatgtttagaaaaaaaatttgatacgattttagtttaattaagtttgttaagatttgttttatggtttaatatatgatttgttttggagtatgttttatgtgttgttgagaagaatgtgtattttgtagttgttggatggaatgttttgtatttgtttgtttggatttatttggtttaagtgaagtgtaagtttgatgtttttttatttattttttttttaaatttttcgtttaaaaatttaagagatttaaagtaaatagggggttataaaattatttttgaattttgattgaaattgtgtttattttgtagattatttgttggtgatttggtattttttaatattggttttttaaataaaaaatattgtatgtttttttttttttttagtttttttttatgttttagtaaaattttgtagtttgtttattatttatttttaggttaaattttagatatttttaatttttattgttattatgaatgaatgtttttttttatgaaatgtttaattatagttgatttagggatttattgagttttgatttgttgatttgaaaaattattattttgttgagtttatgtatttattttaagatattttttgagattttttaggtaaaaaaattatatttagatgaatttatagaataatttaatagtataaaagtaatagattattgtttattatattaatgggaatgtttttttttttaaaattatgatattttgggttttgtgtttgtgatagtatttttttatgatggaaagagattatttttttagttttatagaaacgttttaaaaatagtttatatttttaaaaatttaggaatgatattgatttttattgaaaattttttaatatttgaagaaaattttttttttttaatttattaatagagtttttgatttttaattatttttgtatttttaaaataatttatattggttataatgtattttttttttattaaattgttaaaataagttgggtgttgtttttttagattttggtatttgtgtgagaggagggtgttatggtagggtggttaagtgtgtttatttgtgtattagtattgaattttgattttttattttattggttttaaatattatattttaggtgaagacgtttaaatgtttatttttattgagttatagatttttataataattgtttaaattgatatttttatttgaatgttttataggtgtggtaaagtttatatgtttatattgaaatttttggtttttttttttaggtatgattttttattagtttgttttattttagtagatggtattatcgttatttttttggttatggaagttttagattcgggtaatttttatttttttatttatttaattagtaggttttattggttttttttgtaaaatatgttttatttatttatagtttgttagttgtatggattttattttaggttacgttattatttttttgtagtagttttttaattggtttttttatttttttttttgttttattaaatttttttttatttaagaaaaaatgttttgtagatatggggttttattatgttgtttaggttggttttaaatttttgggtttaagtaatttttttgtttgagttttttaaagtgttgggattataggtttgagttgagtttttgaaaaaatattttatgatgttattgttttattaagattttttaatggttttttattgtttttagaggaaaatagaaatttttttttgtggattatgaggtttttatgatttgatttttattatttttttagttttagtagtttatttgttattgttttatggggttttatagatttgattttttttttggtttttaagtttattaagttaagtattttatttaaaattgtgtttttagtttttagtataatttttgatttttagaattttgatatttgaaatgtgtgttaagttaattaataaattattgtgttaggtttggtggtataataatgtgttgtgggttatttatatatagttgtggtttatatttataattttagtattttgggaggttgaggtttgtagattggttgagtttaggaatttgagattagtttgggtaatatggtaagattttattattattaaaaatataaaaaaaaaaaaaattaggcgtggtgttgtatatttgtggttttagttatttaggaggattatttgagtttattgggtggaggttgtagagagttgagattatgttattatattttggtttgggtaagattttgttttaagaaaaaaaaaaaaaggttatggtattgtaaatattatattatagtgtataatttttgatagttttttttttttattttttttatggttattggttagttttagttttttatttttttttttaagttgatatatattggttgggtatggtggtttatatttgtaattttagtattttgggaggttaagataggaagattttttgagtttagaagtttgaggcgagtttgggtaatatagtaagattttatttttattagaaaagaaataataataaaaagaaattggtatatattagttattttataaatattttttaaatgaattaattttaaagttgatttttataatttatattttaatagaaagataatttattttagagatatttttatttattaaggaaagttgtataaagtaatttattaattttttaaagtattttttaagtttatttttttttatagagatatgttttttagtgatgtgtgtatgttatatttttaaataatttttaattttatttagaaattttatatttttgtgggttttatttattaaattcgatttttatttttattattaatttatgatagtttattttgaagttttttgtttttttttttttgagttgaataattatttattttattttattttttttatttagttgtattatttatgtttttttgatagttatgtaggttttaaatttttatattttttaatttttttaaaagattttttttgtgttattttgataagcgttaagtgttatattatttttttttatttttattatatttttaatgattttgattttttttttttatttttttggtttttttttttaggtaaatgattagttatattttttggttatttttttttgttggaattattgttttttattgttttgtaagaattttttgtaagttttagaaatgaattttttgttgattttaagtattaaagttttttttattattgtgtattttttttattaattttgtttagagttagttttatcgtgttgaataagaatttttatattttaatttttttttttaatttttaagtttaagggtataagtgtaggtttgttttataggtaaattcgtgttatgggggtttgttatatagattattttattatttaggtattaagtttagtatttattagttattttttttgatttttttttttttttagtttttcgataggttttagtatgtgttgtttttttgtatgcgtttatgtgtttttattatttaggttttatttataaatgagaatatgtagaattgggttttttgtttttgtgttagtttgtatatttttgtaaagaatatgatttcgtttttttttggggttgtatagtattcgatagtatatatgtattatatttttattattttagttattattgatgggtatttaggttgattttatgtttttgttattgtggatagttttgtaatgaatatatacgtgtatgtgtttttgtaataggatgatttatatttttttgggtatatatttagtaatgggattgttgagtcgaatgatattttcgtttttaggtttttgaggatgtaattaaatttattaattatttgttttatggtttgtgttttttgtttaaaaagttttttttttattttttttttaggttataaagatattttttaatattttttttttttagcgttaaatttgtattttttatatgtaagttttggatttatttagagtttatttttgtatgtagttagggatttagtttttttttttttgttttttagaagtatgaaattttttttttttattggttcgtggtgtttatgttagtatatattaagtttttgttaaagtgtatttacgtgggttttttttttaatttgtttttttgttttttttggttttttcgtttatttttgagttttatcgtttagttttcgttattgtggttttgtagtgattttatgtttgttttggtagatttttttttttttatattttttttttaaggttgattttattatttatggatatttttttttttatagaagtttattgaattttttaaaaaattgagattatttggaattttaattggtattttattgtaattattagtttatttaggataatggatatttttataatattgagttatcgttattaagattatggaatgtttttttattttttttagattattttttgtgttttttgtataatgtgttatttattagaagtttttttttagttaagttaatttttagacgttttatagtttggttgttattttgaatatttgtatttttttttggttagttattgttattgtagaggaatgtcgttggttttcgtaggttgatttttagttttataattttgtattttagcgttggtttttatgttatttttgttattttgttggattttttatgtgtatgattatattaattgtaaatagtgttagttagagtattttttttgttatttttatatttgttatttttttgtatatggttttggatagtattttgagttttatgataatggatgtttttgttgtatttttgagtgtatttttagtattttttttagtaataaataggtattgattattattatatatttaataggatattttgaaatatgttagaggattaggttattatttgattggtgatagagagtattttagatgtataggtttttagatatgttagtgtttttttttattatttatttttattttaaagttgtttggttttatttattttttgtgtttggttttttttttttgtgttttttttattatgttatgttttcgtttgtttaggtgtttttaagagtttatagatttttaatttttatagttttaaatgaggtatatttaaagttcgatttagtgttattttttgtagtttttttttttttttattttatttattttaggtaatatttttagttagttagagtttattgtagtagttggtatatgaaataaatgtttatttaattgaattgaaaatgttagttggttattgttaaaaatattattttgtaaatttataaatatggttttttttgtatatttattataaatatttagtatttagtttgattattttttatgttttataatatgtgtttttttatttatttatttatttagtatttattttgtatgtttatgggttaagcgttttgtttaggaatattgttgtgaataaaattaaattttcgttttaaaggagtttgtattttcgtggagaatatgaataataagtatagaggaaataatataatattttaagtagttgtaattgttttagagaataatgaagttaggaaagggggtgggttagggggtgttgttttaggtagagtgatgggaatagttttattgagtaaattttagttatatgagtagttggaagaaaagttttttaggattagggaatagtaagtgtaatagttttgagataggatgggtttgttagtttgaggagtagtgggaggtttgaattaggttatatggggtttagttagtatggttacgattttgtgttttatttagagtataaaggagttttattgagggataagggaagtggtatgatgtgattcgtatattaagaggagagcgtttaatggtagttaggggaggagtagggaggttggttgggaggttgttgaagaaattaggtgagaagtgatggaagtatcgaataagatggttatgttggaaaaattgagaagttgaggtgtttagtattgatttttaaggtagagttattgagatttgttgatagatttaatgtatgttgggagagaaaatttagttattttagagtattggttggatttgttatttattgtagcgaatggagaaggtgttgatataaaagttttttagattgaaagttattgattgaggggatggtgttttagtttgattttttggggtgtatgagtagtagggaggttaagagttgggttttacgagattgtggggattatattagggaagtaggtttgtaaagaatttgtattatagatttttatttaaaagagtttttaaaaattttaattggtatgatttgagtattttaattttgtttgtaatttttaaatatattttgatttgtttatgattattaaggtaaaattttttattttaataatgttagtagaaatataaataggatgttaatttatttatttggtaattttttttatgaatattatttagtttaattattagttttgaaggagatgaaaaataattttttaatttttagaaaaatttgtagttaattgggtgataaaggtaaggggtttttgagtttataaaaatgttttaaaattggtaatagtttcggttgtacgttttattaaatgtattaaaaattattgaattgtatatggtatatggtgaattatatggtatgtgaattatattttaataagttgggtattgtttttttaaaaaataaaaataaaaaaggagaaagagagagagaaaaataattgtagattattttagtattgaggataagattaattttagtgttttagtatatgttattataggttttacggtatatagtgatgatttggagtttatgatttgatttagggtatagtaggtattgtttagtaattattttattattgttataggtttttgtttttggagttaagtgtttagggtaaatgagatttttaatttgaaaagagatttttgatttgatgaatgtatattttttaaagggttataaattgttattttggatgtttgatttgtttgttgttttggtataaaaattagaagaaaataatttatttataaaatgttaaataatgaattaaaagttatttattaagtttataatttagggttatatttgtttttggagtaggagaaagagttgtgtttattttttttttatttttgtttttgttttaagtgttttagagaagtatagggtggtaatagtgtttttattgagtagttgatattattgttatgtatttatttattatgtaggaaatatttagtaattttaatataaatatgggattttgacgtttttttttttattttgtaga

SEQ ID NO: 1512 - DNA, 17738 bp, Artificial Sequence
  chemically treated genomic DNA (Homo sapiens)
tttgtaaaatgaagaggagaacgttagagttttatatttatgttgaaattattaaatgttttttgtataatgaatgagtgtatagtaatggtattagttgtttagtagaaatattgttgttattttgtatttttttgaagtatttaggataaaagtaaaagtaagaaaagggtgaatataatttttttttttgttttaaggataaatgtgattttaagttatggatttgatgaatgatttttagtttattatttaatattttatgagtgaattatttttttttaatttttgtattaaaataataaatagattaaatatttagaatgataatttatgattttttggagaatgtatatttattaaattaaaaatttttttttaaattaaagattttatttattttgggtatttagttttaagagtagagatttatgataatagtaaaatgattgttaaatagtatttgttgtattttaggttaaattataggttttaaattattattgtgtgtcgtaaaatttataatggtatatattggaatattgaagttagttttgtttttagtgttgggatgatttgtaattgtttttttttttttttttttttttttttatttttattttttaaaaaaataatatttagtttgttgagatataatttatatattatataatttattatatattatgtatagtttaatggtttttagtatatttaatgaaacgtgtaatcgaaattgttgttaattttagaatatttttgtgaatttagaaattttttatttttattatttaattagttgtaaatttttttaaaaattagaaaattattttttattttttttagagttaatgattaaattggataatatttataaaaagaattattaaataaataaattaatattttgtttatgtttttattaatattattgaaatgggaagttttgttttggtggttataagtaaattaaaatatatttgaaagttataagtagagttaaagtatttaggttatgttagttagggtttttggaggtttttttaggtgggggtttgtggtgtaggttttttgtaggtttgtttttttgatgtagtttttataatttcgtgaggtttagtttttggtttttttgttatttatatattttaggaaattaaattagggtattatttttttagttagtagtttttagtttaaagggtttttatgttagtattttttttattcgttgtaatgggtgataaatttagttaatgttttagagtgattgaatttttttttttagtatatattggatttattagtaaattttagtagttttattttgaaaattaatgttaagtattttagttttttaatttttttaatatgattattttattcggtgtttttattattttttatttgatttttttaatagttttttaattagtttttttgttttttttttggttgttattgagcgttttttttttaatatgcgggttatattatgttattttttttgttttttagtgaggtttttttgtattttggataaaatataaagtcgtggttatattggttgggttttatgtaatttggtttaggttttttattgttttttaaattgataagtttattttgttttagggttgttgtatttgttgttttttggttttagaaggttttttttttagttatttatgtggttaaagtttgtttagtggggttgtttttattattttatttaaaatagtattttttagtttatttttttttttggttttattattttttggagtagttatagttatttgagatattatgttattttttttgtgtttattatttatgttttttacgggagtgtaggtttttttagggcgggagtttggttttgtttatagtagtgtttttagatagagcgtttgatttatagatatgtaaaataaatgttggataaatgaatgaatgggaaaatatatgttataaagtataaggaataattaaattaaatattaaatatttataatggatatataaagagaattatatttataaatttataaaatagtatttttgataatggttagttaatatttttaatttagttaaataaatatttattttatgtgttagttattgtagtagattttggttggttggagatattatttgaaatgggtaagatgggaggaagaggagattgtagggaatgatattgagtcgggttttgaatgtgttttatttaaagttgtaagagttaaggatttatgagtttttagagatatttgaataggcgaggatatggtatagtgagagaagtatagaggagaagaattaggtatagaaggtgggtgaggttagataattttggagtggagatgggtggtgagagaggatattggtatgtttgggggtttatatatttaagatattttttgttattagttaagtagtggtttagttttttggtatattttaagatattttattaagtatatggtaatggttaatatttgtttattattaagaagaatgttaagaatatatttagaaatataatagggatatttattgttatgggatttaaggtgttgtttaaggttatatgtaaagaagtaataggtgtaagaatggtaaggaaagtgttttagttgatattatttgtaattagtgtgattatgtatatagaaaatttaatagaataatagggataatatgagaattaacgttagagtgtaaggttgtgggattgaaggttagtttacgaaaattaacggtatttttttatagtagtaataattgattagaagaaaatatagatatttaaagtaataattaaattgtaaagcgtttaggaattgatttaattaagaaaagatttttgatgggtgatatattatatagagaatatagaagatggtttgaaaaaaatggagaggtattttatggttttgatggcgataatttagtattataaagatgtttattattttaaatgaattggtagttgtaataaaatgttagttaaaattttaggtaattttaattttttgagaagtttagtaaatttttatggggaagaaaatgtttatgaataataaggttaattttaaaaaaaaagtgtaaagaggagggaatttgttaaagtagatatgaaattattataaaattatagtgacgaagattggacggtaaagtttaggaatagacggagagattaaaggaaatagaaaagtaagttgagagagaaatttacgtagatatattttaatagggatttgatgtgtgttgatatgggtattacgaattaataaaggaggaaggttttatgtttttgggaaataagaaaaagaaaattagatttttaattatatataaaagtgaattttagatggatttaagatttatatgtgaaaggtataagtttggcgttagaagaggaaaatattgggaaatgtttttgtgatttggaggaggaatgggggaagaattttttaaataaaaagtataaattataaggtaaataattgatgaatttgattatatttttaaaaatttaaagacggaaatattattcgatttagtaattttattattaggtatatatttaaaggaatataaattattttattataaagatatatgtacgtgtatgtttattgtaaaattatttataatagtaaagatatggaattaatttaaatgtttattagtgatagttgggataatgaaagtgtggtatatatatgttatcgaatattatgtagttttagaaaagaacgagattatgttttttgtagggatatgtaaattgatataggaatagaaaatttaattttatatgtttttatttataagtgggatttaaatgataagaatatatggacgtatgtagaggaataatatatattagggtttatcggagggttaagggagggagaggattaggaaaaataattaatgggtattaggtttagtatttgagtgatgaaataatttgtatgataaatttttatgatacgagtttatttatggaataaatttgtatttgtatttttgaatttaaaaattaaaaaaaaaaattaaaatgtaaagatttttgtttagtacgataaagttgattttggataaagttaatagaaagagtatataatggtaaaggggattttagtatttaaaattaatagaggatttatttttagaatttgtaaggaatttttatagagtagtaagagatagtaattttaatagaaaaaaatggttaaaagatataattgattatttatttaagaaagaaaattaaaaggatagaaaaagagaattaaaattattaagaatataataaaaatgaaaaaaaatgatataatatttaacgtttattaggatagtataaaaaaaattttttaaagaagttgaaaaatgtgaggatttggaatttgtatggttattagaggaatatggataatataattgaatagaagaagtaaaataaagtaaatgattatttaatttaaaaggaagaaaatagaaaattttaaaataaattgttataaattaataatagagatgaaaatcgaatttaataaataaaatttataaaaatgtggaatttttaaataaaattaagagttatttgaaaatgtaatatatatatattattagaaaatatatttttataaggggaaataggtttagagaatgttttaaaaggttaataaattattttatgtaattttttttaatgaataaaaatatttttgagatggattgtttttttattaagatgtaaattataaaaattaattttagaattaatttatttaagaaatatttatggaataattagtatgtgttagtttttttttgttgttgttttttttttggtagagatggggttttgttatgttgtttaggttcgttttaaatttttgggtttaagagatttttttgttttggttttttaaagtgttgagattataggtgtgagttattatgtttagttagtatgtgttagtttaaaaaaaaaaatagaaggttagaattgattaataattatagaagaaatggagaaaaaaagttgttaaaaattatatattgtaatataatatttatagtattataattttttttttttttttttgagatagggttttatttaggttaaagtgtagtggtatgattttagttttttgtaatttttatttagtgggtttaagtgatttttttgagtagttgggattataggtatgtaatattacgtttggttttttttttttttgtatttttaatagtgatggggttttgttatgttgtttaggttggttttaaatttttgggtttaattaatttgtaggttttagttttttaaagtgttgggattataggtgtgagttatagttatatataggtgatttataatatattattgtgttattaagtttggtataataatttattgattagtttaatatatattttaagtgttagaattttaagggttaagaattgtgttaggggttgaggatatagttttgaataagatatttagtttggtgggtttaaggattaaaaaggagattaaatttgtggagttttatgagatagtggtaggtggattgttaagattagggaggtggtgagggttagattatgagggttttatggtttatagagagaaatttttatttttttttgaaagtagtggggagttattaaagggttttagtaggatagtaatattatagaatgtttttttaaaagtttagtttaagtttataattttagtattttgggaagtttaggtaggaggattgtttgagtttaggagtttgagattagtttgggtaatatggtgaaattttatgtttataaaatatttttttttaaatagaagaaaatttagtgggataagaaagggaatggagaggttagttaagaaattgttgtaggaagatggtggcgtggtttgggatggagtttatgtagttagtaggttgtgaataaatgagatatattttatagaaagagttaataagatttgttggttgagtggatggaggagtgagagttgttcgggtttgggatttttataattagggagatggcggtgatgttatttattgaaataggataaattggtggagggttatgtttgggagagaaaattaagagttttagtatagatatgtaaattttgttatatttatgagatatttaagtgggagtattaatttaagtaattgttataggaatttgtaatttagtagagataaatatttgggcgtttttatttgagatgtagtgtttagagttaatgggataaagggttaaaatttaatgttagtatataggtgggtatatttagttattttgttatggtattttttttttatataggtgttaaaatttaaaaaaatagtatttaatttattttaatagtttagtaaaagaagaatatattatgattaatatggattattttaggaatataagaatggttgaaaattaggagttttattaataggttaggaagaaaagattttttttagatgttgaaaagtttttaatgaaaattaatattatttttaaatttttaaaaatgtaagttatttttaaaacgtttttatagaattggaaggatagtttttttttattataaagaaatgttgttataaatataaagtttaagatattataattttaagaggaaaggtatttttattaatgtggtgaataataatttattgtttttatgttattaggttgttttataaatttatttaggtataatttttttatttggaaaattttaaaaaatgttttagaataaatatatgagtttaatagggtggtagttttttaaattaataaattaaaatttagtgagtttttaaattagttgtagttaaatattttatggggaaaaatatttatttataatggtagtaagaattgaaaatatttaggatttaatttgaaaataagtagtaggtaagttataaaattttattgagatataaaagaagattggaaaaagagaaagatatataatgttttttgtttgggaaattaatattgaaagatattaagttattagtaaataatttataaagtaaatataattttagttagaatttaaaggtaattttataattttttgtttgttttggattttttagatttttggacgggagatttagaaagaaaataaataaggaggtattagatttatattttatttagattaaatggatttaaatagataaatataggatattttatttaatagttgtagaatatatattttttttaatagtatatggagtatgttttaagatagattatatgttaggttataaaataagttttaataaatttaattagattgaaatcgtattaagttttttttttaagtatgatggtataaaattagaaattaataataggagaaattagtattattttgatgttaaagttttataaaaatatataagaaaatggtagtataggttaatatttttgatgaatataggtgtaaaaatttttaataaaattttagcgaagtaaatttaatagtttattaaaaagattatttattatgatatagtgggatttattttagggttgtaaggatggtttaatatatataaattaataagtgtgatatattatagtaatagagtgagataataattatacgattattttaatagatgtagaaaaagcgtttgataaaatttaatatttttttatgataaaaatttttaatgaattaggtgtagaagtattgtattttaatataataaaggttatatatgataaggttatagttaatattatatttaatggtgaaaaattgagagtttttttttttagatttgaaacgagataaagatgttatttttatttaattttaggattgttttttttatttttgtgaagaatgttattggtattttgatagggattttatggaatttgtaggttattttgggtagtatggatattttaataatattaattatttttttatgagtataggttatttttttatttgtgtttttttgaattttttttattagtgttttatagtttttagtgtagagattttttatttttttggttaaatttattttgaaatatttattttgtagttattgtaaatggtattttttttttattttttttttgatagtttattgttggtatatagaaatattattgatttttgtatgttaattttgtattttgtaattttattgaatttattagttttaatggttttttggtggagtttttagggttttataagtgtaaaattatgtcgtttttaaataggaataatttaattttttttttttaaatttggatgttttttattttttttttttgtttaattgttttggttaggatttgtagtattatatgttgaatagaattagtgcgtgtgagtatttttgttttgttttagattttagaggaaaagatttttttttaattttgtatataatatatataattttatttgttaaagaaaaaataaataaatttgaaaaagaatttaaaagagattttaaaagatattatgaaattatatttaaaatttaaaagattgaagaaaatttttaatgagaagataattaagggtgtatttgatttgttaggtgttagagtgtaaagttataataagattatatggtattggtgtatgagtagaatggtaaaatagcggaattagagagagggtattaaaaaatttataaattatttcgtttattttatttttatttatagatggggagtgagagttagagttagtaagaatttattttaaggttgtaagagtttaaggtgttggagttgagatttaaatataggtattaaagttttttagtttataaaatatattataatttgaagtttaattagttatatcgggaaggggtaaatgttaaataattttcgatttttattttataatgttttttgttttttttgagttaagtaaatttttttgttatattttaattttttgaggtttataaagaatttgatgtaagttgaaaaaaattttgtataaaaattgggggtaggggttttttattggtatttagaaattataaattgaatagagtaaagggtttttaatttggtttatgattagaattatttgaggagtttttaaaaaataatattgttggaatttattataagttagttagagagtgtttagcgatgggatttgggaatttataaaagttttttagggaattggtattcgtgattaggttttagtgttaggtttttaggggtttaatttttaatatttataatgttttttattgaaggattattttttttaaagtgattatataatattgtaatagtttaagtagaatgtagttggagaaaaaggaatggttaatatatcgataaaaaaaatttttttagttgtgagaattgttgtatatattatttatttaggagttattttataatgttgtagttattattgggttagatatagatatgttttgaatgtttaatatgtagtagtttatagtggatatagttgttttggaagaagaaataagatttgaaaagggagaatggacgaagtaagttaaaattgaagtttagagaattttttattttggtttggttagttggttgatagttatgtttagtgttagtgtggtgtagaaatttttgttatgttattattgttatttgattatattatttttaaaatggttgtttttttatataatttagtataattttaaaaatttgtggttatttttttgtaaaattaagttgattttataagaaatgatgatgtaatgaggtgttagttatatagatgtattcgagtggtttttggattaagagtttgtgattatagttttttttgatttttattttttgtgatatttggtgatttttaatttttttaagattatagaggttttgtaggatatgtataatttgttgtggtttagttaaattagatttgtgtttttaggaagacggaaagtttagatatggttgaaattgtttagttttgaaaaatatttaggagtttttaaaaataataataaaaaattagaattgataaatgaatttaagaattgatttttaaaaaaatttaatatataaattattaaattattaattaattaaaaaaatggaaaaatatttgaaaaaggaaataacgttggttaaaaattttttattttaagtagtaaatataataatttttttttttttttatagaaaattgtgggtttattttatttaaaaaattaaaatttgtgaattattttttaaacgtttttagtgagagtaatatatttattaaaggaaaattaagattatcgataattttaatgaaaacgtttattttttgtgtttttttttttagattttttatatatgcgtttacgttagagtaagtaggtgtagttaataatttatttttttatttgttagtttttttttatatattataggttttaaaattatgatttttagtggttatataatgtttattttagttaatgtgttataatttttttagttattgttttggtgttatatatttaggtttttttttaggtgttttaattttagattattttgttaggaatatatgtttgtttttgtttgtttgttttttttattgtaggtaagtttttaggagtggggtttttgggttatagtttttagttttttaatgtattattagattgtttaataaaatgtttgttattggttcgaaatgtttttaataatttatatatatagacgtagaaagtagttattattttttttattttatgaatggataaaaggaggattaggaaattaggtagtttgtttaaggttataaaattgattgtagaattatttttgtgattttaaagttttgttatttttttagatatttgaaaatgttaagttttgggtaattttttagtaagggttgttgttattattaattattttggttattttaatagatgtaaaatgataatttaaatatgttttaatttgtattttattgtgtaaatgatttattattttgttatttatttattataattttaatatttttttttcggtgtggaagatttgtgttagatataaataatatataaattatattttatttttttgtttgtttttttttttattggttagtttttttttattgtaagattttttttgtgtttgtgtaagtaaaattgtttttttttattggtgattttttttttttttttataaatttaagagcgttgttgatttttttagaagtttaatatatttatttaattttttgtttttatgtttttgataattatatttgtaaaaatttttaattttattttattaggagttttttttaaggaaacgggaaatattttaaattatatggggaattgttaattaaatcgtgatgtttttagaataagaaaataacgcggttatgaagatttttattattatagtagtgaaattgtattgtgttgtgtgagaatttggaggttaggaaataaaaacggagagttgtggttttgcgatggcgaggatggatgtgatcgtggtggaattgcgaggttaaaaaaaaaatttattttttatagttattttaaagagaagagtaaaaaattttttaaaaaggatagtaaatatggatttttttttattgtttaataatgaaacgtgaaggcgtttgtcgtataggtggggagatcggtgatttaagggtcgttattcgaggttggttgttttttggagttttttatggttagcgttttttttttagggggattgggaggaatgtgattggttaagttggggttcgttatcgtatttggggttaggtcgtagatttgtagttttttttttttcgtttttggagaatagagggtggggttttttcggatttcgttttcgtcgaggttcgaggtttcgttttcgttcgttagttcgcgtgggtcgtttttttaggcggtggtaacggtcgtaaggttgtagtttttttcggagaagtttaggcggcgaggatgaagggttgggtcgtttttcgggaggaacgttgtagttgcggcgggaggtatcgaggttttcggaattttttcggcgggcgtttttttttttatttttttaagtattttttgggtatcgcggaagcgttaggttttgttaaggggcgttttgggtttcgatttcggttttcgaggggcggttaacgggcggggagcgcgagtttcgcggtttttaggcgttttttttcgtttcgcgttttgcggagttcgttggcggttttttcggagttttttgggcgttagcgatcgttcgttgggtcggattcgcgcggggtgtagggggcgttgagatatttcggcgttatcgatttttttaacggggtttcgttagtttttttagttttttaacgcgtagtaaagggagtttttttaatttgaaaagcgaagttaagtcgttttattcgagcggagattagcgtagtcgggtaggttcgagacgcgttacgcgttcgcggggtagttttcggtttttttttattggggtttcgatttcgttcggtcgggtatttttgcgtttgggattcgaggttcggggtttttattcggttttcgcggtttttttgttttcgttcgcgttttttttatttcgggcgtttatttgtttcggtcgtgaggagaggagaagttcgcggcgtcgcggttgttagcgattggttcggaggataggcgacgcgcggggtcgagggggagggacgcggggcggggaagggaagcggcggcgttcgcgggcggaggtcggcgcggggattaattgtcgcgcggttcggcgtatattttgtgttttcggcgggcggtcggtcgaggtttaagttaaagggtgtagcgttgttaagtagggtcgggaatgagttatcggaaaaaacgagttgagattcgtttgaatatttgtattagttgatatcgtttgcgggtgttatcgttttttgacgtggtttattgattgtaaaaattatttttaattggaaattcggtttaaagttttagtttttcgttatataatggagaaatcgagaaaatgaaaggtttaggaatgaggaagtaatttttggaattttggtaattagaaatttttaaagaggagagtaaaaaattttgtttaatttggattgagattaatatttatgaatttttatataaatttttaaattttgaggcgtagaaaggatattgattattatttgtttttttttttatttattttttattttttgttttaggtaagagatgatttaggtggtgatattaataaatgagaaaaatgcgtttcgtttaaaaattcgtgtttgtatattatttgagatattttttatgaaatagggtggtgtgtttttgcgtaggatttttgttgataattgttttattttaaaggagagcgaaggatgaagtgatagaaggataggatttagagggagggggattttataaattattatttaaattgggtatttttaaagtgaaatgggcgtaaattaggtatgttttggggaaaataggatatttagttttttagttttgggtgagaggtttaggaagtatgtaaggaaagagatttaagaatgttgatagttaggtgtagtggtttaggtttgtaattttagtatttttagaggttaaggtaggaagattgtttgagtttaggagtttgagattagagtgagtaatatagtgagattttatttttataaaaaataaaaaaaattgttgggaacggtggtatagttttgtagttttagttattggggaggttgagatgggaggattgtttgagtttaggaggtagaggttgtagtgagttttaattgtgttattgtattttagtttgggttatagggttataggttaagattttgttttattttttgtttttttataaaaaaaaaaaaaaaagttgaggttgtattgtaaatatatgtgtattaaatatttgtattttaggattaattattgttatttaagttgtaggggaggggtataaatggcgagagataggagaagttaggagaatgtatagaggagagttgttgtaaatagtgtttgggttatgtttatgtgagtgtgggtgagtatttgaaaggtttgttgggaaagggtaattaggaggtttggaaagcgtcgtttttggagggagttgatttagtgtaatagggaggattggattgtggttagttagaatgagtattaggtagcgaggttattttataatttattagtgttatgtaatgtttaggttgatatcgtatttagagttttattttttttttttagagatggtttattgggagatgaatttagcgggtagtatagtgtttttttgagttttttagaggtttagggtttgtagggaggatagagttgggtgggaggatagagttggggtggggttggaagtaggtgattagattagtttaggtaaggggttggttgtttattggtagaaggcgttttgtgaagtttggttttaagacgttaaaatttattttttttttaaaagaattgtattttttggtcgattgttttttttttattaggaaagggtttaaatggtttgggattttttggagggaaagaattagggaattaaaggggattgatttatgatttattttggttattattgatgtgttgtaaatattttataatttaggtggtttaaaataattattattttattatgttaatggattgtttaagttagggagttggataggtatagcggggatttgattttgttttattatgtttggggtgttagttgagaagattttaagtttaggggtattttgatagtcgggggttgtagttatttgaagtttatgtatttgtttgagtggtatttgggttaggaggatttgaagattagatgtgttgattgcggtgtttagttgcggtttttttgtgtggtttggtttttttatggtttggtggtttcggtttggatgaattttttatatgttggtttaggattttaagtgtgagagttttagtaaataagaagttgtaatgttattttttgtttgggtttagtagttaggtagtattatttttattgtatgttgttgacgtaatagttatatagttttattgtcgggcgcggtggtttatgtttgtaattttagtattttgggaggtcgaggtttatggattatttgaggttaggagtttaagattagtttgggtaatatggtgaaatttcgtttttattaaaaatataaaaattagttaggtatggtgatgcgtatttgtaattttagttatttaggagggtgaggtaggagaatcgtttgaattcgggaggtagaggttgtagtgagttaagatggtattattgtattttagtttgggcgatagagcgagattttgttttagaaaagaaaaaaaaaaagttatatagtttttagatttaaggatagaggatatggagtttattttttaatgggaagagtattaaagattttgttgttagttttaaaagttgttataatggggttgatggtttggtttatggatttttagaggtttttattgattttatgaattattttaagggtgggtaatttataggaagtggttatttaaatggttttgtataattttttattttaaatttatttttattgttttttttatgattataattatttatattttattataaatagtgaaagtcgtttttcggattgggtggggagtggggtgtagggtttgtttttggaggttaaattttattgtgtttgtttatagagttttattgtgttgaggtttatagtattattaagttattttttggaagtttttttttttattttttgtgttttggttgaaagtgatttgattatattatatagattttttttagtaagtaaggagaaattaaagaagttagattttaaatttatttttttataaaaggagaattattttttttattttattgagtatttagtgtgaattaaatagttatagtttttgattttagattttaaagaggatataggaagttatatagatagtgattatagggtttgatagtttatgatagatgtttgggttttaataattaaatatgataggaagtttttgaagatttaagaaggggaatgatgcgatatgatttatttttttttttttttttagatagggttttattttgttgtttaggttggagtgtcgtggggtgatttcggtttattataatttttgttttttgggtttaagttatttttttattttagttttttgagtagttgggattataggcgtgagttattatgtttggttgatttttgtatttgttttagagacgggggttttattatgttgtttaggttggttttgaatttttgagtttaagtaatttgtttatttcggttttttaaattgttgggattataggtgtgagttattatgtttagtttgatttatttttttaaaagtttattttggttgttttgtgggtatgagtagtatttggttggaggtttttgtagtgggttggggagagaaaattgtggtttggtttatagtggtaatagaggatagatttatgataatttagagatagattttttagatatattattgttaatagggtaaggagttggggaaaaggaggattcgtggatgatttaagtttttttaataaatagttgggggaatggtggagttatttttttaaatggaaaaaaatggatggcgattagattttagagggaatatttggagttttttttttttatttggatatgttgaatttgagatggttgtgtaatttttagatgggtgttgaagatatatatttagaagttgttagagtatagatgatttttagttacgggtttagatgatattattatgggagaaaatgtagttagggaagagaaaggaattaggatttcgtaatgaggaatgtttatagtttcggattagttttttttagtttttagtgtgtattatttggaagatttggttaaaatatagattgttgtttcgtttttttcggattagagatttgatttagtaggtttgggatggggtttaggaatttgtatttttaataagtgtttaggtgatgttgatgttgttgggttagagattatattttgaattagaggaagagattgaaaagggatagttagtgaaataagagggttttggaagttgagaggagggtgttttaagaaggtagagttagttattgagaggttaagttatgtgaagataggatagtgtttattggatttggtgacgtggaggtttttggggatttgaggagagtagttttaatggattaatgggggtagaagtaaattgaagagggaatggaaggtgagggagtagcgataatatttttgagttttattttgcggggagtagaggagtgggtaggagttggaggagagggtgggcgttggaaagggtgttttgaatattggaggatttttttcgggttagggtatatttaatggtatatttatatttttatagatttcgttttttttttgtttttattttgttttatttaagttggtgttgatagttgtagtaatttgaggtattatatggtatagtattttagatagaggaagaaaatagttaatttgtttgtatggtttttttttaggcgttaggaatattttt

SEQ ID NO: 1513 - DNA, 5878 bp, Artificial Sequence
  chemically treated genomic DNA (Homo sapiens)
ttacgggtaagtagaagttaattttagagatatgatagtttgatttagtaaaggtgtaaggagaggtttaggtattttgataatttgggggattttaatttgttattttttgtttttataaggttttgggttttttagaaggggtaataaatgaagaaatatatcggagttattaggagttagtgaaggtttggtatttagattataatttggattagatagaggaggtatagaggtattttttggagatttaggttgcgtatgaagttttgagttaatttaggaagttttggggatttcggaggtgaaaagaaatttttttttgaggattgattttttttagtagagttgggtaatttgttttaatttagttttgttataaagggagaagtaagtttattattcgtttggtttggagtggaggtttgtgttaattttagattcggagaggtagagattttagttgatagatgtaagtattagggatgtgttgaagtagagggtaaggttgggaggagtttagtatgttttttttttttttttttttttttttttttgagatagagttttattttgtcgtttaggttggagtgaagtggcgcgattttggtttattgtaatttttgtttttcgggtttaatagattttttttttttagttttttaagtagttgggattattggcgtatgttattacgttcggttaatttgtttgtttgttttttgagatggagtttcgttttgttaattaggttggagtgtagtggcgcgattttcgtttattgtaagttttattttttgggtttatattatttttttgttttagtttttttagtagttgggattataggtgttcgttattacgttcggttaattttttgtattttaagtagagatagggttttatttatgttagttaggatggttttgattttttgattttgtgattcgttcgtttaagttttttaaagtgttgggattataggcgtaaattattgtgttttattggtatgtttttgttttatgattgttttttggttagttatggatttttttatttttttaattttttatttttttttgtttatatgtttttttaatttagttttgagttcgtggtttgatatttaatagtatttttggttaggcgtggtggtttacgtttgtaattttagttttttgggaggtcgaggtaggcggattatttgagattaggagttcgagattagtttgatttatataatgaaatttcgtttttattaaagtataaaaattagttaggtatggtggtaggtatttgtaattttagttattcgggaggttgaggtaggagaatcgtttgattttaggaggtggaggttgtagtgagttgagattatgttattgtattttagtttgggtaatagagtaagatttttttttaaaaaaaatttaatttaatttaatttaaaaatagtatttttgttagtaatttaaatttcgttatttattttttttgtaaatttttgaatatatgtaatagttgttttttttttagtttttattagagtagttaagggaggtaggaggaggaggagcgatgagaatattggtaaatatttttatagtatgtattaggtgttaagtataagtgttttatagagggtaattcgtttaatttttttaatattatgaggtaagtattgttattattatttttatttgtggataaagaaaatggggtggttaggcgcggtggtttatgtttgtaattttagtattttgggaggtcgagataggtggattacggttaggagatcgagattattttagttaatatggtgaagtatcgtttttattaaaaatatgaaaaaattagtcgggcgtggtagtaggcgttagttattttagttatttaggaggttgaggtaggagaatggcgtgaattcgggaggcggagtttgtagtgagttgagatcgtgttattgtattttagtttgggcgatagagcgagattatgttttaaaaaaaaaaaaaggaagaaaaaagaaagaaagagagaaagaaagaaagaaagaaaatggggtgaatagaggttaagttatttagaaaatttaaagtatatagttaattaaggtgagtagttatgaatgaatttgtattatttgtttagagtttcggtttattaggggaggatgaggttagggaggatttggtttttttcgttttgggtttaagtattatttttagtaattaggggtatagtttaaaagaagtttagatttttattgtttttggggttgatattattattttggaggttaataataatagtaataataaaattagtttttatttttaggttttaagatgtgtgttttaagtattttatatgtatttatttatttttttagtttttttaataatattatgaggtagaagttatagttagttatttttttttttttgagggatatgaagggacgtagtgacgagtttaaattttataatagagtggtggattagatgggaagtgtggtagttggatgttagagttcggtttttaatttagattttttgtttatttttgtttcgtttggagttgttggtttgttttttttgttataggggaggagttttttttgtttggtagttttttatttaggtttgatttatagttttagagttttgttgtggtagttttttgttttttttttttcgaggtatgtaggtggttagcggagtttttaagtagggtgaggacgggaattttatttggaattttttaggtttagttgtagttttagtagtttttatttttagaggtttgggttttttattagtgttttgtagatagggtttgagttggttttttttaggttttgttcgttttttttgatgtagagttggttttttgtttttggagggtggggttaaattcgggatagatggggttttaggttaatagtagttggggtttagtgtttaggattgcggtaggaagtattaaggtttttttagtttttttttatatttattaagtttttcggttttatttcgggtgggattttattttttttaatttttaggagttaggggaggttaagttgttatttattcgttttgttttatttttttttttttttcgttttttatttttttggtaattaaattagatttattaaggagaaggaattggtagttgtgtagggagagattaatggttcggaaggaaggaggggtttggaaaggagacgaaggcggtagggacgtgagtagggcgttggttttggtttattttataggacgtataaagaggggagggggttgttgttttgtaatattgaggagttggttagttagggagtcgttttttttatttttagttagatatttaggtaggaatttgaaatttgtttttttagatgtatttttttgtttttaggttttatttgaggtagatttgttttataggatagcgttggagtttttagtagtagtagtagttttagttttatggtttttggtaaatttagtagattttagtaattcggtttttgtagattattcgagttgtttttgtttatttttgggtaggttgtgtttgtattttggaagttgtttgatatataaaggttagatattagttttttcgttaattttggagtaggggagggtgtggtgggatgtgtgattgtgtgtgtatgtgtgtgtatgtagtgtgtgtgcgtatagatatataaagttgtgtgtatgtatttgtttgcgtgcgtaggtttgtggatttgttttggggtttttttttttttagattgttggggatgggtattttttttttttttattttttttttatttagttttatttatttttggtatttgtaatttattaatattggaaattagtttttgttagtttatttattttttagttttggtagtcgttgttgttttttagtttttttttttttttattttaggaattattttggtttttgtaaagtttatgattgagtagtaattggtgtggggttggggggagggagaatttagtaaattaagatagaatataaaaggtttatttagtttagttcgtggtatggggtagattttttcgagtgggatttagagttgggtttagttatttttagttttttatgatgtatttattttattggggtttgttgcggggtaggtttaggtttgggggttgtgtttttaaggttgaaatattagtagataatttttgttgggtcgtttttaggggagggggaggggggttggttagtttattagtagtagagttggcgttaggtattagttttttatagggttttggggattagggagagtagtttttttttagttcgatttgtttttgcgtttttgttttttatttttttttgggtgtggtgaaggaggggtagttgatagtaggtgaaaatagagtttggtttttagggggtaagttaaggtattagttatggggtttaagttaggttaattttttttttagttggttttttttttatttttgtgttagaagtttgttttttaattttaggtttttttatttcgtaatttttagggattttagtttaagttaggtttttttattttaggttttagttttgggtgtttgttgggaggaagtgatttttattttagcggtaatagggggtaattaagtgggtagaggtttgtaattagggaagggaggggaaggcgtttttgttgtttcgtaggggtggggtatttttttttttatataatttttttttagcgggttattaggttagtgggaggagttgttcgtgttttttttgagatcgtagggttataaagtcgtttcgtagcggtttgcggtttttttttagttttcggtttagttttgcgaacggtgattgtttatttttggtcgtaatgagttattattcgtcgggttttcgggtcggttttagttttattttatatcgtcgtattttcggtttatcgtttttattatttttcggggtttttttttattcgtttagttttcgtttttttagtagtcgtttgttgggtttcgcgttttcgagtttttcggtgcgtttgggtagttttcgtagttttcgagcgggagcgggcgtttttttgcgtttgttttcggagcgtttcgatttttttatggtcgaggtttttaattaggagtttttggttacgcgtagtaacgagaagtaggagttgtaggagtttaacgatcgtttcgttaattttatcgagaaggtacgttttttggagtagtagaacgcggttttgcgcggggagttgagttaagttcggggttaggagtcggcgcgcgtcgattagttgtgttagtaggagttgcgcgagttgcggcgagagttggagttgttgggtcgcgagcgtgatcgggtgtaggtggagcgcgacgggttggcggaggatttggcggcgtttaagtagaggttagggggtagggttgggtcgttgtcgtcgaggcgaggtcgaagcggtcgtcgaggcggttgttttttttttttttcgttttttttttttattagtagtttaagggtgtggttttttttattaatttaggtgtgtgcgggtagtatttttgtttacgggttttaagtgtttttcgttatttttttgttttgagtgtttggggaggtgggagaagtgggtatttgtgttttttttgagtaatgaggaaattttttttttagtttttagttcgttagagataatgcggggtaattttattagatagttttagttttttatttagagttttgggtagtagaatagtttttaatcggattttggggggcgtgcggtttggggtgcgagttgggcggcgatttcgtagtttagtttttgtacgtttttttcgttagg

SEQ ID NO: 1514 - DNA, 5878 bp, Artificial Sequence
  chemically treated genomic DNA (Homo sapiens)
tttgacgggaagagcgtgtagaggttgaattgcggggtcgtcgtttagttcgtattttagatcgtacgttttttaggattcggttagaggttgttttgttgtttaggattttaaatggagggttgaggttgtttaatggaattgtttcgtattgtttttaacggattgggagttgaaaagggggtttttttattatttaggggaggtatagatatttattttttttatttttttaaatatttagagtaaaggggtagcggggggtatttggagttcgtgggtagggatgttgttcgtatatatttgggttggtaaggggagttatatttttgggttgttgatggagaggggaagcgaggggagggaagagtagtcgtttcgacggtcgtttcgatttcgtttcgacggtagcggtttagttttgttttttgatttttgtttgagcgtcgttaggtttttcgttagttcgtcgcgttttatttgtattcggttacgttcgcggtttaatagttttagttttcgtcgtagttcgcgtagtttttgttggtatagttggtcggcgcgcgtcggtttttggtttcgggtttggtttagtttttcgcgtagggtcgcgttttgttgttttagaaagcgtattttttcgatgaagttggcgaagcggtcgttgagtttttgtagtttttgtttttcgttgttgcgcgtggttaggaatttttggttgagggtttcggttatggagaagtcgaggcgtttcgagggtaggcgtaggagggcgttcgttttcgttcgggggttacggaagttgtttaggcgtatcgaggagttcggggacgcggagtttagtaggcggttgttggagaagcgggagttggacgagtaggagaaggtttcgggggatagtgagggcggtggatcgaaggtacggcggtatgaggtggagttgaagtcggttcggaggttcgacgggtggtggtttattgcggttaaggatgggtagttatcgttcgtagagttaggtcgggggttgggaaggagtcgtagatcgttgcgaggcggttttatagttttgcggttttagggggggtacgggtagttttttttattggtttgatggttcgttggaggggggttgtatggggagggggatgttttatttttgcggaatagtaggagcgttttttttttttttttttggttgtaggtttttatttatttgattgttttttgttgtcgttggggtgggggttatttttttttaataagtatttaaagttagaatttagggtaggaaggtttgatttgaattagagtttttgaaaattgcgaggtagaaggatttgaagttaaagggtaggtttttggtataggagtagggaggaggttagttggagggagagttgatttggtttaggttttatagttagtgttttgatttgttttttgaaggttaggttttatttttatttgttgttagttattttttttttattatatttagagaggaataggagataggggcgtagaggtagatcgggttggggaagagttattttttttaatttttagggttttgtgaagggttggtgtttggcgttagttttgttgttaatgggttgattagttttttttttttttttttgaagacggtttagtagaggttgtttgttgatgttttagttttaaagatatagtttttaaatttagatttatttcgtaataagttttaatgaggtgggtatattatagggggttgagggtggttggatttagttttggattttattcgggagggtttgttttatgttacgggttgggttaagtgggttttttgtattttgttttggtttattggattttttttttttttaattttatattaattgttgtttagttatgggttttataggaattagagtgatttttgaggtaggaaggggagggggttgaggggtaatagcggttgttaaggttgagagatggatggattggtaggagttggtttttagtattgatgagttgtaggtattagggatgggtggggttggatggggaagagatggggaaagagaaagtgtttatttttagtagtttgaaagagagaaggttttagaataggtttataaatttgcgtacgtaaatagatgtatatatatagttttgtatatttatgcgtatatatattatatatatatatatatatatataattatatattttattatatttttttttattttagagttagcgagaaggttgatatttggtttttgtatgttaaatagtttttagaatgtaagtataatttgtttaggagtggatagaggtagttcggatggtttgtaggagtcgggttgttgaggtttgttgggtttgttaggaattatagggttggggttgttgttgttgttggggattttagcgttgttttgtgagataggtttgttttagatgggatttgaggataagagagtgtatttggggaagtaggttttaggtttttgtttggatatttggttgggggtaaggagggcggttttttggttggttagttttttagtattgtagggtagtagtttttttttttttttgtgcgttttgtgagatgggttagggttaacgttttgtttacgtttttatcgttttcgttttttttttaggttttttttttttttcgggttattagtttttttttgtatagttgttagttttttttttttgatgggtttggtttggttgttaggggagtgggaagcgggaggaagggagagatgggataggacgaataaatgatagtttggttttttttaatttttgggaattgggaggggtagggttttattcgggatagggtcgggaggtttggtgggtgtgaggaggggttagggaagttttggtgttttttgtcgtagttttgggtattgagttttagttgttgttggtttggagttttatttatttcggatttggttttattttttaggagtagggagttagttttgtattaggagaggcgggtaaggtttggggaggattagtttaggttttgtttatagggtattagtgggggatttaagtttttgagagtagaggttgttggggttgtagttgggtttggggagttttagatggagttttcgtttttattttgtttaagggtttcgttggttatttatatgtttcggaggagaagggatagagggttgttatagtagggttttggagttgtggattaggtttgggtggggaattgttaggtagaagaggttttttttttatagtagaaggagtaggttagtaattttaggcggagtaaaggtaggtaaagagtttgggttaagagtcgggttttggtatttagttgttatattttttatttgatttattattttgttgtagaatttaggttcgttattacgtttttttatgttttttaagaaaagggagataattaattgtagtttttattttatagtgttgttgggaggattaaaggaataaataaatatatgtgaagtgtttaggatatatattttaaagtttgaaaatggaagttggttttattattgttattattattaatttttagagtgataatgttagttttaagagtagtgagagtttgggttttttttggattgtgtttttggttgttgaaagtagtgtttggatttaaggcggaagaagttaagttttttttggttttatttttttttggtggatcgggattttgggtagatggtgtaggtttatttatggttgtttattttaattagttgtgtgttttgggttttttgagtgatttaatttttgtttattttatttttttttttttttttttttttttttttttttttttttttttttttttttttttttgagatatagtttcgttttgtcgtttaggttggagtgtagtggtacgattttagtttattgtaagtttcgtttttcgggtttacgttatttttttgttttagttttttgagtagttgggatgattggcgtttgttattacgttcggttaatttttttatatttttggtagagacggtgttttattatgttagttaggatggtttcgattttttgatcgtgatttatttgtttcggttttttaaagtgttgggattataggtataagttatcgcgtttggttattttattttttttatttataaatgggaatgataataatagtatttattttatggtgttgggaggattaaacgagttattttttgtaaagtatttgtgtttggtatttagtatatgttgtagaagtatttgttagtatttttatcgttttttttttttttgttttttttggttgttttgatgaaggttggaagagaaataattattgtatgtgtttaggggtttgtagggaaggtgagtaacgaagtttaggttattggtaagagtgttatttttaaattaaattaaattaaattttttttgagagagagttttgttttgttgtttaggttggagtgtagtggtatgattttagtttattgtaatttttattttttgggattaagcgatttttttgttttagtttttcgagtagttgggattataggtatttgttattatgtttggttaatttttgtattttagtagagacggggttttattatgtaggttaagttggtttcgaatttttgattttaaatggttcgtttgtttcggttttttaaagagttgggattataggcgtgagttattacgtttggttaagagtgttattaaatgttaggttacgggtttaaagttggattaggagggtatgtaggtaagagagagtgggagattgggagagtaaagagatttatggttggttaaagaatagttatagaataaagatatgttagtggagtatagtggtttacgtttgtaattttagtattttgggaggtttaagcgggcggattataaggttaggagattaagattattttggttaatatgggtgaaattttgtttttatttaaaatataaaaaattagtcgggcgtggtggcgggtatttgtagttttagttattggagaggttgaggtaggagaatggtgtgaatttaggaggtggagtttgtagtgagcggagatcgcgttattgtattttagtttggttgatagagcgagattttattttaaaaaataaataaataaattagtcgggcgtggtagtatacgttagtaattttagttatttgggaggttgaggaaggagaatttattgaattcgggaggtagaggttgtagtgagttaagatcgcgttattttattttagtttgggcgatagagtgagattttgttttaaaaaaaaaaaaaaaaaaaaaaaaaaaagatatgttaagttttttttagttttattttttgttttagtatatttttaatatttgtatttgttagttggggtttttgttttttcgggtttaggattgatataaatttttattttaggttaggcgaatgatgaatttatttttttttttgtggtaaagttagattggggtaagttgtttagttttgttaggaagagttagtttttagggggaagtttttttttattttcgggatttttagggttttttgggttgatttaggattttatacgtagtttggatttttaggaagtgtttttgtgttttttttgtttggtttaggttgtggtttgggtgttagatttttattagtttttggtaatttcgatgtatttttttatttgttgttttttttgagaggtttaaaattttatggaaatagaagatgataaattagaattttttaagttgttagggtatttgggtttttttttgtatttttgttaaattaggttattatatttttagaattggtttttatttgttcgtgg

SEQ ID NO: 1515 - DNA, 6073 bp, Artificial Sequence
  chemically treated genomic DNA (Homo sapiens)
aaatataaaataagtagaaaaatgtttatttaaaaatttaagataaaatattgtgtgagaaataggttacggggttgtttttttttaggttatatagtttttttattttatgtgtttatatggatcgtgagatgtgaaagtttgtagggcgtgtgttcgggatcgaggttggtattgtttatttgtgggtttagattaaatggtaaagaggtagaaagttataattttgtttatcgttacggtttagggttttttttttatagaggttttaaagagtttttattttagtttttatataaaatatttttttttggttgaataatagttaggttggagtgtcgtggtatgatttttgtttattataatttttatttttcgggtttaagtgatttagttttttaagtatacgggattataggtgtatgttattatgttaagttaatttttttttttttttttgtatttttattagagatagggatttacgatgttggttagtgtggttttgaatttttgattttaagtgatttagagtgttaggattataggtgtgagttatagtttttggtttaggttttattttttaaaaaataattttaaattttattttagatttatggggtatatgtgtaggtttgttatatgggtatattgtgtgatgttgaggtttggggtataaatgatttttttatttaggaattgagtatagtatttaataggtatttttttagttttttttatatttttttttttttttttttagtagttgtagtgtttattttttttatttttatatttatttttatttaatgtttagtttcgatttatatatgagaacgtgatatttggttttttgtttttatgttaatttgtttaggattatggtttttagttttatttatgttgttgtaaaggatatgattttattttttttatggttgtatagtattttatggtgtatatgtattatattttttttatttagtttatcgttgatggttatttaggttgattttatggttttgttattgtgaatagtgttgtgatggatatgtaagagtatgagtttttttggtagaataattatttttttttaggtaaatgtttaataaagtaagtgttgggtggaaagatagttttgttttaaattgttttagaaatttttaaacggttttttatattaatttttttatgaattgatttatattttggttaatagtgtataagtattttttttttattgtagttttatgagtattttttattttgtggatattttaataataattatattgtagttaagtttttttaagtttaatgtggggaatagttataaatatttttttttttaacgagaatttttgtttgtttattggtagaatttttgtttttagttgttttttattgtttgttttttaaagaaaaattaaaggtaaagtggtatgattttttatacgtgaattagtttgtagttattagagtttgttgggaaggggttttttacgtatgtattgattttgttatgtggaatttgagagatttagaagttttatagtaatttattatataattgtttattagcgtttatttttttataggattagtttaattttggttttgtagatattggtagttacgggtgagaaattttgggtttttgtgggttttttttattatttagggttatagtgggttgtttgttttaggtagagatatagtaatatttttttaagttgaaattaagtataaatttattttattaataattatttgagggtatagtttttgtttttttttttggggattttaaaatatatatttttttgattaaataggtaggtgagatttgattttaaaggggggaaagtgggatgaattggggtattaggaatgaattttaagtgtttttgtgtggcgaatggtatttatattttaaaatatatttggagatggggaaaaaagtaggagaggagaagggtaaaaaaggaggataaagtgtttgaaagttattgaaagttttttttatggttttttttggttttggttgttttgttaaggttttgagtgtaggtagggttggttttggttgggagttgttgttttggaatatggaagagttattttatttttagaaagtttatttgtttatttgtaaagtgggtaattttataggtggttgtgatgataaaatgaaaaaaaagtttttaatttatatgagtgatatgttgtatagtaagttatatgttatataggaagtatatagaaatgatttattgttatgataatggaaggatagtggtttggtatgttaagtattaaatataagttagaaagatattttagagaagtagataaagaaatttatagtttagaatgaatagtattaagaatgatatgttttttaaattgagtatgggtagttggatttgaatttattttatatatttgagtttatagtatgaggtaatagtttttatttatagttattttttttgtttgtaaggttatttttttttgaagaaagttgattttagattatattgtgatcgtttaaggaagagtataaaatattggagaaggttagtttttaagttttagatatagaaaatttttaatttttgggtgttattttttagaaaaagagttagagttataagttttgatttaaaaatttttttttttaaaaaaattttttattttttattaaggtttatttttttgtttagtgtatattggtgtttatagttgttagagtaagagtttttttttattttttaaggtaggagttttgtgaagattttatgataaggggataaaatgaaataatatgtttagcgataatatagtaaaattttatattattaatgttttaaaatttagttattttaggtttggttagttatttatgagtagagaggtgtgttatttatatggtagttatggtttggatgggtttggaattgtggtaaggtaaggttttgagaaaaggtgttaggagaaagatgaatttaattatttatttttgttaggaagaaaagtattaggaaggaattagatgtatagtttgttttttggggatttttgttttgatttttaataaatttttttttagatgttacgtgtagtaatttttatattttataatgttttttatggtttttgttggttttatggttagttttgttaagatttgtatttttgggtaagatagaatttttttgaattttagtttttttttttataaatggaaataattttgttttatataagttattattagtacgttggtgggaagttaaattgcgaaatttagtataaataaagagtaatgtattattgttgtttacgtgaaaattttcgtgaagtagttaggtattatgtattatttaagtatagtagcgttaggtattagtttattagtgattagagagggtatcggggagagagggggttttagagtagtgggttttttggttgtggggaagttgttttagtggttatgttaggagttgaatttgaaggtattttgtgtgtttttttaatattatggattttattttggtatttttttttagttatttttggtttttatttgttttttttttttagttttttggttatgttcgatttttttagtaagtttttgagttttttttattttgtttattgtttttagaatatttttgttttttttattttttaaagaatttaaatttgaattttgtttatttttgtttattattaatattagtttagagttgatgagaagggaaagtatttttataaggaagttttttttttttttatattattagatttgagcgtagatagtatttttatttttatattgttttggttaggttatgttttagttaattatacgattgtattttagtatttttggtagggtttaaattaggatattttttagaaagatttatttagtattgagttaagtataattttattatatttaaaatagaaaattttagatttatttttttatatttttgttattgaatttaatatgttatttatttattatgtgtttaaatttttatttattgttgatttttagattaaattataatttagatttattatggtttaaattttgatatgtgattaggggtatgttattttggtttaggttgttagttttaagtaggtgggttagttttaattattttgagtgtaggttgtaagggtaattatgaggttgtataaaaagaatttatgataggatgtatatgagagataaatgtttttatattgaagaaggggaggagtgcgttattggttttttattttttagatgtattgagtaagtttttatttaatttgtgttttttttttttttttatttttatgtcgtggtaggagggagagttatttttaagtttagtattttatggaatgttgagttttttttttttttattttttaatgttggaatttttattttttaaagttttggatttgatttttttattgagtgattggagagaagtatttttatatttataggaataagttttagttagataagattttgttttttttttgggagttttaggatattaaaaagttaagtttgttattaatatttgtttttttttaagtatattaaatataattttaatagtaaaatatatttttaaatagttaggttattttttttttttttaatttttattttttcggtttaagaaagtttagttgtgtgatttggggtttggttttttttgttttttttatattagtatttttttaggaaatagtcggtttttttttttgtttttagaaggtaagtttttttattatttgtgaattataaatttatagagtggttaaatatattgatgtaagattataggaaggggaaagttgtaggtgtgtttgtgttgggaggagtagtgatttttattttatagatattttttttttttattttcgggaggtataaagacgggttttttattagtaattaggtatattttattattatgaatttatttttgatttttatttttgttgtagttgttggtgagttttacgttttgttttaggttttaattaatttttttttggtagatatatgttttgttatttttgttatttttttttttttgattgtgttgtgatattttattttttttatttggtattttttttttttattttttttgggttttttttaagttttatttgttttattttttttttgattttatttttatcgttgttatttatttatattcgagttgtggttggagaagttgggaagggagattaggtggggttggtttatgaaatgaagtagtaggttttaggtttggttttgatagtattataatagtattattatagttgtttttaatttcgaatgtatttggggaggttgaaattatttatgtaagatatttaattttagaaatttttattttaattgtttggtgtgtagtttgtgttttgggtttttaagttttttaggtgatttttaatatttttaggtatgtagttaaggttaagaattgttgttgttttgattaataataacgtatatttttgttttgtaaaagtgagtttggggttttttttaattttgtttttattgggtagatttgagttgagggggaaattggttatggttaagtcgatgtcgttagggggtttttttagtttggttaaagtagttagataattcggggtttaaataattaggtggagtatataggtggtgaataaaagagagaagattttagtgtttgagatagttatattttaaattttattttattggaagtattgtgaggatattttttgcgtttttagtttggtgattttaggagagatttgaatttttatagggtatttagttacgtgttttgtagatatagagatttgggagttatatttagtgatgattattagggttggtagcgtttttttttttgtttagttttattgagtttgttaaggttttttaattagtaggaagtagttataggttgggagcgttatttttaatatgttattgatttgttttttttttttttatttttattttagt

SEQ ID NO: 1516 - DNA, 6073 bp, Artificial Sequence
  chemically treated genomic DNA (Homo sapiens)
attggagtggagatgggaagggagaaggtaagttagtagtatgttaggggtggcgtttttagtttgtggttgttttttgttaattagaaaattttaataagtttagtgaggttaggtaagggggggagcgttgttagttttggtgattattattggatgtggtttttaagtttttgtgtttgtagggtacgtagttaggtattttgtgggggtttagattttttttggggttattaggttgaggacgtaaggaatatttttataatatttttagtgggataggatttgggatgtggttgttttaagtattgaagtttttttttttttatttattatttgtgtattttatttggttatttaagtttcggattgtttggttattttggttaagttaggaaaattttttggcgatatcgatttggttatgattagttttttttttagtttaaatttgtttagtgagggtagagttgagggaagttttaggtttatttttgtagaataaaggtatacgttattattggttaaaataatagtaatttttaattttggttgtatgtttagaaatgttaaaaattatttgggaagtttaaaagtttagaatataggttgtatattagataattgaagtgagaatttttagagttgagtgttttgtatgagtaattttaatttttttaggtgtattcgaggttaagagtagttatagtggtgttattgtggtgttgttagagttaagtttgaagtttattgttttattttatgggttagttttatttggtttttttttttagtttttttaattatagttcggatatggatgaataatagcggtgggagtgaaattaaggagaaggtggaataagtgaggtttaaaaagagtttaaggaggatgggaagaagaaatgttagatggaggaaatagaatattatagtatagttaaaagaggagaggtggtaagaatggtagggtatgtgtttgttagggaagggttggttgaggtttgaggtagggcgtgaaatttattagtagttgtaataaaggtaaggattagaagtagatttatggtggtagagtgtgtttgattgttggtggagaattcgtttttatatttttcgaggatggggagaggaggtgtttgtgaggtgagggttattgttttttttagtataaatatatttgtagtttttttttttttatggttttgtattagtatgtttggttattttgtgggtttgtgatttataggtgataaggaaatttgttttttgagagtagagagggagatcggttgttttttggaaggatgttgatatgggaaagataggggaagttaagttttagattatatagttgggtttttttaggtcgaggagatgagggttagaaggagggagaatggtttggttgtttaggaatatattttattattggggttatatttaatgtatttaaggaagggtaagtgttggtagtaagtttggttttttagtgttttggagtttttaggagaggagtaaagttttatttaattaaggtttgtttttgtgaatatgaagatgtttttttttagttatttagtgggaaagttaaatttaaggttttggggaatgagaattttaatattaaggggtaaggagaagagagatttagtattttataggatgttgggtttgaagatggtttttttttttattacggtatagggatgagaagaaggagggggtataggttaggtaggagtttatttagtgtatttggaggatggaaaattaatggcgtatttttttttttttttaatgtgaagatatttgttttttatgtgtattttgttataggttttttttatgtagttttatggttgtttttgtaatttgtatttagggtgattgaaattgatttatttgtttggggttgatagtttgaattagaatgatatgtttttgattatatgttagagtttggattatggtaaatttgggttatgatttgatttgagaattagtagtaggtagggatttgagtatatggtaaatgggtgatatattgggtttaataataaagatgtggaggggtgggtttagaattttttattttagatgtagtgagattatatttggtttagtattaagtgaatttttttagagaatattttgatttgagttttattaagggtattaagatatagtcgtgtaattgattgaggtataatttggttagagtagtgtggagatggagatgttgtttgcgtttaggtttaataatgtaaggaaaggaggggtttttttatgagggtgttttttttttttattaattttgagttaatgttggtgatgggtaggagtgagtagagtttaagtttgaattttttgaaaggtaaaagaagtagggatgttttggagatagtgagtaaaatgagaaaagtttagaaatttgttggagaaatcggatatggttagggggttagagggaggaagtaaatggaaattagaggtaattggaaaaaaatattaaaatagggtttatggtgttgagaggatatatagagtatttttaggtttagtttttggtatggttattgaggtagtttttttatagttaggagatttattgttttgaggtttttttttttttcggtattttttttaattattaataggttgatatttaacgttgttatgtttagatggtgtatggtgtttgattgttttacgggagtttttacgtaagtaatagtggtatattgttttttgtttatgttgagtttcgtagtttaattttttattaacgtgttaatggtgatttgtgtggagtaaaattatttttatttatagaggaagagattgagatttagaaggattttgttttgtttaagaatatagattttggtagagttgattataaggttaatagaagttatggagagtattgtgaagtgtgggaattgttgtacgtggtatttaaaaggagatttattgaggattaaggtagaggtttttagaggataaattgtatatttgatttttttttggtgtttttttttttggtagaaatagatgattgaatttattttttttttggtatttttttttagagttttattttgttatagttttagatttatttaggttatgattgttatgtagatgatatatttttttgtttatgaataattggttaagtttgaggtagttaggttttagagtattgataatatggggttttgttgtgttgtcgttgaatatgttattttattttgtttttttgttatggggtttttatagaatttttgttttagaggataaggagagatttttgttttagtaattatagatattagtgtgtattaaatagggaggtgaattttggtagaagatggagaatttttttggaaaaagggatttttggattagggtttgtagttttgattttttttttgaaaggtaatatttaagaattgaggattttttgtatttagagtttgaagattagttttttttagtattttgtgtttttttttaagcgattatagtatagtttgaggttagttttttttaaaaaggaatgattttataggtagaggagatagttataggtgaagattgttattttatattgtagatttagatgtgtaggataggtttagatttagttatttatgtttaatttgggggatatgttatttttggtattgtttattttgaattatagatttttttgtttatttttttaagatatttttttggtttgtgtttagtgtttaatatgttaaattattgtttttttattattataatagtgaattatttttgtgtgttttttatatagtatgtaatttattatatagtatgttatttatataagttaagaattttttttttattttattattataattatttatggaattgtttattttatagatgagtaaatgagttttttgaaggtgaagtgatttttttatgttttagagtagtagtttttagttagagttagttttgtttgtatttaagattttggtaaagtaattagagttagaaagaattatgagagaagtttttaatgatttttagatattttgttttttttttttatttttttttttttttgtttttttttttatttttaagtatattttgggatgtggatgttattcgttatataaaaatatttgggatttatttttgatattttaatttattttatttttttttttttaaagttagattttatttatttgtttggttagagagatgtgtgttttaaaatttttaaggaaggaggtagggattgtgtttttagatgattattggtgaagtgggtttatgtttaattttagtttaagagaatgttgttgtgtttttgtttaggataggtagtttattgtggttttgggtgatgaaggaagtttatagaggtttagggttttttattcgtggttgttagtgtttgtagagttagaattgagttaattttgtgaaaggatgagcgttgataggtagttgtatggtaggttgttgtggggtttttagattttttaaattttatatgataagattaatgtatgcgtgaggggtttttttttagtaggttttggtggttataaattggtttacgtgtggaagattatattattttatttttggtttttttttgaaaagtaaataatgaaagatagttgaaaataagaattttattagtgggtaggtaagaattttcgttgggaaaagggatgtttgtggttgttttttatattgggtttgaaagagtttggttgtagtgtggttattattaaaatgtttatagaatagaagatgtttatgaggttgtagtggaaagggaatgtttgtatattgttggttagagtgtaaattagtttatggaaaaattaatgtagaaaatcgtttggagatttttgaaataatttaaaatagaattatttttttatttagtatttgttttattgggtatttatttaaaggaaagtaattgttttgttaaaaagatttatgtttttgtatgtttattatagtattatttatagtagtaaagttatggaattaatttaggtggttattagcggtagattggataaagaaaatgtggtatatatatattatggaatattatgtagttatgaaaagaatgaaattatgttttttgtagtaatatggatggagttggagattataattttaagtaaattaatatgggaatagaaaattaaatattacgtttttatgtataagtcggagttgagtattgggtaaaaatggatgtaaagatgggaagagtagatattgtaattattagagggaagagagaaggagtgtggaaagggttgaaaaaatatttattgggtattgtgtttagtttttgagtgaggagattatttgtgttttaaattttagtattatatagtatatttatgtaataaatttgtatatgtattttatgaatttaaaataaaatttgaaattattttttaaaaaatggggtttgggttagaagttgtggtttatatttgtaattttagtattttggattatttgaggttaggagtttaaaattatattggttaatatcgtaaatttttgtttttaataaaaatataaaaaagaaaaaaaaaattagtttggtatggtggtatgtatttgtaatttcgtgtatttgggagattgaattatttgaattcgggaggtggaggttgtagtgagtagagattatgttacggtattttagtttggttgttgtttagttagaaggagatgttttgtgtgaaggttgaggtgggggttttttggagtttttgtgagaaggaggttttaagtcgtggcggtggatagagttatagttttttgtttttttgttatttggtttggatttataggtgaatagtattagtttcgatttcgagtatacgttttgtagatttttatattttacggtttatgtgagtatatggaatgggaaagttgtgtggtttgagaaaaggtaatttcgtggtttgttttttatatagtattttgttttagatttttgaataagtatttttttgtttgttttgtgttt

SEQ ID NO: 1517 - DNA, 10328 bp, Artificial Sequence
  chemically treated genomic DNA (Homo sapiens)
aaaatttaaaatataaagaatttgttaattagattttagaataatatgttaaaattatatagaaagttaaagaaataattattagttttggagaaaagtaaatgtgtattttttaagtttatattaatttggaattattaattttaggagtgtttattgattatggtattggtatttttggagaaaaaagaagtttttgaaatgtttagaagtatttttgacgaagaatatatatttttttattttatattagtttttaaaaatgtaattgtattagagatatttatttgattataatttagttatataaaattatttaaaggtgaaagttgtttgggtttttttattttgtgttgaatagtgaatgaaattttatagaagtgtttatggttttaatttttaggaattttgtaatttttattgttattttatatagttagagtataaaattatttatttgtgaataaatgaatattatatgttgtgtatatggtttgtttgtttttataatattattaagagtttattagatttttaatttttttttttgttttatttttatttttttatttgttttaggtaaaaataattataatttatttttaggagttttaaaaattaaagtattggttatatttattttatatttaattatttttaagtttttttttattttattatttatttaattagaatatgttatttttattattaaaatggtatataataatttatttattgaaattttttttaagttagtgattttttttatttagagttgtatattttttttatttgttattttaaatatgtatttatttgtttttattttatataaagcgttttattttatacggttaaatgttttaagtatatgtttaaaataattattttatttttttatgggtatttagtgatttggttaatggggatatttttgtaatttttatattttttataatagaaaagtttttttaagtttagtttggataacgaagtgagattttatttttataaaaagaaaaaagcgggggaagagaaaattatttgggtatgatggtatatatttttagttttatatatttaggaggttgaggtgggaggattgtttgagtttaggaagtagagttagtagtaaattaagattatgttattgtattttattttgggtgatagaatgagattgttttaaaaaaaaaaaaaaaaaagaaaagaaaaaaagaaaaagaaagtttagtatataaagttttttttaattttaataattatttggtaagatgaaaattattaataatattatagagattttaattttatgttttttttttaatttttgatttatttttttaaaaatgtagaatattaatttatatgttttatttttttaattgtgttaaagtttatgtggtttattaatgtattttaaatattttaatagaagtaatgtaatataaatatattttgttgttttatttttatattaattaattttttttttgtttagaagtaattattatacggattttttatttatcgttttcgggtatatttttatttatagaattgtattattaaataaatgatttttttttttattttaggttgtgtaatattatatataattttttaaatttgtttttttgtatataattttgttttattatttttagtttagtatatataattttagtttatgtattttaaatttgtgtataatattttattttataaatataatatattttatttttttatttttttattgatgaatatttaagttttttttatattttgtagggtttataattttattataattgtattataatgaatgttattttattgtttatttgttttagatttaattggaaagagaatttggaggttagattgtatgtgtgtatttagtttttttagatattaattaaattgttatttaatttgattatttgaatttttatttagataagcgatgaatgatattattaagtattgttaaggtttttaatttttgtttatatgtttaaggttagttttttatttttattagaattttataattattattaatattgattatttatagatatttgtgtgtttttgtttttttttttttttgtttggttttgttttttttgttaattgtttgttatttgttttttatttgttagttaatagaaaatttttttaatttttgaagagtgttttttatttgtaagttatagtagttattgtaaggattttatatttataggtttttttatttatttttgtatattgaagttagtttttttggatgttttatttatatagagtaattcgaagtgttagatttgacgttttagaagttaattttaattaatgagtatggttttttggtaaatgaatattttattttatttttttttaagtgggatagttttgatacgcgtttttattgttttacgtaggttttaagtagatttatgttttagatgtttatgatggtaattggtttgattatatttagtttttattggttttattattttttatttttttattttttagttttttttatggaggttttttggattgtttttaaaataaatgtaagtattttatattaaaatttttgttttagtttaattttgttatagttgaatgaaaatatatgtagtttgaaaaaaattataaagaaaaaaatataagtttgtggtttagggttttattttttagatatattttgttttaaaaaaagaaaagttagtgttattattggttaaatttattaatgttttttatgatttttttttttatttttgaatttttttttaaaaatttttttaatattttattattagaaagatatttttttatatttttttttaaaattttttcgtgttttttatatatgtttaatttatttggaatttatgtttttttacggtgtgagatgaagatttgaagttttttatgtgaagatggagaataaattaatgcggcgttatgtattgaagagttatttttttttaatttattattaatgttttacgttttttatatatgaagtttttatatgtaaattatatttatgggtatttaatttcgttgagatagttttttttgttgggattgatataatattttttttatattatagttttgtaacgagttttgttatttgatagggtaagttttgttttattttaataattttttaaaaaattttaagatatgtgatttgattttttatatttatttgtttgtttaattttagtttgttttttataaattattgttttttttaaaaaagttatttttttatttatttgtttgatattaaatataattatttaaaatattatttgaggagaatttgtgatcgaaagtgaaagttttgtttttgaaattaaatgtattattttgggtttttaatttaatattttatttattaatttatgttatgtttgaagtagatatgtgaatttattgttttttgttttttttttataaagttaaaagaaatgtaatttaaagcgttatatgatattttaaaaagggtttgtttttgtattagttatataaagaaaatagttattgtgtttttattttggttttttaaatttaagaggcgttttttgtaggttttaattttattagagggtttggtttattgtaattgttttttagaatataaataaaataaattttttttaagtttataagtggtgtttttgattttatatatatattttatatatatatttaagttaattagttaaaaatataaatatttttaatgaaatatatttgtttatttataattttatttttattagtaaaaatttttgagtttgggggtaataggtaattttttttttttatgggtaaagaagaagaaaagtagttattgtttattttagtttattataatatgttataattttagtgtgttaggggtttttaatttaaaatttttttattttttgttagttttatttattagaataaaagttatattggtttattttagaatagattcggttttatttagttttaatttttgtgttttaaagtttttgaatttattattatttatggtgtgaataattttaatgttaaatcgtaatttaattattagaaaatgattttgatttttttataaagtatatatttataattataattatgattattttaatttgtttttttgttttaattggtatatttaaagagataaagtttagggtaagtgagtaatgttttttttatttagattatttttttagaatagaaatatatattttattttttttatgataggtattattatttattaataattgtataaggttataaagagtagttatagaacgttttgtttaagtgtatttttttttatgtaatattgttttatattgtataattttatttgggtgatataataaagtttgtaatatttttgattgtttttataaggaatatatgtatatgtatatgtatatagagagagtatatatatgttaggttttatatatatttgtatttaaaagttatttttagaaggtttatattaatatataagagaagtgttttaagaattatttgagttagagggtagaaggttgatttgttaggaattttttttatgaatattagatgtatgtgtttagtgattaatttgtttgttatgaattttatattttttttaatagtttttaaaatgataaaatgttttttgtttataatatgaatttaatttgatttattttggtaaatggtttgtttaggtagttaatatttataattttaggtatttttatttatttatatttttttaaagattaattatttttttaatgatatttaatgtatagagatataattttgttaaagagatatatataatttatttatattgattggtatgtatgtagataggtggttgttgttttatatatttttaaaaatttgagagatttttttttttagttggtagaattatttatatttttttttagtttttaaattagtaagtttttaaaattaaaaatggggtcgaaaagaggtatattttttaggtattatttttttagtttttatgaaattatgtttgtagttttttttgttatattggtagtgttttgtgttggattaattgtagtattttgtttgataattaaggaattttaacgaggtaagttatatggagttggttcgtgaaggtgtttttagttgaatgtatatattttagtgttagttattttgtaagtttattttatttattgttaattaaatgtattattttgggtttttaatttaatattttaaattaatttttatgataaaatatttatgttgtttttatgtatttttttgtagttttttttagagaatattaggaaaattaattggtatgtaatttgaaatttaatgtagaatttaagtatgagattgagtagtttttaaaataaataatgttaaataagtattttggttttaatatataattaagtagattttatggtttttgattttgttttgatataatttaaattataaatatattaatatgttgttgaatatgtaagtagataaatatgtaaagttaatagaaaatattgtttatttttatttttatttttttattagtttaattattttaattttattaatataaaataatttggatataaatgtagatttaaaaaggttataaattgagtagtaatttcgataaatagaaaaagtataagaaatgataatttttagttagagttaattttgtattaatagtttttaaaatatttttaaatgtattgtgtagttataatatatgaaagtttattggtatgttcgttttatagatgagggatttgagatagagattagaagtaatttgtttaagtttatattattagtgggtagtagaagtaagattttaaattagataatttcgttttggaatttatagtttattttattatttatttatttatagggtaaatttaaaaaattgaaagtatagtaataatttacgtattaatagtttatttttttttaaaaataattttttatatttttaaaatgatgaattttatatatatatatgtgtatataaatttttttttttttttttttttttttgagatagagtttcgttttgtcgttaggttggagtgtagtggtacgatttcggtttattgtaatttttattttttgggtttaagtgatttttttgttttagttttgttagtagttgggattataggtgcgcgttattacgtttagttaatttttgtatttttagtagcggtggggttttattatgttggttaggatggttttagttttttgatttcgtatttgtttatttcggtttttttaaatgttgggattataggtatgagttatcgtatttttttattgtgagtgattttagttttatttattaaatttataattgttgggttagttattttattttagtaaataagtaagtttaaattagaatgtaatgtatatgttatagttttattaaataattttagtataatttttggtttatttaaaaattatagatatatatacgggttatattttaaagggaaagaaagtgtggatattttataaaattatataaagtattaaaatataatatagattgaattaaatttttagaaaaatggttgttttggttttatttaattgttgtgaataatttgaaggatttataagtatttgaaagtttattggaatttttgttgtttaataaatatataaaggttagttattttataagtgaaagagaaaataaatatttataagtgataatattgtttaatagtgaatagttaaatataaaaagggattcgagttaatgttttattaatatattagagattataatgtatattgttatttttttttttttaaattattattttagatttagggggtatatgtgtaggtttgttatttgggtatattgtatatattgaggtttggggtatgaatgattttattatttaggtattgagtatagtatttagaagttagtttgttaatttttgttttttttttattttttttttttggtagtttttagtgtttattgttgttatttttatgtttacgagtgtttgttgtttagtttttatttatgtttgagaatatgtggtatttgttttttttgtttttgtattaatttgtttagtataatggtttttagttgtatttatgttgttgtaaaggatatgagtttatttttttttatggttgtattttattttataatgtatatgtattatattttttttatttagtatatcgttgatgggtatttaggttgagtttataattttgttattgtaaattgtgttgtgatgaatatgtgagtgcgtgtgtttgtttggtagaatgatttattttttttttgatatatatttagtaatgggattgttgggttaaatggtatttttgttttaggttttttgagaaatagttaaattgttttgtatagtggttgaattaatttatatttttattaacggtgtataagtatttttgtttttttgtagttttgttaatatttgttgtttttcgattttttggtaatagttatttcgattagtatgagatggtattttattgtggttttgatttatatttttttggtgattagtggtgatgagtattttttaaaatatttgttagttatttgtatgtttttttttgataagtgtttgtttatgttttttgtttagtttttaatgggtttatttgttttttgtttgtgtaattatttaagatttttatagattcgggatattagattttgttagatgtatcgtttgtaagtatttttttttattttataggttgtatgttgatttttttgatagtttattttgtagtgtagaagatttttagtttaattaggttttatttgttaatttttggtttcgttgtaattgtttttgaggatttagttttaaattttttgttaagtataatttttagaatgatgtttttttttttttttttaggattgttatagtttgaggttttaatttaaatttttaatttattttgcgttaatttttgtatatggtgaaaggtagggatttagttttatttttttgtatatggttagttagatatattagtattgtttattaattagtaagttttttttttattgtttattttttgttaattttgttaaagattagatggttgtagatgtgtagttttattttattgtgggttttttattttgttttattggattatgtatttgtatttgtattattattatgttgttttagttattatagttttatagtatagtatgaagttgcgtaatgtgatgtttttgattttgtttttttagtttaggattgttttgattattttggtttttttttagttttatatgaatttttgaattattttttatgattttatgaaaaatgagtttgatagtttaataggaatagtattgaatttgtaggttgttttgggtagtatggttattttaataatattgatttttttaatttattagtatggaattatttttatttgtttgtgttatttgatttttatagtagtgttttgtagttatttttgtaggttttttttatatttttggtgagagatatttttaagtattttattttttgtatggttattgataatgggattaaatttttgatttggtttttagtttgaatgtatttagcgtatagaaatgtaattgatattgtatatttattttgtattttgaaattttgttgaagttatttattagttttaggagtttttttgtagagtttttagggtttttaaagtatatattatttttaatattttttatattttttttgattttattttagatttattaaaagttgtaaaaattgtatagagtttttatataatttagtttttttggatgttaatatttcgtttatttatagtataattgttataattaaaaaattaatatttttatagtattgttaattgaattatatattttatttaaattttattagtttttttattaatgttttttattagtttaagatttaatgtagatttttatataagatttagttattacgtttttttagttttttttaatttgttgtagttttttagtttttttttgtattttatatttaaatatgtaaattttaatgtaattttgagtatttaaaatataaatgaaatagtataaataatatgttatattaattatgtaattaaagttatttagattatatgtatatatattgtttgaattattatttttaattatttttttaatgggatagtttggtgttaatgtattatatagagattttgggttgtagagttagttattttaatgattaaattttagatttgttgtttaagatttttattattttgagaaatttttttaatcgttttaaattttaattattttattttagaaaagaagaaattacgttttttcgtattagattattgtgagaattatatgttattattattatatttattaatgagtttattattgtgagttttagttgaagtaatttattttaaatataaattagtgttaatgaaaatatgttgataaagggattatgtaggatttaatgatatattttattatttatgtttatatttaattcgttaattttttttttttatattttttttttttagtgaggttatttattttttatagtattttaaataacgtttttaataaagatagttattagttaatggtataaggttatgtatgttatttttataattattagaatgaaagaagtagttttaaagttatgttttaaagtaattaaaatattgaaatttttataggaatttatatgttaaaatttagtggtgtttttggatgttaggtgtttaagaagtatttgaaagtaattataaaatttttaatggtttattttttattatgtttttttgagttattttttatgattggtgggagtttattagttcgtgtattttttaataggaattttaataataataataatgaaaatttggaagtttggagtgtgggttagattttaaagaaaagaaaaaaaatgttgaaagaatggagaaaaggtttagtttttaattttttaaaataattagatagttggtgaaagaaagtagttgattttgaaatatgagattataaagaaaaagtaagaattatagagttaatatattaggcgagagttttatttttatgttttaatagaatgtgtatatttttttttatttataatttaaaattttagtgttttttttttattaatttatttagg

SEQ ID NO: 1518 - DNA, 10328 bp, Artificial Sequence
  chemically treated genomic DNA (Homo sapiens)
tttagataaattaataaggaaaaaatattaagattttggattatgagtaggagaaaatatgtatattttgttaagatatagaagtaaagttttcgtttgatgtgttagttttgtagtttttgttttttttttgtagttttatgttttaaaattagttgtttttttttattagttgtttgattgttttaaaagattggaaattaaattttttttttatttttttaatatttttttttttttttttgaagtttaatttatattttaagtttttaaatttttattattattgttattgagatttttgttggaagatatacggattgatgaatttttattaattatgggaagtgatttagggaaatatggtgagaagtgaattattaaaagttttgtagttgtttttagatattttttgaatatttagtatttagggatattattgggttttgatatatgaatttttgtgaagattttagtgttttggttattttgaaatatgattttgaggttattttttttattttaataattataaaaatggtatgtatgattttgtgttattagttggtgattgtttttgttgaagacgttatttagaatgttgtagaaaatagataattttattaggaaaaaaaaatgtaaaaaaagaaggttaacgaattaaatataaatatggataataaaatgtgttattaagttttatataatttttttattagtatatttttattgatattgatttatgtttaaaatgaattgttttaattgaaatttataataatgaatttattagtaaatataataataatgatatataatttttataataatttggtgcgagaagacgtagtttttttttttttgagatagggtaattggagtttagaacgattaagaaaattttttaaggtagtaaaggttttaggtaatagatttggaatttggttattgaaatgattgattttataatttaggatttttatataatatattgatattaaattattttattaagaggataattagaaataataatttaggtagtatgtgtgtatatagtttaaatagttttaattgtataattgatgtaatatattatttatattattttatttgtattttaaatatttaaaattatattgaagtttgtatgtttaaatgtagaatataaagaaggattgaggaattataatagattaaaggagattaaggaagcgtaataattaaattttatataggaatttgtattggattttaagttggtaaagggtattagtggaaaaattggtgaaatttgaataaagtatgtggtttagttaataatattgtagaaatgttaattttttgattgtgataattgtattgtggataaacgaaatattaatatttaaggaagttgggttatatgagaattttgtataatttttgtaatttttaataagtttaaagtgaagttaaaaaaagtataaaaaatgttaaaagtagtatgtgttttgaaagttttaaagattttgtaaaaaggtttttgaaattgataaatgattttagtaaagttttaggatataaaataaatgtataatgttagttgtatttttatacgttaaatatatttaagttgagagttaaattaagaatttaattttattgttaatagttatataaaagataaaatatttaggaatattttttattaaggatataaaagagatttataaggataattataaaatattgttataaaaattagataatataaataaatggaaataattttatgttaatggattggaagaattaatgttgttaaaatgattatattgtttaaagtaatttatagatttaatgttatttttattaaattattaaatttattttttataaaattataaaaaatgatttaaaaatttatatggaattaggaaagagttagaatagttaaagtaattttaagttaaaagaataaagttagaggtattatattacgtaattttatgttatattataaagttatagtaattaaaatagtatggtagtagtataaatatagatatatagtttaatgaaatagaatagagaatttatagtaaagtaaagttatatatttatagttatttaatttttaataaagttgatagaaaataaataatgaggaaaggatttgttagttaataaatagtgttggtatatttggttagttatatgtagaagaatgaaattggatttttattttttattatatataaaaattaacgtaagataaattaaagatttaaattaagattttaaattataataattttagaggaaaaaaggaaaatattattttggaaattatgtttggtagagaatttaggattaaatttttaaaagtagttgtaacgaaattaaaaattggtaagtggggtttaattaaattaaagattttttgtattgtaaaataaattattaagaaagttaatatataatttatggaatgggaggaaatatttgtaaacgatgtatttgataaggtttaatatttcgaatttataaggattttaaataattgtataaataaaaaataaataaatttattaaaaattgggtaaaaaatatgaataagtatttgttaaaaaaagatatataagtggttaataaatattttaaaaaatatttattattattaattattagagaaatgtaaattaaaattataatgagatattattttatgttggtcggaatggttattattaaagaatcgaaaaataatagatgttgataaggttgtagagaaataggaatatttatatatcgttgatagaaatgtaaattagtttagttattgtgtaaagtagtttggttattttttaaagaatttaaaatagaaatattatttgatttagtaattttattattgggtatatattaaaaagaaaataagttattttattaaatagatatacgtatttatatgtttattatagtatagtttataatagtaaagttatggatttaatttaggtgtttattaacggtgtattggataaagaaaatgtggtatatatgtattgtggaataagatgtagttataaaaaagaatgaatttatgttttttgtagtaatatggatgtagttagaggttattatattaagtaaattaatgtaggaatagaaaaaataaatattatatgtttttaagtataagtgggagttaaatagtaggtattcgtggatataaagatggtaataatagatattggggattattagaaggggaaagtgggagaggggtaagggttgataaattaatttttgggtattatgtttagtatttgggtgatgggattatttatattttaaattttaatatatgtaatatatttaggtaataagtttgtatatgtgttttttgaatttaaaataatagtttaaaaagaaaaaaatagtagtatgtattatgatttttgatgtattggtaaagtattaattcgaatttttttttatatttagttgtttattgttaaatagtattattatttataaatatttatttttttttttatttgtaaaataattaatttttgtatgtttattgaataatagggattttaatggatttttaaatgtttatagattttttaagttatttatagtaattaaataagattaaaatagttatttttttaaaagtttaatttaatttgtattgtattttagtattttgtataattttataaaatatttatattttttttttttttaaaatatagttcgtgtgtatgtttatagtttttaaatagattaggaattatattaaaattatttaataaaattatggtatgtgtattatattttaatttaaatttatttatttattagaataaaatagttaatttaataattgtgaatttaataggtaaaattaaaattatttataatggaaagatacggtggtttatgtttgtaattttagtatttggggaggtcgaggtgggtagatacgaggttaagagattgagattattttggttaatatggtgaaattttatcgttattaaaaatataaaaattagttgggcgtgatggcgcgtatttgtagttttagttattagtaaggttgaggtaggagaattatttgaatttaggaggtggaggttgtagtgagtcgagatcgtgttattgtattttagtttggcgatagagcgagattttattttaaaaaaaaaaaaaaaaaagagagaatttatatgtatatatatatatataaagtttattattttaaaaatgtaaaaaattgtttttaagagaaaataaattgttaatacgtaggttattgttatgtttttaattttttaaatttattttataaatgaataagtggtaagatggattataagttttagagcgggattgtttagtttggaattttatttttgttatttattaataatgtgaatttaagtaagttatttttagtttttgttttagattttttatttgtaaaacgagtatattaataagtttttatatgttgtagttatataatatatttgaaggtattttaaaagttgttggtataaagttagttttaattaagagttattattttttatgttttttttgtttatcggagttgttatttagtttgtgatttttttaagtttatatttatatttaagttattttatattagtagaattaaaatggttagattgataagagaatgaagatagaaataaataatattttttgttaattttgtatgtttatttatttatatatttaataatatgttaatatgtttgtgatttaaattatattaaaataaaattaggggttatgaaatttatttgattatatgttgaaattaagatatttatttaatattatttattttaaaaattatttagttttatgtttaaattttgtattaagttttaaattatatattaattaatttttttaatattttttgaagggaattatagagaagtatatgaaggtaatataaatattttgttatgaagattaatttgaaatattagattgaaagtttaaaataatgtatttagttggtaatgaataaaatagatttatagaataattgatattaaagtgtgtatatttagttgagagtatttttacgagttaattttatgtgatttatttcgttgggattttttgattgttaggtaggatattgtaattaatttagtatagagtattattaatatggtaaagagagttgtaaatatgattttataggagttgagagaatgatgtttagaagatatgttttttttcgattttatttttggttttgaaggtttgttaatttaagaattgaaagagaatataaataattttattaattgaagagaaaaattttttaaatttttaaagatgtgtaaagtaataattatttgtttatatgtatattagttagtgtaagtgagttgtgtatgtttttttggtaaaattatgtttttatatattaagtattattaaaagggtagttaatttttaagaagatataaatgagtaaagatgtttagagttgtaaatgttaattatttgaataggttatttgttaaggtgaattaaattaaatttatgttgtaaataaaagatattttattattttgagaattattaagaaaaatgtgaaatttatgatagataaattagttattaggtatatgtatttgatatttatagagagagtttttaatagattaattttttattttttgatttagatgatttttaagatattttttttatatgttgatatagattttttaaaaataatttttaggtgtagatgtatataaagtttaatatatatatattttttttgtgtatatatatatatatatgtattttttatggaaataattaaaagtgttgtaaattttgttatgttatttaggtgaagttatgtaatgtaaggtagtattatataagggaaagtatatttaaataaggcgttttatggttattttttatggttttgtgtagttattaatgaatggtagtatttgttataagaggaataaaatatgtgtttttattttaagaaaatagtttgggtggggaagatattgtttatttgttttggattttatttttttaaatatgttaattagaataagagaataggttaagataattatagttatagttgtagatatatgttttatggaaaaattaaagttattttttgataattaaattacggtttagtattgggattatttatattatgaataatgatgagtttaggaattttaaaatataaaaattaaaattaaataaaatcgaatttattttgaagtaaattaatgtgatttttattttggtaaataaaattggtaggaggtaagaaagttttagattggaaatttttaatatattgaaattgtggtatattataatgggttaagatgaatagtagttgtttttttttttttttatttatgaaagaagagaattgtttgttgtttttaaatttaagaatttttgttgataaaaatagaattatgagtaaataaatgtattttattgaaaatatttatatttttagttaattgatttaaatatatatatgaaatatatatatgaaattagagatattatttatggatttgggagaagtttattttatttatattttaggggataattataataggttagattttttgataaaattggaatttataaaaagcgttttttgaatttggaaagttaaagtgaaagtataatgattgttttttttgtatggttagtgtagaagtaaattttttttagaatattatatagcgttttaagttatattttttttgattttatagaaggaaagtagaagatagtgagtttatatgtttgttttaagtatagtatggattaatggataaaatattagattgaaagtttaaaataatgtatttagttttagaaataaaatttttattttcgattataaattttttttaaataatgttttaaataattatatttagtattaagtaaatgagtgaaagaatagtttttttaaagaaggtaataatttatggaggatagattgaaattaaataaatagatgaatgtgaaaaattaaattatatattttgaaattttttgaaaagttattaaaataaaataggatttgttttattaggtaataaaattcgttataaagttgtgatataaagagagtgttgtattagttttagtaaagaaaattgttttagcggaattaagtgtttataagtgtgatttgtatatggaaattttatatatgaaaaacgtagggtattaataataggttagaaaagagtggttttttaatatatagcgtcgtattgatttgttttttatttttatatgaagaattttagatttttattttatatcgtgaagagatataaattttaggtggattaagtatatataaaaagtacggaaaaattttagaagaaaatatagaagaatgtttttttaatgataaggtattgaaggaatttttagaaaaggatttaaaaataaaaggaaaaattatgaagaatattgataaatttagttaatagtaatattgatttttttttttttaaaataaagtgtatttaaaaaataaaattttaagttatagatttgtgtttttttttttataattttttttaaattgtatatgtttttatttagttatgatagaattgaattgaggtaaaaattttggtatgaggtatttatatttattttaaaggtagtttagaaaatttttatgagaagggttgggaagtgaagagatggagggtgataaagttagtgaagattgggtgtgattaagttagttattattataggtatttggaatataagtttgtttgggatttgcgtgagatagtgggaacgcgtgttagagttattttatttagggggaaatagagtggaatatttatttgttaaaaagttatgtttattggttgaggttagtttttgggacgttaagtttggtatttcgagttattttgtgtgagtagaatatttagggaagttgattttagtgtgtagagatgaatgagagggtttgtgagtatagaatttttataatagttgttatggtttataaataaaaaatattttttagagattaaagagattttttattgattaatagataaaagataagtagtaggtaattgataaaaagggtaaaattaaataaaaaagaaagaaaataggagtatataaatgtttataggtggttaatgttagtagtagttatggaattttaataaaaataaaaaattgattttagatatataagtaaaaattaaaagttttagtaatatttagtagtgttatttatcgtttgtttgagtgaagatttaaataattaagttgaatagtaatttggttaatatttagaaaaattaaatgtatatatataatttgatttttaaattttttttttagttaaatttgggataagtagataatgagataatatttattataatataattataataaaattgtaagttttataaaatatagggaaaatttaagtgtttattaataggaaaatgaaaaagtgaagtgtattatgtttatagaataaaatgttatatataagtttaaagtatatgaattaaagttgtatgtattaaattagaaataataaaataaaattatatgtaaagaaataagtttagagggttatatgtgatgttgtatagtttaaagtagaaaagaaaattatttgtttagtgatgtaattttgtggataagagtgtattcggaaacgataaatagaaaattcgtatgatggttatttttgagtagaaaaggggttggttaatatagaaatagaataataaggtgtatttgtattgtattatttttgttaaaatatttgaaatatattaatgaattatataaattttgatatagttagaggagtaggatatgtgagttaatattttgtatttttaaaaaaatagattaaaagttaaaggggagatataagattgaagtttttgtggtattattaataatttttattttattaaataattattaaaattgaaagaaattttatgtgttaaattttttttttttttttttttttttttttttttttttttttttgagatagttttattttgttatttagggtggagtgtagtgatatgattttggtttattattaattttgttttttgggtttaagtaatttttttattttagttttttgagtatatggggttaaaggtgtgtgttattatgtttagataatttttttttttttcgtttttttttttttgtagaaatgaggttttatttcgttgtttaggttggatttgaaggagtttttttattgtgaaaagtgtagaagttataaaaatgtttttattagttaagttattgaatgtttataggagaataagataattattttaaatatatatttgagatatttaatcgtataagataaaacgttttatgtgaagtggaaataaatgaatatatatttgggatggtaaataaagagaatatatagttttagatagggaagattattaatttaaagaaaattttagtgagtaaattgttgtgtattattttggtaataggaatgatatattttggttaggtgaataatgaagtagaaagagatttgaggatagttgggtatggagtgggtgtagttaatgttttagtttttgagatttttaaaggtggattataattatttttgtttagggtaaataaaagggtaagaatagaatagagaagaaaattaagagtttgataagtttttgataatgttatagaagtaaatagattatgtgtataatatatagtgtttatttgtttataaataagtggttttatattttgattgtatgaagtagtagtagaaattgtagagtttttaaagattaaagttatgaatatttttgtgaaattttatttattgtttaatataagatgagaaaatttaaatagtttttatttttaaataattttgtgtggttgggttgtaattagataaatatttttaatatagttatatttttagaaattaatataaaataagaaaatatgtatttttcgttaaaaatatttttggatattttagagattttttttttttttaaaaatattagtgttatagttaatgaatatttttaggattgatggttttaagttgatatgagtttaagaaatatatatttgtttttttttaagattggtaattatttttttgattttttatataattttaatatgttattttgagatttaattggtaaattttttgtattttaggtttt

SEQ ID NO: 1519 - DNA, 5557 bp, Artificial Sequence
  chemically treated genomic DNA (Homo sapiens)
agtgtatttgggtcgggtaggggttagtttttttttatagggttattaggtatttcgtttggttattagtattcggttgttttagtatttgggatttaggttttttttggtttttttggagttgagttttcgggtggagttttttttattagttttgtttatttgtttttattcggcgggtattttttcgggggttagttgttgggtgttgggttggaaagaattttaggatcgaggtgagatttttgggttacgggaacgaggagtagttggaggttagagttttggaataattttgttttttttttttagtttttgtggttgttgttgtttttattttgatataacgaatttgtgattgtttttattagggtattttgttttttggaattttttgtgttttgtatgtagaggggtaggagaataggtgtgaggtataggggtttgggcgttttggagtaggtaggggagaggtagtgttggattattgtattttagagagatagtagaattggaatttttttttttttttttttttgagatagagttttattttgttttttagttggagtgtagtggcgcgatttcggtttattgtaagttttatttttttggtttatgttatttttttgttttagtttttcgagtagttgggattataggtattcgttattacgttcggttaattttttgtatttttagtagagacggggttttattgtgtgagttaggatggttttgatttgatttcgtgattcgtcggtttcggttttttaaagtgttgggattagaggtgtgagttattgcgttcggttaaggaatttttttttttttttttttttttttttgagattgagtttcgttttggtatttaggttggagtgtagtggtgtgattttggtttattgtaatttttattttttaggtttaagagatttttttgttttagtttttttagtagttgggattataagtatgtattattatatttggttaatttttgtatttttagtagagatagggttttattatgttggttaagttggatttaaattttttattttaaatgattcgtttattttggttttttaaagggttgggattagaggtgtgagttattgtatttggttaggattggaattattgggtatttggttttaaatgggattttagttggattcgggagagaaattagggatttggatgtttagggatgtagattagagtgtttcgtggttagattttggggaaagggggaggggattaagaggaagggtagtagatttacgtggtttcgttttaattttgtagatgattttagtatcgttttttttgtgttagatgacggaagggttttggattttcgtgggtatggttgtttaagggagtcgggagttgtttgttgttattggttttgaagaggtttggattttttagatagtgggagaggttaattttttgttttttagtggttttttatattggtttattggaggtagtaatttttgttttttagaattggttaaggtttcgggattttcgtatgtagtttattttttgtttttgttgatttttttgatttagagttgaggggttagggttttagtattattttttttttttttattttttatttttcgtttagtggggttggaatgtggtttagtcggttggaattttaagggttttatttatcgagattgtagcggttttggttaattgggttttagtgttcgggttattttgaatttaggaatttttgggggtggtgggaggagcggataataaaggtgtaaatataggtatttgtgtggttttgtggtatcgtcgtgggtaggttgaggggttgggtattagaggttaagcgggaagtttaagggggaggtttttttttttttttttttttcggtttttgagttaggttttgggtttttaggaaatgtattttgataatttggtagcgatttttttatttttgttttagggtagggaagtcgggtggttagttggttgtgtgttatttgtttagtggagttagtattttcggtacgtgttggatattttattttttgtttagattcgttgttttcgttgttcgttatagatatattttaatgtataatgtttcgatgtattttttgtatatatataatatttgggttttttaagggtttgttatttttatattttgtttagaatttgggttttttatatgtgaattttatttttttatttattgtttatttgtatttttttgtatttatttaattcgtgttttttggtggttattaagtcgtggtataattggggtttgatatataagtttataaagtttttttaatttagtggggatatatgtggatatttttggttgggattgggaagatgttatagtagtgatgtttgagtatagaaaaagggaaggtggtttttagttaatgaatttataattaaaaagtaacgtaaaattagagacgaggtgcggtagtttatgtttgtaattttagtattttgggaggatcgtttgaggttaggtattttagattagttcgggtaataaagtaagatttttatttttatttttttttttttgagatagagttttatattgatgtttaggttggagtgtagtggtgtaatttcggtttattgtaatttttattttttgggtttaagcgatttttttgttttagatttaagtaattaggattgtagatttaagatattatgtcggattaatttttgtatttttatttaatttatttatttttaattttttgagatagagttttgttattgtcgtttatattggagtttaatggcgtaatttcggtttattataatttttattttttaggtttaagtaatttttttgttttagttttttgagaagttgggattataggtgtttattattatgtttaattaatttttgtatttttagtagaggtggggtgtttttatgttggttaggttggttttgaatttttgattttagatgattcgtttattttagttttttaaagtgttgggatttataggcgtgagttattgtatttggtttatttattttatttatttatttattttgagatggagtttttttttgttgtttaggttggagtgtagtggtataattttggttttttaggtttaagtaatttttttgttttagtttttcgagtagttaagattataggtatgcgttattacgtttggttaattttttttgtattttttaggagagacggggttttattatgttggttaagttggttttaaatttttgattttgagaatgatttttttattttggttttataaagtgttgggattataggtgtgagttattatatttaagttttataattttttttgtttgtttgttttttgagacggagtttcgttttgtcgtttaggttggagtgtaatggcgtaatatttcggtttattgtaatttttattttttgggtttaagcgatttttttgttttagttttttgagtagttggaattataggtgcgtgttattacgtttggttaatttttgtatttttagtagaaatggggttttattatgttgtttaggatggttttaaatttttgatttcgtgattcgtgtgttttggttttttaaagtgtcgagattagaggcgtgagttattatatttagttttaataggtgttttgaacggttagagtggtttttaaggaggatatatgttttatttttatcgtagttatacggtaagttttttttttttgagtttttgttttttgtattttatttttttattttcgttttattattttttataatttttttcggttttagtttttaaggtaatttttcgaggatttttttataatgttagtttttgttaggttgtggtgtgtttacgttatttttttttattattatttttagtttgaaattattgtgtaattgtaatttttttttttaagatagggtttttttttgttgtttaggttggagtgtagtggcgtgattatagtttaatgtttcgttgaatttttgggtttaagtaatttttttgttttagttttttaaatagttggaattataggtatgcgttataatgtttgtttaatttttatatttttttgtagagatgaggtttcgttatattttttaggttggtttggaatttttggttttaagtgatgttttagttttagttttttaaagtcgattagttattttgttagtttgtttgtgattatttgattgaagtgtgttatttttattttattatgagtttagggtttaagggggacggggttggtgtttgttttgttttggatatttgggaatattataggtatttaggaaatgtttgtgggatgattggtgttgttttataagttcgttattatttatgaggtgtaggtatcgtagaaagggtttggtaggggatagattatagtgttttaagtttttataattagtttaaggagggagggaagaagggaggagtggttgtggttttagataataaaagttggggttaggttttggggggtataattggtttgagataatttgaaagatttgaggcggaggagagtcgttatattttagggagattgtatatatatataaattatatgtacgtgtatgtacgtatatttagatatatatattatatatatagggatatatatagtttatatatgtgtatatatagtttgtatatgtatatatatatatatattatattatataagaggatatatatagtttatataggtatatatatatattatatatatattatatatcgggatatatatataaaaggtttatgtatgtgtatatatatatatacggatatatatatgtatatatacgggtttgtagttttgaaaggatttatgattttggtggtaagaggagttggcggagtttagttagtgggcggggttaggggaggggcgggtaggtaggtgtagttatttttgggaggattttgcgtggttagacggtgttggtgattcgtttatattgttcgtttcggatattttaggcgtttttcgttgcggtcgttttttgttttagaggttagttttggatatttgttgtttttttttagttcggattttgggatttttttttttgagttaatatttgggttttgttttcgatattattttaaggttttttattttgcgtgtttggagtttgttttaggggtttttgttttgggttatggtttagaagggggttttggggtttgggtagttgggggttgtggttattttgttttattttggattatttcggtcggggataggtaagtgaggacgtgggggtagggtggggataatgtattggagggagtcggcgtgattattttttggggtgtgtttttgtttggggtttaagaaaattttcggtttttttagtttttggttttttttttttattttggttttgttagggaaggggttagttttttggagtagtggtgggtattaaggggttagggaattcgagttttttttatttattttttttttttttttttttttttagg

SEQ ID NO: 1520 - DNA, 5557 bp, Artificial Sequence
  chemically treated genomic DNA (Homo sapiens)
tttagaaagaaagagaaagaggaggggtgagtagggaagattcgggttttttgattttttagtatttattattgttttagagggttggttttttttttgatagagttaaggtgggaaagagaggttaagagttagggaggtcgggggtttttttgggttttagataagggtatattttagaaaatgattacgtcggttttttttagtgtattgtttttattttgtttttacgtttttatttatttgttttcgatcggagtaatttaagatagagtagaatggttatagtttttagttgtttaggttttaggatttttttttgggttatggtttaggataagggtttttggggtagattttaggtacgtaaggtaggaagttttggggtggtgtcgaaggtaggatttagatgttggtttagagggaaggattttagaattcgggttggaaaggggtagtaagtgtttaaggttggtttttaaggtagggagcggtcgtaacgggagacgtttggagtattcgaagcgagtagtgtggacgagttattagtatcgtttggttacgtagggtttttttaggagtggttgtatttatttgttcgttttttttttggtttcgtttattggttgggtttcgttagttttttttgttattaaagttatgagtttttttagagttgtaggttcgtgtgtgtgtatgtatgtgttcgtgtgtatgtgtgtgtatatgtataggttttttgtgtgtgtgtttcggtgtgtagtgtgtatgtggtgtgtgtgtatgtttgtgtaggttgtgtgtgtttttttatgtggtgtggtatgtgtgtgtgtgtgtatgtataggttgtatgtgtatatgtgtaggttgtgtgtgtttttgtgtgtgtagtgtgtgtgtttgagtgtgcgtgtatgtacgtgtatgtggtttgtgtgtgtgtgtagtttttttggaatgtgacgattttttttcgttttaggttttttaggttattttaggttagttatgttttttagggtttggttttagtttttattatttggagttatagttatttttttttttttttttttttttttaggttggttatgggagtttaagatattatggtttgttttttgttaggttttttttgcgatgtttgtattttatgggtggtggcgagtttgtggagtagtattaattattttatagatattttttaagtgtttatgatgtttttaggtgtttaggataaaataggtattagtttcgttttttttgagttttgagtttatggtgaagtaggggtgatatattttaattaaataattataaataggttggtaaggtggttagtcggttttgggaggttgaggttggagtattatttgaagttaggagttttagattagtttggggaatatagcgaggttttatttttataaagaaatataaaaattaggtaggtattgtggcgtatgtttatggttttagttatttgggaggttgaggtaggaggattgtttgagtttaggagtttaacgaagtattgagttatgattacgttattgtattttagtttgggtaatagagggagattttgttttaaaaaaaaaaattgtaattatataataattttaagttaggaatagtgatgaaaaagaatggcgtgagtatattatagtttggtaaaggttggtattgtgaaagggttttcgaggaattgttttggaaattgagatcgaaagggattataaaaggtggtaaggcgaagatggggggatggggtgtagagggtagaggtttagggaaagaaggtttgtcgtgtggttgcggtgggagtgaggtatgtattttttttgagggttattttggtcgtttaaaatatttgttgaggttgggtgtggtggtttacgtttttaatttcggtattttgggaggttaaggtatacgaattacgaggttaggagtttgagattattttgaataatatggtgaaattttatttttattaaaaatataaaaattagttaggcgtggtagtacgtatttgtaattttagttatttaggaggttgaggtaggagaatcgtttgaatttaggaggtggaggttgtagtgagtcgagatattgcgttattgtattttagtttgagcgatagagcgagatttcgttttaaaaaataaataaataaaaaaaattgtggagtttggatgtggtggtttatatttataattttagtattttgtgaggttaaggtgggaggattatttttaagattaggagtttgagattagtttggttaatatggtaaaatttcgttttttttaaaaaatataaagaaaattagttaggcgtggtggcgtatatttgtaattttagttattcgggaggttgaggtaggagaattgtttgaatttgggaagttaagattgtgttattgtattttagtttgggtaatagagggagattttattttaaaataaataaataaataaaataaataggttagatgtagtggtttacgtttgtaaattttagtattttgggaggttgaggtgggcggattatttgaggttaggagtttaagattagtttggttaatatagagatattttatttttattaaaaatataaaaattagttgggtatggtggtgggtatttgtaattttagttttttaggaggttgaggtaggagaattgtttgaatttgggaggtgaaggttgtagtgagtcgagattgcgttattgaattttagtgtgggcgataatagtaaaattttgttttaaaaaattaaaaataaataagttaaataaaaatataaaaattagttcggtatggtgttttgagtttgtaattttagttatttgagtttgaggtaggaggatcgtttgaatttaggaggtggaggttgtagtgagtcgagattgtattattgtattttagtttgagtattagtatgagattttgttttaaaaaaaaaaaagtggagatgggggttttgttttgttgttcgggttggtttggaatgtttggttttaagcgatttttttaaagtgttgggattataggtatgagttgtcgtatttcgtttttggttttgcgttattttttaattgtagatttattggttggaaattattttttttttttttgtgtttaaatattattgttatgatatttttttaattttagttagggatgtttatatgtgtttttattagattgggaggattttgtgggtttatatattagattttaattgtgttacgatttagtagttattagggaatacgggttgaatgaatgtagggaggtgtaggtaagtagtgggtaagggagtgaggtttatatataagggatttaagttttgggtagaatgtgaaagtggtagatttttgaagggtttaagtgttgtgtgtgtgtaggggatatatcggagtattgtgtattgaggtgtgtttatggcgggtagcgagggtagcgggtttgagtaggggatgagatgtttagtacgtgtcgagggtgttgattttattgggtaggtgatatatagttagttggttattcgatttttttgttttgggataggaatgaaggaatcgttgttaggttattagggtatattttttgagagtttaaggtttgatttagaggtcggaggagggaggagggaggggattttttttttgggtttttcgtttagtttttgatgtttagttttttagtttgtttacggcgatgttataaggttatataggtatttgtgtttatatttttattgttcgttttttttattatttttaaggatttttgggtttaaaatagttcgggtattgaggtttaattagttagagtcgttgtaatttcggtgggtggggtttttgaggttttagtcggttgggttatattttagttttattgggcgggaagtagagggtggagaagggggaagtggtgttgggattttagttttttagttttggattaggagagttagtaggagtaggaagtagattgtatgcggggatttcgaggttttggttagttttggggggtagagattgttgtttttagtgggttagtgtggggagttattggggggtaggaagttggttttttttattgtttgggagatttaggtttttttaggattaatggtagtaaatagttttcggtttttttgaatagttatgtttacgaggatttaggattttttcgttatttggtataggaggggcggtgttgaggttatttgtagagttggagcgaggttacgtgggtttgttgtttttttttttggttttttttttttttttttagggtttggttacgaagtattttggtttgtatttttagatatttaggtttttggtttttttttcgggtttagttagggttttatttggggttaaatatttaataattttaattttggttaggtgtagtggtttatatttttaattttaattttttgggaagttaaggtgggcggattatttgaggtgaggagtttgagtttagtttggttaatatggtgaaattttgtttttattaaaaatataaaaattaattaggtgtggtggtgtatgtttgtaattttagttattagggaggttgaggtaggagaattttttgaatttgggaggtggaggttgtagtgagttaagattatattattgtattttagtttgggtattagagcgagatttagttttaaaaaaaaaaaaaaaaaaaaaaaaaaattttttggtcgggcgtagtggtttatatttttaattttagtattttgggaggtcgaggtcggcggattacgagattagattaagattattttggtttatatagtgaaatttcgtttttattaaaaatataaaaaattagtcgggcgtagtagcgggtgtttgtagttttagttattcgggaggttgaggtaggagaatggtatgaattagggaggtggagtttgtagtgagtcgagatcgcgttattgtattttagttgggggatagagtgagattttgttttaaaaaaaaaaaaaaaaaaaaattttaattttgttatttttttagggtatagtagtttaatattgttttttttttgtttattttaggacgtttaggtttttgtattttatatttgtttttttgtttttttgtatataggatatagagggttttagggggtaggatgttttgatagaggtagttatagattcgttgtgttaagatggagatagtagtagttatagggattggggagaggagataaagttgttttagggttttggtttttagttatttttcgttttcgtgatttaggggttttatttcggttttggggttttttttagtttaatatttagtagttggttttcggggggatattcgtcgggtggagatagatgggtagggttgatggggagggttttattcgggagtttagttttaggagggttagggggggtttgagttttaggtgttggggtagtcggatgttgatgattaagcgggatatttggtggttttgtgggagggagttggtttttgttcggtttagatatatt

SEQ ID NO: 1521 - DNA, 7503 bp, Artificial Sequence
  chemically treated genomic DNA (Homo sapiens)
ggtggattatttgaggttaggagttcgagattagtttggttaatatggtgaaatttcgtttttattaaaaatataaaaattagttgggtgtggtggtgggcgtttgtaattttagttatttaggaggttgaggtaggagaatcgtttgtatttaggaggcggagtttgtagtgagtcgagatcgcgttattgtattttagtttgggtaatagagtaagattttattttaaaaaaaaaaagaaagaaagaaagaaaaagaaagtagtagaggagagaaaaaagagagaataagaaagatggagagatagagacggatagagatatagagatagagagagacggaaaaagagggatagagttagagagattgagagagatagttttaaaaaagggagatagcgatgatatagagagatatagatatagatatagagatgaagagatagatagatatagggagatagagatagattgagatagagagatagagatagagggagatagagatagagatagagaaggagatagaaagagggcggggagagagatagagatagagatataggtttgagtttcgtatgggttttttttcggttttaggcggcgttatttgcgatttttgaagtcgttattagttgcgttatttacggttggtataggaaggggtttttattatttttgtttttaggtcgatttttgtaaagtttttagcgtgttttacggaattttttttgttattcgtttttagcgtttttgtcgttttggtttgtgtttttgagtttttttaggacgtatagggagtttggaggattcggggttcgcgggacggtgttgggatttttcggttaggatcgggttgtattagttttgcgtggaaatagattttgacggggaagtttacgtatagtgaggacggggtagttttttgggtagttttcgcgtgtgttagatttagtagtgtgtgtgtaaggttttttttttttttttttttttttttttttggttgatagttttattgagatgttttttatatatattaagtaatttatttatttaataattcggtagtggttagatggtgggggaggatcgttggagtttaggagttttagacgagtttgggtagtatagtaagatttttttttattaaaaaaaaaaaaaggtagggcgcggtggtttacgtttgtaattttagtattttgggaggttgaggtcggcggattatttgaggttaggagttcgagattagtttggttaatatggtgaaatttcgtttttattataaatataaaaaataaattatttaggcgtggtggtaggtgtttgtaattttagttatttaggaggttgacgtaggagaatggtttgaatttaggaagttaaggttatattattgtattttagtttgggtgataagaataaaattttatgtaaaaataaattaagaaattttaaattcgtcgatttttattgttgttttgtagaaggttttattatcgtttttattcgtttttataggtggggaaattgaggattgtaagttaaatagtttgttttagtatgagttgatttatggttgaaattaatagtatttttgttgaatgagaataatttttttattttgagacggtgtttcgttttgttgtttaggttggagtgtagtgacgcgattttagtttattgttttttttatttttcgggtttaagtaattttttttttttagttttttaagtagttgggattataggtatttgttattatatttagttaatttttgtatttttagtagagtcggggttttattatgttgtttaggttggttttgaatttttgattttgtgatttatttgttttagttttttaaagtgttgggattataggtaatagttatcgcgttcggttatagttttagtttttttttttttttttttttttgagacggagtttcgttttgtcgtttaggttggagtgtagtggtataatttttgtttattgtaagtttcgtttttcgggtttacgttatttttttgttttagtttttcgagtagttgggattataggcgttcgttattacgttcggttaattttttgtatttttagtagaaacggggttttatcgtgttagttaggatggtttcgattttttgatttcgtgattcgttcgtttcggttttttaaagtgttgggattataggcgtgagttatcgcgttcggtttatagttttagttttttaatatatattaggtcggttatggtggtttatgtttgtgattttagtatttggggaggttaaggtaggagcgtttttgaaggttggtagtttaagattagttagggtaatatagtaagattttatttttataaaaaattaaatagttaattaaaaaaaaaaaaaaaaagaaagaaaaattttagttggatatggtggagtatgtttgtggttttagttatttggggggttgaggtaggagaattgtttgagtttaggaggtcgaggttgtagtgagttatgattatattattgtattttagtttgggtgatatagttagattttgttttaaaaaatatatatgtatattttaaaatattatatattatataatgtaaataatatatatgttatatattttatgtatatatttatgttatatatattaatatagttaggtgtagtggtttatatttgtgtttttagtattttggcgggattacgggcgggttatttgaggttaggagttcgagattagtttggttaatatagtgaaatttcgtttttattaaaaatataaaaaaaaaaaaaaattagttaggcgtggtggtgggcgtttataattttagttatataggaggttgaggtaggagaattgtttgaattcgggaggcggagattgtagtgagttgagatcgtattattgttttttagtttggtgatagagcgagattttgttttaaaaaaaaaaaaaaatttaaaggggaaaatagtaattggatagtgtaggaatcggtagatgttttgattacgtggttaaggttattattattagtacgagataggtcgaagttatgggtttcgacgtggggggtttgagatagatatacgttacgttcgggattttttttattgagttttgaggttatttaggattatttttacggagggacgttttgtagagtgattattagttttttttaatggttttaagggttgagggagggtagagggattgcgttcgttggaggagattttgatatttgaagatgggtggtttgtgtatttaggatttagtaaagggtggttggtgatatttagggggttggggtagagggggttatttggaattaattttcgcgttttggtttcgattatagtttggagggttgagtaagaggatagaatttagggaagttgggggagggaggtcgggggagggagtttggggagcggggagggagtttggattttttggatttttgtaagcgtgaaattttttttaaatgaaacgttaaaaagttttttttttttttggtttttaagtttatttagtgtttttttttattttattgtaggtttaaatcgtttagttataaataaataattttattttttgttttcggttttttttcgttttcggtattgtagatatgggggttggatttgtttttgcggcggggttattttgggtattgtagggttttgttaggagttttttttaagtcgtgataattacggatgtttttaggttttatatagggatttttgggggtagaattattttagggttagaggattttatagattttaagagattttgagttttatgattttttgttttgttgaggttttaggaggttgtatatattgaaatttatattttgagtgggagggagagaggaggcgagtttcgggagttggggtttttcgggtttatgtcgtacgttttatcgggagtttattttggtgttcggtgtgagtagggggtagattggattttttattttttatttttatttatttatgttttgagatggagttttgttttgttgtttaggttggagtgtagtggtacgattttggttttttgtaattttcgttttttaggtttaagtgatttttttgttttagttttttgagtagttgggattataggcgttcgttaatacgcgtagttaatttttgtatttttagtagagatggggttttattatgttggttaggttggttttgaatttttgattttaggcgatttattcgtttcggttttttaaagtgttgggattataggtgtgaggtatcgtatttggttatttttttttttaaataatgaatattggttttttttttgggttttgtggatatcggggttggatttttttttggggtaggttcgttttgggtattgtagggtgttaggtattatttttggtttttatttattttatgttaggagtttttttttcgtgatagttataggtgtttttagatttcgtttagggttttttgggggtagaattattttttgattgagaattttggttttaaagggggaagaaaatttttagataaaattggtaggaggatgttcgttggggttttaggtgaggtattgagggtattcgtggtggggttttgttttttcgagttttgtattttgttttttgttacgttttgttgtttgttcgtttttagtttatttatttacgggatatatttgttacggtcggttttgttggggttatagggatttcgttagggaggcgtttttttgtgggtggtacgtgggtatgtgttgttttgagggttgtggttatgttgtttatttggttagggattttcgatttgggtgggtgatagttagttttttcgtttttataaaggttgggattttgagtttaaagtttttatttttttttcggagttcgttttgatttttaggtttttaaggtaaaaggaggaagtggggatttagtttgggtattgggtaatttaacggtttttggtattgggttataagaggagtttgatcgtgggtgtattttggattttattatggtttatcggttttttagttttgttttggcgttcgtgttgttggttttgttgttgagcggtgagtgagttacgtgtttatttatttagtttttaggtttcggtggattgtggggaaatatttattacgaggtttatttaaagtttttttggtatagttggggaaattgaggtagggttaggggagattttatttattgttcgggattaacgtttgtaggggtggggaggataagggtaagggggagttttggttatttgatttagttgtttatttgtaaaacgggtaaaatttagttttttttttttgaggagttgttttgggaattagttagtaataggcgaatttttggatagtatttagtttttagtaaatgtttagtgaatatgtatgaatgaatgaatgagtgaatgaatgagtgagtgagtgaatgagtgaataaatgaatgagtgaatgaattaatgagtgagtgaatgaatgagtgaatgagtgaatgagtgaacgaatgaatgagtgaatgaattaatgagtgagtgaatgaatgagtgaatgagtgaatgaatgagtgaatgagtgaatgagtgaacgaatgaatgagtgaatgaatgaatgagtgagtgagtgaaagggtcgaggagttagtgatgttggaattaggggaagaagagagtatgggtttttttaggtttttattttgagggtgatttttttttttttttttttttttttttttttgagacggagtttcgttttgtcgtttaggttggagtgtagtggcgcgatttcggtttattgtaagtttagtttttcgggtttacgttttttttttgttttagtttttcgagtagttgggattataggcgtttattattatgtttggataattttttgtaatttttgtagagacggggttttaaggtgttagttaggatggtttcgattttttgatttcgtgattcgtttgttttagttttttaaagtgttgggattataggcgtgagttatcgcgtttggtttttttttttttttttttgaaacggaattttgttttgtcgtttaggttggagtgtagtggtgtaattttagtttattgtagttttagttttttggggttaaatgatttttttgttttcgttttttgagtagttgggattataagtatatattattatatttggttagtttttgtatttttagtagagatggggttttattacgttggttaggttggtttcgaatttttgatttgagggggatttttaatgttttagtttgtttatttgtaaaatgggtttttttgttggttgatttttttttttttttttgtttttttttttttattttgttttgttttgtttttttgagatggggttttatttaggtatgagttattgcgtttaggattttttttttttttttttttttttgagatagaattttattttgttgtttaggttggagtgtagtggtgtgatttcggtttattgtaatttgtgttttttgggtttaagcgatttttttgttttagttttttaggtagttgagattataggtgcgaattattatatttggttaattttttttttttttttttttgagacggagtgttattttgttgttaggttggagtgtagtggggcgattttggtttattataattttcgttttttgggtttaagcgatttttttgcgttaattttcggagtagttgggattataggtacgtgttattacgtttagttaatgtttgtatttttagtagagatagggttttattatgttggttaggatggtttttattttttgattttaggtgatttatttatttcggttttttaaagtattgggattataggcgtgggttaatcgtattcgattaatttttttgtttttttaaaaatatttttttaaattttgttttagagatagggttttgttttgttgtttaggttggagtgtagtggtgtgattttagtttattgtagttttgattttttgggtttaagcgattttttttttttagttttttaagtagttgggacgataggtgtatattattatgtttggttaattttaaaattttttgtagagatggggtttttataattttgtttaggttggttttgaatttttgagtttaagggagttttttgtttcggttttttaaagtgttgggattataggcgtgagttattgtatttagttatttggtttgcgttttaaaagtttttttgatttttaggattgaaagttgttattagggcgtttttggaaatcgtcgtaattataattttttcggtttgggcgttgagttttttttattagttagtaggtattgatcgggttgtagatcgggagacggaggttcggagaggtttaggggttgttttgttattttttttttttttgtagtttgggggttttttgacgtttggattttttttttgtagg

SEQ ID NO: 1522 - DNA, 7503 bp, Artificial Sequence
  chemically treated genomic DNA (Homo sapiens)
tttgtagggggggagtttaggcgttagggagtttttaggttgtagggaaaggggggatggtagagtagtttttgggttttttcgagttttcgtttttcgatttgtaattcggttagtgtttgttggttggtgggaaggatttagcgtttaggtcgggggggttataattacgacgatttttaaaggcgttttggtggtagtttttagttttgagagttaggaaggtttttaagacgtagattaggtggttgggtgtagtggtttacgtttgtaattttaatattttgggaggtcgaggtaggaggtttttttgagtttaggagtttaagattagtttgggtaaaattgtgaggattttatttttataaaaaattttaaaattagttaggtatggtggtgtgtatttgtcgttttagttatttgggaggttgaggagggaggatcgtttgagtttaggaggttaaggttgtagtgaattgagattatattattgtattttagtttgggtaatagagtaagattttgtttttaaaataaaatttaaaaaaatgtttttaaagaagtagaaaaattggtcgggtgcggttggtttacgtttgtaattttaatattttgggaggtcgaggtgggtggattatttgaggttaagagatggagattattttggttaatatggtgaaattttgtttttattaaaaatataaatattagttgggcgtggtggtacgtgtttgtagttttagttatttcggaggttgacgtaggagaatcgtttgaatttaggaagcggaggttgtggtgagttaagatcgttttattgtattttagtttggtaatagaatgatatttcgttttaaaaaaaaaaaaaaaaaaaattagttaggtgtggtggttcgtatttgtaattttagttgtttgggaggttgaggtaggagaatcgtttgaatttaggaggtataggttgtagtgagtcgagattatattattgtattttagtttgggtaatagagtgagattttgttttaaaaaaaaaaaaaaaaaaaaaaaattttgggcgtagtggtttatgtttgagtgagattttattttaaaaaaataaaataaaataaaataaaaaaaaagaagtaaaaaaaaaaaaaaaaattagttaataaagagatttattttgtagatgaataaattgaggtattgaaaattttttttaggttaggagttcgagattagtttgattaacgtggtgaaattttatttttattaaaaatataaaaattagttaggtgtggtggtgtgtgtttgtaattttagttatttaagaggcggaggtaggagaattatttgattttaggaggttgaggttgtagtaaattgagattgtattattgtattttagtttgggcgatagagtaagatttcgttttaaaaaagaaaaaaaaagggttaggcgcggtggtttacgtttgtaattttagtattttgggaggttgaggtaggcggattacgaagttaggagatcgagattattttggttaatattttgaaatttcgtttttataaaaattataaaaaattatttaggtatggtggtgggcgtttgtagttttagttattcgggaggttgaggtaggagaaaggcgtgaattcgggaggttgagtttgtagtgagtcgagatcgcgttattgtattttagtttgggcgatagggcgagatttcgttttaaaaaaaaaaaaaagaaaaagaaaaagaaaattatttttaggatagggatttgagggggtttatgtttttttttttttttgattttagtattattaatttttcgatttttttatttatttatttatttatttatttatttatttattcgtttatttatttatttatttatttatttatttatttatttatttatttatttatttatttattgatttatttatttatttattcgtttatttatttatttatttatttatttatttatttatttattgatttatttatttatttatttgtttatttatttatttatttatttatttatttatttatttatttatttatgtatatttattgagtatttgttgaaggttgggtgttgtttaggaattcgtttgttattagttaatttttaaaatagttttttaggagggaagggttgggttttgttcgttttatagataggtaattgagttaaatggttagggtttttttttgtttttgttttttttatttttgtaagcgttggtttcgagtagtgagtggagttttttttgattttgttttagtttttttagttgtgttagaagggttttggatggatttcgtggtggatatttttttataatttatcggggtttggaggttggatggatgggtacgtggtttatttatcgtttagtagtaaggttagtagtacggacgttagggtagggttggggggtcggtgagttatggtggggtttagggtgtatttacggttaagttttttttatagtttaatgttagaggtcgttgagttgtttaatgtttaggttgggtttttattttttttttttgttttgggagtttgggagttagaacggatttcggggaggaggtgggggttttgggtttaaggttttaatttttgtgggggcggggaggttggttgttatttatttaagtcgggggtttttggttaggtgggtaatatggttatagtttttagagtaatatatgtttacgtgttatttataaggagacgtttttttgacgaggtttttgtggttttagtaaagtcggtcgtggtaggtgtgtttcgtgggtgggtgagttggaaacggatagatagtaggacgtagtaggggataggatgtagagttcgggaaggtagggttttattacgagtgtttttagtgttttatttgaggttttagcgaatatttttttgttagttttgtttgggggtttttttttttttttaaggttaggatttttaattaagaggtgattttgtttttaggggattttgggcgaggtttgaggatatttgtggttgttacgaaaggggagtttttggtatggagtgggtggaggttaaggatgatgtttagtattttgtagtgtttaggacgggtttgttttagagaaggatttagtttcgatgtttatagggtttaggggagagattagtgtttattatttggggaaaaaaatggttaggtgcggtgttttatatttgtaattttagtattttgggaggtcgaggcgggtggatcgtttgaggttaggagtttaagattagtttggttaatatagtgaaattttatttttattaaaaatataaaaattagttgcgcgtgttggcgggcgtttgtagttttagttatttaggaggttgaggtaggagaattatttgagtttgggaggcgaaggttgtagggagttaagatcgtgttattgtattttagtttgggtaatagagtaagattttattttaaaatataaataaataaaaataaaaaataaaaaatttagtttgttttttgtttatatcggatattagaataaattttcgatggggcgtacggtataaattcgggggattttagttttcgggattcgtttttttttttttttttatttagggtgtggattttaatgtgtgtagttttttgggattttagtagggtagaggattatgggatttagagttttttggggtttgtggaattttttaattttggggtgattttgtttttaggggtttttgtgtgaggtttggagatattcgtggttgttacgatttggagggagtttttggtagggttttgtagtgtttaggatggtttcgtcgtagagataaatttagtttttatgtttgtagtgtcggaaacgggggaaagtcgaggatagaggataaaattatttatttataattgaacggtttaaatttatagtgaaatggagagaagtattgaatgaatttggaggttaaaaagaaaaaaagttttttaacgttttatttggaaaggattttacgtttatagaagtttaaagggtttaaatttttttttcgttttttaaattttttttttcggttttttttttttagtttttttaaattttgtttttttgtttaattttttaggttgtgatcgaagttagggcgcgaaagttgattttaaatggttttttttgttttagttttttgagtattattagttattttttgttgggttttgggtatataagttatttatttttagatgttagggttttttttagcgggcgtagtttttttgtttttttttagtttttgggattattgaggagagttggtggttattttgtagagcgttttttcgtggggatggttttgggtggttttaggatttaatggagggagtttcgggcgtggcgtgtgtttgttttaggttttttacgtcgaagtttatggtttcggtttgtttcgtgttgatggtaataattttgattacgtggttagggtatttgtcggtttttgtattgtttagttattgtttttttttttggatttttttttttttttgagatagagtttcgttttgttattaggttggagagtagtggtgcgattttagtttattgtaattttcgtttttcgggtttaaataatttttttgttttagttttttgtatagttgggattatagacgtttattattacgtttggttaatttttttttttttttgtatttttagtaaagacggggttttattatattggttaggttggtttcgaatttttgattttaggtgattcgttcgtaatttcgttaaagtgttgggaatataggtgtgagttattgtatttggttatattaatgtatataatatagatgtatatataaaatatgtagtatgtatattatttatattatataatatataatattttaaaatatatatatatattttttgagatagggtttggttgtgttatttaggttggagtgtagtggtgtaattatggtttattgtagtttcgattttttgggtttaagtaatttttttgttttaattttttaagtagttgggattataggtatgttttattatgtttagttaaagtttttttttttttttttttttttttttggttggttgtttaattttttgtagaaatggggttttgttatgttgttttggttggttttgaattgttagtttttagggacgtttttgttttgatttttttaaatgttgggattataggtatgagttattatgatcgatttgatgtgtattaaagaattagagttgtgggtcgggcgcggtggtttacgtttgtaattttagtattttgggaggtcgaggcgggcggattacgaggttaggagatcgagattattttggttaatacggtgaaatttcgtttttattaaaaatataaaaaattagtcgggcgtggtagcgggcgtttgtagttttagttattcgggaggttgaggtaggagaatggcgtgaattcgggaggcggagtttgtagtgagtagagattgtgttattgtattttagtttgggcgatagagcgagatttcgttttaaaaaaaaaaaaaagaaaaagaattagagttgtggtcgggcgcggtggttgttgtttgtaattttagtattttgggaggttgaggtagatggattataaggttaggagtttaagattagtttgggtaatatggtgaaatttcgattttattaaaaatataaaaattagttgggtgtggtggtagatgtttgtaattttagttatttgggaggttgagggaggagaattatttgaattcgggaggtggagggggtagtgagttgagatcgcgttattgtattttagtttgggtaatagagcgagatatcgttttaaaataaaagggttatttttatttaataaaagtgttgttggttttagttatgagttagtttatgttgaggtaagttgtttggtttgtagtttttagtttttttatttgtaaaggcgggtgaggacggtaataggattttttgtagggtagtagtgggggtcgacggatttgaggttttttgatttgtttttatatggagttttgtttttgttatttaggttggagtgtagtggtgtgattttggttttttgggtttaagttatttttttgcgttagttttttaagtagttgggattataggtatttgttattacgtttgaataatttgttttttgtatttgtagtagagacgggattttattatgttggttaggttggtttcgaatttttgattttaggtgattcgtcggttttagttttttaaagtgttgggattataggcgtgagttatcgcgttttgtttttttttttttttaatagagaggggttttgttatgttgtttaggttcgtttggaatttttgggttttagcgatttttttttattatttggttattatcgaattgttaagtgggtgaattgtttggtgtgtgtgaaggatattttaataaagttgttaattaaaaaaaaaagaaaagaaagaaaagaaagattttgtatatatattgttggatttagtatacgcgagagttgtttagggggttgtttcgtttttattgtacgtgggttttttcgttaggatttgtttttacgtaaggttgatgtagttcggttttgatcggagggttttagtatcgtttcgcgggtttcgggttttttaggttttttgtgcgttttggggggatttaaaagtataggttagggcgataggagcgttgggagcgggtagtagggagggtttcgtggaatacgttgggggttttgtaggggtcggtttgggggtagaggtagtgggggtttttttttgtattaatcgtaggtggcgtaattggtaacggttttagggatcgtaggtgacgtcgtttggggtcgaggggagatttatgcggggtttaggtttgtgtttttgtttttgttttttttttcgttttttttttgtttttttttttgtttttgtttttgtttttttttgtttttgtttttttgttttagtttgtttttgtttttttatatttgtttgtttttttatttttgtgtttgtgtttgtgtttttttgtgttatcgttgttttttttttttaaaattattttttttagtttttttggttttgttttttttttttcgtttttttttgtttttgtgtttttgttcgtttttgtttttttattttttttgttttttttttttttttttttttattattttttttttttttttttttttttttttttttttgagatgaagttttgttttgttgtttaggttggagtgtagtggcgcgatttcggtttattgtaagtttcgttttttgggtataagcgatttttttgttttagttttttgaatagttgggattataggcgtttattattatatttagttaatttttgtatttttagtagagacgaggttttattatgttggttaggttggtttcgaatttttgattttaggtgatttatt

SEQ ID NO: 1523 - DNA, 6075 bp, Artificial Sequence
  chemically treated genomic DNA (Homo sapiens)
ttagttggggttttttaggatatttttttagtattatggttagtgttttggtagtattagttgttaaatatttgaatatttgtattggatatatgtttttttttaaaaagtagtatttagaagttataaattgggtatttgtttttttaaattttattggttatagtgaagtttcgtggttgtaagggaggttggaatgtgtagtttttattttaggtggttatgtgttttgttagaaataaggggttttattagtaattattaaattaaggagaagggggtgaatgatattagagggtgtagtagattttgttataggggaggttaaataggtgttgagaagtatagagggtttggtgagtttggttgtattgttgagtgttttattagtttaggggaggtgggggtataggaggagaagttagaggttgggaattggtgggtgatgggagaggtgtttttgggatagtttgagtttgttttgagtgatatttgaggttttattttaggtataaggataagtgtaggttagagggtttgaagttagaggtttcgagtaggaagatgttggagggagagaatttgttattgtttgagatagggtgaggggttaagggaggtttttagggtattagggggttttagggttgttgtttagggtattggagtggagttttggggttaagtaggtgggttgggttttaatggtagatatgttttatttttttggttgttttggtcggaatttttagttgtagaaaaagtaatagatggaggttatttggggttatagggaatattattattattatttgagatggggttttgtttcgttgtttcggttgataagtagaggtgtattattgtagttttaattttttgggtttaagtcgttttttcgttttatagtttttggagtagttgggattatagatttgtgtcgttatatttggttaatttttgtatttttttgtaaagatagggtttcgttatgttgtttaggatagtttttaatttttgggtttaagtgatttttttattttggttttttaaagtgttgggattataggtatgagttattatgttcggttggaaaattattaaaagggtttgataggtggggattttaagagattttagatatgaaaattggggttttatgtagaattgagatttagaattggaaggttattgagaaattttaagcgtggtttatatttttaaggaaaaatatttttttagttttttgaagatttgagtttttagagggtggtagtggaagggattttttttttttttttaaaattttttatattaattttgttttttaaaaattgtaatgtggatatttttatgagtgaaataatgtaagatgagttaatttaaagttagaattttttttttatttttaattttttgttttttttttggttgaaattttgtatttgtgggagggagagggatagggtggagggttatggttgttcgtgtattttttttttggggtgcggtaggttgtaggatttttttttgtttgtttttggggttttttttttttttgagagagtttcgttttgttatttaggttatagtgtaatggtgcgattttagtttattgtaatttttgttttttgggtttaagcgatttttatattttagttttttaggtagttaggattataggcgtatgttaatatatttagttaatttttgtatttttagtagagatggggttttattatgttggttaggttggtttcgattttttgattttaagtggtttgttcgtttcgattttttaaattgttgggattataggtgtgagttattgcgttcgatgggatttaggatttagaagttttttattagttttgttattttttttgggaagttagtagtagggtttattagtagatggggtttggttttttattttgtttatgttttttgggatttacgtttttggaagatttgttgtagtttagtttttgtttttttttttttttgttttaaagttgttttagtatcgttgttttgtttagttagtttttatagttatttttttattgtttagtatttgggatttttttagtttttatgtttttaaagggtttttttgtgaatatttcggataaaatatttttttatttttggagtatttttttgagggtatatagttaggaaaggtataagagagttagagggtttgaggagttttatagtttttgttgtttatacgtagatggtttagaaggttttttttttttttttttaagaggatttaagcgtttattgataaggtaaaaaaattaataataatttatttattgtttttatattttttgttaaaattttgtttttatggggtttaggacgaggcggatgaagtagtatattattgttgagttataggtgaggagatgaaaggtagtaaaagttttttttaaaaatattgatatatttttttaggtatgaaggaggaatatttaaaaaaaaaaaaaaggaggggtgtggtggtttatatttgtaattttagtattttgggaggttaaggtaggtagattattttaggttagagtttgagattagtttggttaatatggtgaaattttgtttttattaaaaaatataagaaaattagttaggtgtggtggcgtgtatttgttattttagttattttggaggttgaggtaggagaattgtttgaatttgggaggtagaagtggtagtgagttgagatcgtattattgtattttagtttgggtgatagagtgagtttttatttttaaataaaaaataaaataaaataaaataaaataaaataaaaaaaataagttttggtttaggttttgttgttaattagttttgagatgttagtagttttataagatgagaggggatgatttgaggtttttgagcgtttttttggtttggggttttgtaatttttgtatggagtattgggatgttttgtttttttatttgtaaggagttgaaggatgggggatttgttttagagttttagtttttttgtttttttttttttttttttttttgagacggagttttattttcgtttaggttggagtgtagtggtacgatttcggtttattgtaagtttcgtttttcgggtttacgttatttttttgttttagtttttcgagtagttgggattataggcgttcgttatatcgtgcggttaattttttgtatttttagtagagacggggttttattttgttagttaggatggtttcgattttttgatttcgtgatttgtttgtttcggttttttaaagtgttgggattataggcgtgagttatcgcgttcggttagtttttttgtttttaattagttgttgtgtggtttgttttacgtttttgtttggttttgggaagtttaaaggtggagtagttacgaagtttttatttggttattgaggtcgatttgtgaggcgtttagttgagattatattttgttttaatttatttagttgttttatatggtttattgtggtgtatggggtatatttttttatttggttttttagaggaagttagagttgtggtgggggttgggggtatttagggagattgtaggggagtagaattgaaggttttgaggttttagtttttggggttgttttttagagcggattgtagattggaggaagttggaggaattgtaggtttgttttttttgggttaggaaatttggtttcgggttaggttttatttttatttgttgtgtgattttggataaacgttttgtttttttttaggtttaatgtttttataggtaaatgatttttaagtgtttgttttaaggggttaagattttttttttttttttgttttgcggttggtaggtttttatttttttggagagggttattattattttttgtttaggttttggtaggggtagttataggtagagggtttttgggttttaatttttgaaggtttttatgttatataaaacgttgattatataaatttgttatgttttttttttaagttgtttcgttataggagtgttggttgtgatttttatgattttttatgatgggtgaggaatggtattatatttttaacggtattataatgtgaggtttaaaagttttttgtttttttttttttggtgatgggaatttttttcgttttgtggtttaggttgtagtgtagtagtgcgattttgatttacggtaatttttatttttcgggtttaagtaatttttttgtttttgttttttgaaatagttggaattataggcgagcgttattacgtttgattaatttttgtatttttagtagagatagggttttattatattggttaggttggttttgaatttttgattttatgattcgttcgtttcggttttttaaagtgttaggattataggagtgagttagtatgtttagtttagatttgtttttgattaggtgttattatttgtttttacgtgtttttggttaggattgagttttgtattttgttatacgattatttattttatgtgaaattttaagttattttatgtgaaattcgttattataatgggttaatttttttgtatttttttttttgtagagatggggttttattacgttgtttaggttagttttgaatttttcgttcgtttcggttttttaagtgttgggattataggcgttagttatcgcggtcggttaataatgtggagatttaaaaggtattttatatatataatttttgatttatttaattagtagggttttttttttatgattttttttttttttttttttaagtttttttttatttttttttatagttttttttttcgttttttttattgtttttttttattggtttttttttcgcgtaggcgtttttagaggcgttgagttagggcgttgttgagttcgggtaggttcggatggggcggggttagcgtttgcgttttggacggttttggggtagggtagatttatatttgcgggggattagttgacgtttcgtattgtagattgcggagttagacggcgttatgtacgtttttttttttttggttagttttttgggcgcgggtaagttttgggatttttattttggggaggaggtgtttcgtagcgtttatttgttttagaatgggttgtgtcgggtttggtttttttgttttttttgttttagttggtaagggggcgcgcgtattgcgtaggcgcgttcgttggttttttttggttttttttgggcggttgggggttgcggggggcgggttgcgaaaatgttttcgggaggacggtttaggttttgggtagtatttttttcggggttcgagtgggtttttgcgcggttggggtttcgaggtttttttttaggttgcgttttttattgtgggggtgggtgagttttgtagggtgattttttgggtagttgtgttgtgtttgtgttgggcgtacgtgatcgaggtgggttggagtttcgtttcgtaggatattttggtcgttggttttagttgtttgtttgtaagggtagcgaagttgtaggaagtatatgtgtattatttatattgacgtttgtatatgtatttattttggattttaggtgttgataaaacgagttaaattttgtaaaaatattttgagatttattttgaggtaaatatgagtgattatggttcgtgatatagtttttaggaggttttgagaatatgtgtttaaggtggttgggatatagttgggttttatatattttcgggaggtacgagatattaattaaatatatttaagaaatacgttggtttggtttagaagggcgaaataatttaaagcggcggggggtttttaggttataggtaaatttaaatattttttagttgataattggttgagtttatttgaaaatttagaattaatagaaagaaagtatttaagttaagataaaggattgtggagattaagttttattgtgtagaggaagtttttaggtagtcgattaagagagcgagtacgttgtaaaatatttttatggaaatgaaagggtgattggtttttagttgattattttttggatttggagaggaaggaa

SEQ ID NO: 1524 - DNA, 6075 bp, Artificial Sequence
  chemically treated genomic DNA (Homo sapiens)
tttttttttttttagatttaggagataattaattaagagttagttatttttttatttttatagaaatattttataacgtgttcgtttttttagtcggttatttgagagttttttttgtataataaaatttggtttttataattttttattttaatttgaatattttttttttattgattttaggtttttagataaatttaattaattattaattagaaaatgtttaaatttatttatggtttggaagtttttcgtcgttttgagttgtttcgtttttttgaattaaattaacgtattttttaaatgtatttgattgatgtttcgtgtttttcgaaaatatgtaaaatttagttgtattttaattattttaggtatatgtttttaggattttttgagggttgtgttacgggttatggttatttatatttgttttagaataaattttaaaatatttttatagagtttgattcgttttgttaatatttagaatttagagtaaatatatatgtaaacgttaatatagatgatatatatgtgttttttgtagtttcgttatttttataaataggtaattgaagttaacggttaaagtgttttgcgggacggggttttagtttatttcgattacgtgcgtttagtataggtataatatagttgtttaaggggttattttataagatttatttatttttatagtgggaagcgtagtttgagggaaggtttcggggttttagtcgcgtaggaatttattcgagtttcgaaggagatgttgtttagggtttgggtcgttttttcgggggtattttcgtagttcgtttttcgtagtttttagtcgtttagagaaagttagagaaagttagcgaacgcgtttgcgtagtgcgcgcgtttttttgttaattagggtagggggagtagaggggttaggttcggtatagtttattttggggtagatggacgttgcgaggtattttttttttaggatgagggttttagggtttattcgcgtttaggaggttggttaggaggaagagggcgtatatagcgtcgtttgatttcgtagtttgtaatgcggagcgttagttgatttttcgtagatataaatttgttttgttttaaagtcgtttagagcgtaggcgttaatttcgttttattcgggtttgttcgagtttaatagcgttttgatttagcgtttttgagggcgtttgcgcgaaggggaggttaataggagggggtaatgggaggggcgaaaggaagggttatggggaggagtgaggaagaatttggagaaagggaagggaaaggttataaaagaaaagttttattaattgaataggttagagattatatatgtaaaatattttttaaatttttatattgttggtcggtcgcggtggttgacgtttgtaattttaatatttgggaggtcgaggcgggcggagggtttaagattagtttgggtaacgtggtgaaattttatttttataaaaaaaaaaatataaaaaaattagtttattgtagtagcgggttttatatagaatagtttggggttttatatagaataagtagtcgtgtaatagggtatagggtttagttttggttaggggtacgtgggggtaggtggtggtatttggttaaaggtaagtttgggttgggtatgttggtttatttttgtaattttaatattttgggaggtcgaggcgggcggattatgaggttaggagtttaagattagtttggttaatatggtgaaattttgtttttattaaaaatataaaaattagttaggcgtggtggcgttcgtttgtggttttagttattttaggaggtagaggtaggaaaattgtttaaattcgggaggtggaggttgtcgtgagttaagatcgtattattgtattgtagtttggattatagagcgagagagatttttattattaaaaaaaaaaaaataaaaaatttttaagttttatattgtggtatcgttaaagatgtaatattattttttatttattataagagattataagagttataattaatatttttgtaacgagatagtttaagagaaaagtataataaatttatgtaattaacgttttatgtgatatggaagtttttagaaattaagatttaaagattttttgtttgtggttgtttttgttaggatttgaatagagaatgatgatgattttttttagaaggataagaatttgttaatcgtaaggtagggaaaggaggggaattttagttttttagggtaggtatttagaggttatttatttgtagggatattgagtttaggagagggtaagacgtttatttaaggttatataataggtagagatagaatttggttcgaagttaggttttttgatttaggaagggtaaatttatagtttttttaattttttttaatttgtaattcgttttggagaataattttagggattaaggttttagaatttttagttttgtttttttgtaatttttttaagtgtttttagtttttattatagttttgattttttttggggagttagatggggaagtgtgttttatgtattatagtgggttatgtgaggtagttgagtgagttgggataagatgtggttttaattggacgttttataggtcggttttagtggttagatggagatttcgtggttgttttatttttgggttttttaaggttaggtagaagcgtggggtagattatataataattggttaaaagtaagggagttagtcgggcgcggtggtttacgtttgtaattttagtattttgggaggtcgaggtaggtagattacgaggttaggagatcgagattattttggttaatagggtgaaatttcgtttttattaaaaatataaaaaattagtcgtacgatgtggcgggcgtttgtagttttagttattcgggaggttgaggtaggagaatggcgtgaattcgggaggcggagtttgtagtgagtcgagatcgtgttattgtattttagtttgggcgagagtgagatttcgttttaaaaaaaaaaaaaaaaaaaaaagtaagggagttggggttttaggataaattttttattttttagttttttgtagatggaggagtaaagtattttagtgttttatgtagaggttataggattttaagttaaaaggacgtttagagattttagattatttttttttattttatagagttattgatattttagggttggttaataatagagtttgaattaggatttgttttttttgttttgttttgttttgttttgttttgttttttgtttggagatggaggtttattttattatttaggttggagtgtaatggtgcgattttagtttattgttatttttattttttaggtttaagtaatttttttgttttagtttttagagtagttgggataataggtgtacgttattatatttggttagtttttttgtattttttggtagagataggattttattatgttgattaggttggttttaaattttgatttgaagtgatttgtttgttttggttttttaaagtgttgggattataggtgtgagttattatatttttttttttttttttttttaaatattttttttttatatttagaggaatatgttagtgtttttgagagaaatttttgttgttttttatttttttatttgtaatttaatagtaatatgttgttttattcgtttcgttttgaattttatgaggatagaattttaataaagaatataaaagtaataagtagattattattaatttttttattttgttagtagacgtttaaatttttttaaaaaaaaaaaaaaaaaattttttgaattatttgcgtgtaggtaataagagttgtgaagttttttaaattttttggtttttttatgttttttttagttatgtatttttagggaaatattttagaagtgaaggaatattttgttcgaagtgtttatagaagggttttttagaaatatggaagttggaaagattttaagtgttgaataatgaagagatgattgtggaaattggttggatagagtaacggtattgaagtagttttgaaataggaggaggagggagtaagggttaggttgtagtaagttttttaggaacgtgggttttaagaaatatgggtagagtgagaggttaaattttatttgttagtaagttttgttgttgattttttagagaggatggtagaattggtggagagtttttagattttggattttatcgggcgtagtggtttatatttgtaattttagtaatttgggaggtcgaggcgggtagattatttgaggttaggagatcgagattagtttggttaatatggtgaaattttatttttattaaaaatataaaaattagttgggtgtattggtatgcgtttgtaattttagttatttgggaggttaaggtatgagaatcgtttgaatttaggaggtagaggttgtagtgagttgagatcgtattattgtattgtagtttggatgatagagcgagatttttttaaaaaaaaaaaaaattttaaaaataaataaaaaaagattttgtagtttgtcgtattttaaagagaggatgtacgggtagttatggttttttattttgttttttttttttttataagtgtaggattttagttaggaggggaatagagaattggaagtaggggggaaattttgattttggattaatttattttgtattattttatttatggaaatgtttatattgtaatttttaaaaaataaaattaatataggaaattttaaaagagaaaagaaaattttttttattattattttttgggagtttaagtttttaaggaattgaaaagatatttttttttagaaatgtgagttacgtttaaggttttttaatggttttttagttttggattttagttttgtatgaggttttaatttttatgtttgagattttttgaaatttttatttgttagatttttttaataattttttagtcgggtatggtggtttatgtttgtaattttagtattttgggaggttaaggtgagaggattatttgagtttaggagttggagattattttgggtaatatgacgaaattttgtttttataaaaaaatgtaaaaattagttaggtgtggcgatataggtttgtgattttagttattttagaggttatgggacgggaggacggtttgagtttaagaggttgaggttgtagtggtgtatttttgtttgttagtcggggtaacggagtaagattttattttaaataataataatgatgttttttgtggttttagatggtttttatttgttattttttttataattgaaagtttcggttaagatagttaaggagataagatatatttattattgaggtttagtttatttgtttggttttaaggttttattttagtgttttaaatagtaattttggagttttttaatgttttggaagttttttttgattttttattttgttttaaataatgataggttttttttttttagtatttttttattcgagatttttggttttagattttttagtttgtatttgtttttgtgtttggaatgagattttaggtgttatttaaggtaggtttaggttgttttagggatattttttttattatttattaatttttaatttttgatttttttttttatatttttattttttttggattgatggagtatttaatagtgtagttaagtttattaagttttttgtgttttttagtatttatttagttttttttgtggtagagtttgttatattttttaatattatttatttttttttttttgatttgatagttattaatgagattttttatttttagtagggtatatggttatttaaaataaaagttatatattttaattttttttgtagttacgggattttattgtggttaatgagatttaaaaaaataagtgtttaatttgtgatttttaggtattgttttttaaaagaaggtatatatttagtgtaaatatttaaatatttaataattagtattgttaggatattggttatagtgttgggggaatgttttagaaggttttaattga

SEQ ID NO: 1525 - DNA, 7065 bp, Artificial Sequence
  chemically treated genomic DNA (Homo sapiens)
ttaggtgatttattcgtttcggttttttaaagtgttggtattataggtatgagttattacgtttggtagatattattttttgatatgatattaaagtttcgtatatagtagttttttaaaggttcgttgtgatgtagaatttatattatattaatggattttttcgttgttttattttttgagatagggttttgttgtgttgtttaggttggagtgtagtagtgaagttatagttttttgtagttttgattttttaggtttaattgatttttttattttggttttttgagtagttgggattataggagtgtattattatgttttgttaatttaaatttttttttttgtagagaggggattttgttatgttgattaggttggttttaaatttttgggttttagtaatttgtttgttttggttttttagagtgttgagattatagtcgtgagttaagtttattgaagatttttttaaagtagtgaaatttagttgaggtttgaagtatgagttgtatttggttaggtgaaagtggggagtggagttaggcgagatggtttacgtttgtaattttagtattttgggaggtcgaggtggcggattatgaggttaggagttcgagattagtttgattaatatggtgaaacgtcgtttttattaaaaatataaaaattagtcgggtgtgatggtatatatttgtaattttagttatttaggaggttgaggtaggagaatcgtttgaatttgggaggcggaggttgtagtgagtcgagattgtattattgcgttttagtttgggtgatagagcgagattttattttaataataataataaaaaaggaaagcggagagtgaggagtgggtagggaagagtatttaaaatagtaagatgggtattgtggaggtttttaggtaggaaatgtttggataggtttgaaggttcgtttgggaagttcgttttggttagagtttgatgttaaggtggtacgaggtgagggtggagtggtagttggaggttagggtaagggttatttgataagtttattttcgtttttggaaattattaagtttttgtcgtatttttggatttatgtagagttttttgtttggaatgttttgtttttgttttttttttaggttttaattgaaatgttattttttttttaagtagatttttttttgtttttaatattcgtgttgttttttttttttttttatttttttttttttttttttttgagatagagttttgttttgttatttaggttggagcgtaaaggtatgatttgggtttattgtaatttttgttttttaagtttaagcgatttttttgttttagttttttaagtagttgggattataagtgtttattattatgtttggttaattttttgtattttagtagagatggggttttatcgtgttgtttaggttggtttcgaatttttaagtttaggtaatttatttattttggtattttaaagtgttaggattataggcgtgagttattacggtcggtttaattagtatttttgtttgtttgtataataacggtgtttgtttaaattgtttttgtttgtttatttcgagagatgtaagttttttgaggttagggtttttttgttgggtgttcgttttatagtttttgtgtttagttgtgtgttttatttgtagttggtgtttagaaatatttgttggatggatgtgtgaaagaatagagttggatttgagattttggtattattttttaatagtcgtgtgattttgtataagttatataattatttcgtagttagttttttattttgtagtatgggattttattttttatggtaaagtgtttgtgtgagatttaaatgaggtagtatacgtggaagtatttagtagggtatttggttttaaagaaggtgttttaagtgttgttttttttgtgttttattttttttttttttttttttttttttttttttgagataaggttttattttattttttgagataaggttttattttattatttaggttggaatgttagtggtataattttcgtttattgtaatttttgtttttcgggttttagcgatttttttattttagttttttaagtagttaggattataggtaagtattattacgttttgttaatttttttttttttttttgagatagagttttaatttgttttttagtttggagtgcggtggtataatttcggtttattgtaattttcgtttttcgggtttaagcgatttttttgtttcggtttttagagtggttgggattataggtatttattattacgtttagttaatttttgtatttttagtagagatatagttttattatattggttaggtgggtttcgaatttttgattttgtgatgtgtttgtttcggttttttaaagtgttgggattataggtgtgagttatcgcgtttagtttgtattttttttttttttttttttttgtagagatagggttttattatgttgtttagtttggttttaaatttttggatttaaggatttgtttgttttggttttttaaagtgttgggattataggcgtgagttattacgtttggtttattgcgttttttttattatattattagatattatgagttggattttgtttagttttagttgggtttttgttttttatttttttttttgtttgttgtttttttgagttatgtttattgtaatgtaaataatagggtagtttttaggagtttgtaatgatagtaatagtgggaggaataagagggaagggagtaattgttttgttttgttcgaaatggtgttttattatgttgtttaggttggttaagcgatttttttgttttagtattttgagtagttgagattataggcgtgtattattatgtttggttaattgttttattttttattttattagagacgggagttttattgtgttgtttagattggttttgaatttttgggtttattcggtttttttattttggttttttaaatgttgggattataggtatgagttattgtgtatgtttttatattgtatttttaaaattttaaattattaagataataaatgttttttaaagatttaaataaatatataaaagtataaagtaaataaattttttattaagttattttatttttttagaggttatttattattgttaattatttgaggtgtatttttttagattttttatttaaatacgtatatatagtggggttataataaatattttttgtaattttttttgttttgttttgtttttattattatttattatttatttattttttcgagatagagttttgttttttttgtttagattggggtgtagtggtttgattttagtttattgtaatttttatttttcgggtttaagtgatttttttgttttagttttttaagtagttgggattataggcgtttgttattacgtttagttaatttttgtatttttagtagagatagggttttataatgttggttaggttggtttcgaatttttgatattaggagatttatttattttagtttagttttttgagtagttgggattataggtatataatattatatttagttgattttttgtgtttttgtatagataggggttgtattatgttggttaggttggttttgaatttttgattttaggcgattcgtttattttggttttttaaagtgttgggattataggcgtaagttattatgtttgggtagatagttatattttaaaatggaataaaagaagagaaatagaattgttattgattgtattgattattaggtgttatttattgtaaaaatatattattattttatgtaggaaaaaatattgtatggttaggggtggtggttttcgtttgtaattttagtattttgggaggttaaggttggtagattttttgagtttaggagttcgagaatagtatgggtaatatagtaaaattttttttttataaaaaatataaaaattagttaggtgtggtgttatacgtatatttgtagttttagttatttaggaggttgaggtgggaagattgtttgagtttaagaggttgaggttgtagtgagttgtgatcgtattattgtattttagtttgggtgatagagtaagattttgtttataaaaagtaaaaaataaagaaaagaagagaaaaaaggaagagaaatgtattttttatagttttggaggatgtttatgattaaggtattagtaggtttagtgtttgatgtttggttatttgtttttaagatggtattttgaaagttgtgattttatatggtaaaagggatggaaagataaaaagggtaatattaagtgttttttttaattttgagtttttttttaaagaattattattttttttttttgtgtgagatagagttttattttgttatttaggtaggagtgtagtggtataattatagtttattttagttttgatttttttgggtaattcggagtttttttttaagtgtgttaattttattttattttttgatttaattattttttataggttatatttttgtattggggattaagatttaatatgaggtcgggtatagtgatttatgtttgtaattttagtattttgggaggtcgaggtgggtagattatttgaggttgggagtttgagattagtttgaataatatggagaaattttatttttattaaaaatataaattagttaggtatggtggtgtatgtttgtaattttagttatttgggaggttgaggtaggagaatcgtttgaattcgggaggcggaggttgcggtgagttgagattacgttattgtattttagtttgggtagtaagagtgaaattttatttgaaaaaaaaaaaaagatttaatatgaatttttgaggggatattattattttaattatggtaaggagttttggaattgatgaaatggaatagtttttttttgtttttttattaattagaatttttgtgtggttttttaggtattattaggattagttgattattttagtttatagtaatggagttatatgattttttttatatggattttgagtttcgatatatttttttttcgattgtttatagtattatttttgtgttcggggttattgttaatggttacgtgttgtgggtttttgttcgtttgtatttttgtaagaaatttaatgagataaagatttttatggtgaattttattatggcggatatgttttttttgattattttgttattttggattgtttattattaaaattagggtaattggatattttttaaatttttgtgtaacgtggttggttgttttttttttattaatatttattgttttgtggtttttttgggcgttattatttataatcgtttttaggtagtaattcggtttattaagattgtttaggttaatattcgtaagcgtggtatttttttgtttttggttatttgggtggttattgtgggagttgtattttatttttttattttggattttattaatatagtgttcgatagtgttggtttaggtaacgttattcgttgttttgagtattacgagaagggtagcgtgttagtttttattatttatatttttatcgtgtttagtttttttttggttttttttattatttttttttgtaatttggttattattcgtattttgtttatgtagtcggtgtagtagtagcgtaacgttgaagttaagcgtcgggcgttgtggatggtgtgtacggttttggcggtgtttattatttgtttcgtgttttattacgtggtgtagttgttttggatttttgttgagttgggtttttaggatagtaaattttattaggttattaatgatgtatattaggttattttttgtttttttagtattaattgtgttttagattttgttatttattgtttttttattaagaagtttcgtaagtattttatcgaaaagttttatagtatgcgtagtagtcggaaatgttttcgggttattacggatacggttattgaagtggttgtgttatttaattagatttttggtaatttttttaaaaattagtttttgtttttaggtttgaagtttttttttttatgaatattatggattgagttgggggaagaagggatatttattgtggtttgggtattatttttgtgggtattggtgggttattagatttggaggttattttatttgggtagggatgatggtagagttaggttgttggaaaatttagaatttaaatgagtttttttattcgtttgtgggcgtatattatagtaattgtgattgatgattttattttgagttttttaattttatggggtcggaaggaatgttagggttaggtgtagattttgggggaagattttaaattatttagtttttttcgatggggtatcggtttaaagttttgggggagtgggcgtagtggtttatatttgtaattttagtattttgggaggtcgaggtgggtagattatgggttaagagatcgagattattttggttaatattgtaaaattttatttttattaaaatatataaaaattagtcgggtatggtggtatacgtttgtagttttagttatttaggaggttgaggtaggagaatcgtttgaatttgggaggtagaggttgtagtgaatttagattgtattattgtattttagtttggtaatagagcgagattttattttaaaaaaaaaaaaaaaaaaaaaaaaaaagttttgggtaattatttttaagtgatagaggtagattgggttaggaaaggatattgtttttattgtatggtattattttggggtagatttttgagttaagatgttgttattttttttttatttttcggtataaggtttttgtgattttttttaggggaaggggtttgatggaattttttttgatttatttggtaatttgtttttaatggtgattaaagaagataaaatatgaatagattaaaagttaggataagagtttgttttttaagatagacgtgtttgtttgtaaaggttttgtttttagtttagttagttttgggggagtgggaaggagatgtttatt

SEQ ID NO: 1526 - DNA, 7065 bp, Artificial Sequence
  chemically treated genomic DNA (Homo sapiens)
ggtgggtattttttttttatttttttagagttgattggattagaggtaaggtttttgtagatagatacgtttgttttgggaagtaagtttttgttttagtttttggtttgtttatgttttattttttttggttattattagggataggttgttagatgagttagagaaggttttattaagtttttttttttgagaaaggttataaagattttgtgtcggagggtggagagaggatggtaatattttagtttaaaagtttgttttaaggtagtgttatatagtgagggtagtgtttttttttaatttagtttatttttattatttgagagtagttgtttaaagttttttttttttttttttttttttttttgagatggaatttcgttttgttgttaggttagagtgtaatggtgtaatttaggtttattgtaatttttgttttttaggtttaagcgatttttttgttttagttttttgagtagttgggattataggcgtgtgttattatgttcggttaatttttgtatgttttagtagagatggggttttataatgttggttaggatggtttcgattttttgatttatgatttgtttatttcggttttttaaagtgttgggattataggtgtgagttattgcgtttatttttttaaagttttagatcgatgttttatcggggagaattaggtggtttaaagtttttttttaaggtttgtatttggttttgatatttttttcggttttataagattaagggatttaggataaagttattagttatagttattgtagtatgcgtttataggcggatgaaggggtttatttgagttttggattttttaatagtttggttttgttattatttttgtttaggtgaggtagtttttaaatttaatggtttattagtgtttatagaggtggtgtttagattatagtagatattttttttttttttagtttagtttatgatgtttatggaggagaagattttaggtttggaagtagggattaatttttgagggaattgttagggatttggttgaatggtataattattttagtgatcgtattcgtggtggttcgggagtattttcggttattgcgtatgttgtagaatttttcggtgaggtgtttgcggaattttttggtgaggaaatagtagataatagggtttaagatatagttggtgttaaggaggtagagggtgatttgatgtgtattattaatggtttggtggaatttgttgttttggaagtttagtttagtaagggtttagggtagttgtattacgtggtggggtacgaagtagatgatgaatatcgttaagatcgtgtatattatttatagcgttcggcgtttgattttagcgttgcgttgttgttgtatcggttgtatgagtaaggtacggatgatgattaggttgtagaagaggatgatgaggaagattaggaagaagttgaatacgatgaagatgtggatgatgaggattggtacgttgtttttttcgtaatgtttaaagtagcgagtgacgttgtttgagttagtattgtcgggtattgtgttggtggagtttaggatgaggaagtaggatgtagtttttataatggttatttagatgattaaggataaagagatgttacgtttgcgggtgttggtttgagtagttttgatgggtcgagttattgtttggaagcggttataagtgatgacgtttaggaaggttatagagtagtaggtgttgatgaagaaaaggtagttagttacgttgtataggaatttggggagtatttagttgttttggttttggtagtagataatttaaagtggtagggtgattaagaagagtatgttcgttatggtgaggtttattatgaagatttttattttattgaattttttgtaagggtataggcgggtaaagatttatagtacgtagttattagtaatgatttcgagtataaagatgatgttgtaaataatcgggaagagagtgtatcggaatttagagtttatgtgggaggagttatgtggttttattgttgtgggttggaatgattagttggttttggtggtgtttggaagattatataaaaattttggttaataaagggataagaagggattgttttattttattagttttaagattttttgttatggttagaatgatgatgtttttttagaagtttatgttgaattttttttttttttttagatggagttttatttttgttgtttaggttggagtgtagtggcgtgattttagtttatcgtaattttcgtttttcgggtttaagcgatttttttgttttagttttttaagtagttgggattataggtatgtattattatgtttggttagtttgtatttttagtggagatggggtttttttatgttgtttaggttggttttaaatttttaattttaggtgatttgtttatttcggttttttaaagtgttgggattataggtatgagttattgtgttcggttttatgttgaattttaatttttagtgtagaggtgtggtttgtggaaggtgattaagttagagggtggaatgggattagtatatttagaaaagggtttcgggttgtttagggaggttaaggttgaagtgagttgtgattgtgttattgtatttttgtttgggtgataaagtgagattttgttttatataaaaaaaaaaaataataattttttaaaaaggggtttaaggttgaagaaagtatttaatattgttttttttgtttttttattttttttgttatgtgaggttatagtttttaaggtgttattttggaagtagataattaggtattagatattaaatttgttggtgttttgattatgaatattttttagaattatgagaaatatattttttttttttttttttttttttttttttgttttttgttttttatagataaggttttgttttgttatttaggttagagtgtagtggtgcgattatagtttattgtaattttaattttttgggtttaagtaatttttttattttagttttttgagtagttgggattataggtatgcgtgtgatattatatttagttaatttttgtattttttgtagggaaggggttttgttatgttgtttatgttgttttcgaatttttgagtttaaggaatttgttagttttggttttttaaagtgttgggattataggcgagagttattatttttgattatgtagtgtttttttttatataaaataatggtgtgtttttataataaatagtatttgatagttaatataattaatggtagttttgtttttttttttttattttattttaaaatataattgtttgtttaggtatgatggtttacgtttgtaattttagtattttgggaggttaaggtgggcggatcgtttgaggttaggagtttaagattagtttggttaatatggtgtaatttttgtttgtataaaaatataaaaaattagttgggtgtggtgttgtatgtttgtagttttagttatttaggaggttgggttgaggtgggtggattttttgatgttaggagttcgagattagtttggttaatattatgaaattttgtttttattaaaaatataaaaattagttgggcgtggtggtaggcgtttgtaattttagttatttgggaggttgaggtaggagaattatttgaattcgggaggtggaggttgtagtgagttgagattaagttattgtattttagtttgggtaggaagagtaagattttgtttcgaaaaaataaataagtaataaataataataaaaataaaataaaataaaaaaagttgtagaaaatgtttgttatgattttattatatatgcgtgtttgaatagaagatttagaaggatatattttaaatagttgatagtggtaagtagtttttgggaaggtgaggtagtttagtgggaagtttatttattttatatttttatgtgtttgtttgaatttttaaagggtatttattattttaataatttaaaattttgaaaatataatgtaaggatatgtatagtggtttatgtttgtaattttagtatttgggaggttaaggtgggaggatcgagtgagtttaggagtttaagattagtttgggtaatatagtgagattttcgtttttagtaaaataaaaaatgaaataattagttaggtatagtggtgtacgtttgtagttttagttatttagggtattgaggtagaaggatcgtttgattagtttagataatatagtgagatattatttcgaataaaataaaatagttgttttttttttttttgttttttttattattgttgttattgtaagtttttaggagttgttttgttatttatattgtagtgggtatgatttagggaagtagtaggtagggaggaggatgggaagtaagaatttagttggggttaagtaaggtttagtttataatatttaatagtgtagtaaaaagagcgtagtaggttaggcgtggtggtttacgtttgtaattttaatattttgggaggttaaggtagatagatttttgagtttaggagtttgagattaggttgggtaatatggtgaaattttgtttttataaaaaaaaaaaaaaaaaaaaaatataggttaggcgcggtggtttatatttgtaattttagtattttgggaggtcgaagtaggtatattataaggttaggagttcgagatttatttggttaatatggtgaaattgtgtttttattaaaaatataaaaattagttgggcgtggtggtgggtgtttgtagttttagttattttggaggtcgaggtaggagaatcgtttaaattcgggaggcggagattgtagtaagtcgagattgtgttatcgtattttagattgggagatagattgagattttattttaaaaaaaagaaaaaaaattagtaaggcgtggtggtgtttgtttgtagttttagttatttgggaggttgaagtgggaggatcgttggagttcgggaggtagaggttgtagtgagcggagattgtgttattgatattttagtttagatgatggggtgagattttgttttagaaaatgggatgagattttgttttagaaaaaaaaaaaaaaaaaaaaaaaaagggagtgagatataaggaagataatatttggagtattttttttggagttaggtattttgttaggtgtttttacgtgtattattttatttgagttttatataaatattttgttataggaagtaagattttatgttatagaataggaagttgattacggggtggttatatgatttgtgtaaggttatacggttattaaggaatggtgttaggattttagatttagttttgtttttttatatatttatttaataaatatttttgagtattaattgtaggtaaggtatatagttaagtataggagttatagggcgaatatttagtaagggggttttgattttagagaatttatatttttcggggtagatagataaaagtaatttaaataaatatcgttgttatataaataaataggagtgttgattgggtcggtcgtggtggtttacgtttgtaattttagtattttgggatgttaaggtgggtggattgtttgagtttaggagttcgagattagtttgggtaatacggtgaaattttatttttattaaaatataaaaaattagttaggtatggtggtgggtatttgtaattttagttatttgggaggttgagataggagaatcgtttgaatttgggaggtagaggttgtagtgagtttagattatgtttttgcgttttagtttgggtgatagagtaagattttgttttaaaaaaaaaaaaaaaaaaaagtggggggggagggagggtagtacggatattgagaataaaaagagatttatttagaaaggaggtgatattttagttgaggtttgaaggaggaataagagtagaatattttaggtagagaattttgtatgggtttaaaagtgcggtaagagtttggtggtttttaggaacggaaataagtttattagatggtttttgttttgatttttagttgttattttatttttatttcgtgttattttagtattaggttttagttagaacggattttttaggcggatttttaaatttgtttagatattttttgtttagaagtttttataatatttattttgttgttttgaatgtttttttttatttattttttatttttcgttttttttttttgttgttgttgttgagatggggtttcgttttgttatttaggttggagcgtagtggtgtaatttcggtttattgtaattttcgttttttaggtttaagcgatttttttgttttagttttttgagtagttgggattataggtgtgtgttattatattcggttaatttttgtatttttagtagagacggcgttttattatgttggttaggttgatttcgaatttttgattttatgattcgttatttcggttttttaaagtgttgggattataggcgtgagttatttcgtttggttttattttttatttttatttggttaagtgtaatttatgttttagattttagttgaattttattgttttagggaggtttttaatggatttggtttacggttgtaattttaatattttgggaggttaaggtaggtagattgttggagtttaggggtttgagattagtttggttaatatggtaaaattttttttttataaaagaaaaaatttaaattagtaaggtatggtggtgtatttttgtagttttagttatttaggaggttaaggtggaaggattaattgagtttggaaggttaaggttgtagagagttgtgattttattattgtattttagtttgggtaatatagtaagattttgttttaaaaagtaaaataacgaaaaagtttattgatatgatgtaggttttatattataacgaatttttaagaaattattatatgcggggttttgatattatattaaagaatagtatttgttaggcgtggtggtttatgtttgtaatattagtattttgggaggtcgagacgggtggattatttga

SEQ ID NO: 1527 - DNA, 6763 bp, Artificial Sequence
  chemically treated genomic DNA (Homo sapiens)
taaaattataaatggttttagggttaaattattggaatatattaatttttttatttatttatattttgtaaaatttgttaaattatattggattttaaagatttatttggtttgatttgagaaattagtgaaaagttaaattttattgtggttttttataattttattaagtttggtttttataattgtttattattggaatattttaatataaagggtagatgttttattttattgttattatttggataatttgatgttatttttgaaatgtgtgtggtgtggttatggatatttgtagtattggaatagagaagggaggagatgtgagggaattcggagagtttaaggtatttgttttgaaaattatatattttaatgagaagttttggattatgattgggagattaaaatgataatttatgtattgagatgaattttatttggaaaggggaaatggaatatttagttgttgttttataaaggttggtaatttttgttggttgataaggttttaagtttttatttatttttatttggtaattgttataaggggtgttagaggtagaagggttatttaaagggattgttttttcggaggatattttagtaggtttggttgttttagtttgtattttagatttgtggaatttttgtggttagttgaagttaataaattcggtgtggtatagtagttttttgtatagggtatgtatattaaagtcgataatgtttataaatgtaaataagggtagattgattaggaataatattatcgttgggaatgtcgtattcgtatgtattagtaatgaggtaaattgggggtagttttagttttgattatttaagtcgagtaggtttttatattggtttttttttttttttttaaaacgttatagaaataaggttaattagatttttaaagtaatttatttttaagtatgaaaaaagtagattataggggaagcggcgggtggggggtggggagattaagatagcgttcgttagagtcgaggtttcggagtgcgttttggaatttacgggtagaatttataggtcgggattattgtttgagatgttgaaaagttaatttattaaatagcgggcgagggggtttagggtattgaaagtttcggggattaatgtttaaaacgtttaggaattaagttaaattaagggatatgggtttgagtggaagaggttttgttattgaaatgacgtgtatgtggtagtcgtcggaattagaggatatgtagtcgcgtgcggagagtgaggcggatttattacgggtatatagtttattatttttttttagaatttttttttttaaataagttatattgaaatttttttagtaaaagattgagacgaaatattaatagttttgggttaaaacgtggtggagaagtttgaaaagataaatatagtaacgtgtttttggttatatggttttttgttttttagtaagtttgaaatataaaaaggttaatatgtaaaattaggggtattattttttttttttagtttttaaaaagtaatttttagaagtaaatatataatggttcgatttgaagtgtcggtataattatttagtaagaaaagttagaatagtaaatttttttttttgttttgtgttatttattaaatttaataaatattaggatcgtatttaaagatgaaattggtaatgtgtggagtcgtttgagttttttattaatttagtgttatttttttcgtatgttgttcgtttgtttttcgagttttcgtagtttttttttgaggtatttataaaattacgtgttttttaagcggtttgagttttgaattttcgcgttggttcggtgtttaggttttttttcggatttcgcgaacgtttttaaatatttttatttcgtttttttttttttttcgggatatttcgttttgatttcggtatcgtatacggtttgcgggttagggggtcgggggaagggtttttttttgaagtcggggaggaggagaggttggagggaaggtggttaggttggtgggggaggggagattgagggagggagcggggcgagggaggaaggagaaggcgtaggtcgaaggaaggaagcggggaggggaaatcgtcggggaggaaggaagggggcggggagagtcggcggacgggttttttgcgggagtcgcgtggatcgtttcggtggtcggcgcgtttcgtcgtagtttttagcgcgttcgggtagttagcgcggggtcgttgaatgggtagggattcgtgagcgcgattattggtcggtcgcggggaggcggcgcgggtattgggtagcgtaagggggtcggttcgtttttaggaatgtattacggcgcgttcggtacgttcgttcgcgtcggttgggcgcgcgtttcgtttgggttttcgggagatcgcgttggaggttcggagtcggttcggcgtattcgtttttttatttattttgtttcggtcgcgcgggcgcggggagttcgggagtcgggcgcgcgcgcgtatcgggttttttggcgcggggttacgtggttatcggagtttcgttttttttttgtttttttttttttttttttatttgggtttttttttttttttttttttttttttttttttttttttaatgaatatatatcgtgcgtattttaaagttatatcgttttattttacgattttattagatttttcgttattgttagtttttttgtagtttaatttcgtttaaaaaaaaaaataaagtgaagtaaattaagggtttgcgggtcgggtttttatcgtagggaggaacgtaataatttggaaacgtaagaaaaatatattttattttttcgaaaataaaaatttttttaaataaaaagtttagttgtgtagacgtgtttggttttagaatttattttaaagggtcgcgtgtttttttttttcgcgggaagcgaattttcgggatgttttggtgatattggacgcggtgtcgggacgaattttcgcgattcgcgtatagtttgtttttaatgaatttagtatcggggtatttataattttttacgttatattattattaaatataatatgtatatcgagttttgtaaaaaaaaatattgattatataaatatttggttaataaaaaggggtgtataaatgaatttaaaataattaggaaaattttatttttttaaggaaataatttcgtttttttaagttgtaaaaaaagattttgttgttttttttttatttatgttatattcgagatttaaataaaaacgtttttgtttttataagattgtttcggtgtttggattttacgtttatagaatattgatttttttaaattaagattgtgttttttttttttttaagttggggggagaaagcggttggggggtagacggattttaagaaagatggttttttttaacgtttttgtttttttttttaattttttattttgtttattttaatgcgaggcgttgttttttgtaagagtttaagttttttttttagttataaaagaaaagagaagaggaaaaaaaaatttggtatatattggcgtattatttagtacgttgttattattggtgtaggtttgggaatgcgagtcggattttttagtatttgttgtagtttgaggttaaggtgtttttgaaaggtttttttttgaggaattttagaaattgtttaagcgtttaaaaaaatattatattttttttcgtgtttatcgcgaggtaaatgttcgtgtgtgtgcgtgcgcgcgcgtgtgtgcgcgtaaaggtattttataaaaagaagatattgttgaaaagaaaaggaataagagagaaaggagggggagtattttttaatggaagtattgtatgcgagaaggttggcgtttttagaggttgtttcgaagtcgaggatgtatatattgggttgtttatttgggtggtttttttattttggtgagttgttgttaagtagttaataatagttatgtttgttgagtaatttttgtttttcgcgagttaatcgcgtcgtagaaatttaagttatttgatagtttcgggggcgggagttttagtttttttttttttcgttcgttttttttttttttatttttttttttttttttttttttttttttttttaaatggagagagtttttttttttttttttttattttatttattgaattaaggagttgttgcggtcgttgttcgttgtatatatatagagcggagtttttaggtttcgggagcgagagaggcgcgttgtacggggatagaatggtttagcgggttgtcgaggagtataagaaagtagagttcgggatcgagtagttatcgcgaatttagtagttagagttcgagtagttcgagtagtagtttttggagtcgttatcgttagtagtagttatcgcgggagtagcggtagttgcggttgttcgggttcggtagcgttgagattcgtcgggtattttcggatttcgcggcggcggcggttttgcgtttgtttttcgcggtcgttcgggcgattcgggaggcgtcgagagagttagcgcggtcggcgggagtagcggggattcgttggttttttttgtagtgaaggggtcgcggcgcggggcggggggcgggtagggggagttggggatcgtaaggagtgtcgcggaagcgttcgaaggataggttcgttcggcgcgtcggttttcgttttttcgcgaattggatgtgggtagcggcggtcgtagagatttcgggattttcgcgtaatgtggtaatggaaggcgtagggtttgatttttcggtagcggtcgcggtcgtagcggtagtagcgttcgtcgtgtgagtagtagtagcggttggtttgttaatcggagttcgagttcgagtagtttgcggttagtagcgttttcgtaagtcgagcgtttaggcgcgttaggagttcgtagtagcggtagtagcgcgtcgggtcgttcgggaagttttcgttttcgcggcggcggcggcggcggcggtaatatggtttcggttggtaacgtcgtcgagttttaggatcgcggcggcggcggtagcggttgtatcggtgtttcgggacggtcggttggaggcgggaggcgtagacggacgggggggttgcgtcgtgttgtcgcgtcggatcgggattatttgtatcggtttagttattgcgacgtcgttttcgttttggagtagatttttaaggtgtattttagattttttttttttattttttttttttttttttaattttttgggatcgttttcgttatatataaatatatatatttttttttttttttttttatatatatatatatatttatttatatttttttaggaaaagtagtagataaatggggattgaaaaatttaaattttttttttggttttgggaggaaagggttgtttgaggttcgtagggggtggaggtgtgtgtgtgtgcgtgtgtgtgtgtgtatatatacgttttttttggtgtgtttttttcggagtattggaaagtcgtttacggcggattattttaagggcggtcgcggtattgttttgtttcgtgttttttgttttgaattttttttttttgcgtttttgtttttatttgtagtttaaatttttgtacggttgttatattttttaatattttggagggggaggcggagtggagagaggcggagagaggaaggggggagggagtcgaaataaaggtggtttttttttttggtagttagttttggttttgttgagtatgaaatttttgtttttttaaaaaattattttcggaaaaagatatttttttcgttttttaggttttgagtcgtttttttttagggtttggtcgggggaggaaaagttgtaaataaattgttattttaaattcgcggtgcgagtttgcggagttgtcgggtttattgtgtttacgaggttcgttgaaatgtgtggaatttagggaaggcgagtatttagacgggggttcgtcggggtcgcggttagcgtcggggaaatgtcgcgtcggggagtagtttgcgtcggtttgagtttttttttttgtattcggttgttttttacgtttaattagaaaggaagggagaggagggaaagatttatgtggttgttttttttcgattataaatattgtcgtaagttgtagttggttgttttattttttaatttagtttatatagtttttttttacgttatggaaatgcgtcgggagtgaatttcggcggtcgcgtttattacgtggatttttatttattattattttcggcgggggtttagttgggggaattcgtaatatgttgttttaaagagcgttcgtttttagcgttcgttttcgagggtgatggatagagtaggattggtttgttggtttttgaattttgggttttatcgttgggattacgtagtttttttttttttagttttggggtgaatattgtttgtgtcgagtggttttttttttttttatttcggtttttttttttgtattgtagttttagtgttttaagtcgtttagggatttcgcgggtgggggcgttttgatgttttcgaggtgtagtttttacgttgcggttcggttttatgatcgagttttttatgacgtttagattcgtcggggttgtagtttcgagggcgagttcgtgtgtcgcggttattcgcgtttttacggttgttgggggtttatcgggcgggtgcgcgtaagcgggcgtgggcgcgcgggtcgcgatttttcggcgtttattttttttttttgtttcgtttttagg

SEQ ID NO: 1528 - DNA, 6763 bp, Artificial Sequence
  chemically treated genomic DNA (Homo sapiens)
tttggggacgaagtagaagggaggagtgagcgtcggggagtcgcggttcgcgcgtttacgttcgtttgcgcgtattcgttcggtgagtttttaatagtcgtgggggcgcgggtggtcgcggtatacggattcgttttcgagattgtagtttcggcggatttgagcgttatggggggttcggttataaagtcgggtcgtagcgtgggagttgtatttcggggatattagggcgtttttattcgcgggatttttgagcgatttggggtattggggttgtaatatagaagaggaagtcgaggtagagaggagagaaattattcgatatagataatatttattttagagttgagaagggaggggttgcgtaattttagcgatggagtttaaggtttaggagttagtaaattagttttgttttgtttattattttcggggacgggcgttaggggcgagcgttttttggaataatatattgcgggtttttttaattggattttcgtcgagaatggtagtaagtggggatttacgtggtgagcgcggtcgtcggagtttattttcgacgtatttttatagcgtggggagaggttgtgtgagttgaattaggaagtggggtagttagttgtaatttacgataatatttgtgatcggaagagggtagttatatggattttttttttttttttttttttttttggttaaacgtaaaaaatagtcgagtgtaaagggaagggtttaggtcggcgtaggttgtttttcggcgcggtattttttcggcgttggtcgcggtttcggcgggttttcgtttgggtgttcgttttttttggattttatatattttagcgagtttcgtaaatataatgaattcggtagtttcgtagattcgtatcgcgaatttaaggtggtaatttgtttataattttttttttttcgattaggttttaaggagaggcggtttaaaatttggaaaacgggggggatattttttttcgagaataattttttaagggagtagagattttatgtttaataaaattaaaattggttgttaaaaaaggaaattatttttatttcggttttttttttttttttttttttcgtttttttttatttcgtttttttttttaagatgttaagaaatgtggtagtcgtataggagtttaggttgtaaataggggtaggggcgtaggaggaagaagtttagggtagggggtacggggtaggatagtgtcgcggtcgtttttgaggtggttcgtcgtggacggttttttagtgtttcggaaaaggtatattagggagggcgtgtgtatatatatatatatacgtatatatatatatttttattttttgcggattttagatagttttttttttttaggattagagggagggtttgaattttttaatttttatttgtttgttgttttttttggagaggtgtgagtgagtgtgtgtgtgtgtgtgagagagagaggaagagagtgtgtgtgtttgtgtgtggcgggggcgattttaaagagttagaggagggaagagaaagtgggaggagagagtttgaaatgtattttggaaatttgttttagagcgaaggcggcgtcgtagtagttgggtcggtgtagatagtttcggttcggcgcggtagtacggcgtagttttttcgttcgtttgcgtttttcgtttttagtcggtcgtttcggggtatcgatatagtcgttgtcgtcgtcgtcgcggttttggggttcggcggcgttattagtcgaggttatgttgtcgtcgtcgtcgtcgtcgtcgcggggacggaggtttttcgggcggttcggcgcgttgttgtcgttgttgcgggtttttggcgcgtttgggcgttcggtttgcgaggacgttgttggtcgtaggttgttcgggttcgggtttcggttgatagattagtcgttgttgttgtttatacggcgggcgttgttgtcgttgcggtcgcggtcgttgtcggggagttagattttgcgttttttattgttatattgcgcgggggtttcgaggtttttgcggtcgtcgttgtttatatttagttcgcggaagagcgagagtcggcgcgtcgagcgagtttgtttttcgggcgttttcgcggtattttttgcggtttttaattttttttattcgtttttcgtttcgcgtcgcgatttttttattgtagaaagagttagcgaattttcgttgttttcgtcggtcgcgttggttttttcggcgtttttcgggtcgttcgagcggtcgcggagggtaagcgtagagtcgtcgtcgtcgcggggttcgagggtgttcggcgggttttagcgttgtcgggttcgggtagtcgtagttgtcgttgttttcgcggtggttgttgttggcggtggcggttttaggagttgttgttcgggttgttcgggttttggttgttgggttcgcggtggttgttcggtttcggattttgtttttttgtgtttttcggtaattcgttggattattttgttttcgtgtagcgcgtttttttcgttttcgggatttggggatttcgttttgtgtgtgtgtagcgggtagcggtcgtagtagttttttgatttaatagatgagatggaagaagaaaaaaaagaattttttttatttggagaaagaagaggaggaggggaggggagggggtggagggggagagagcgagcgaaagagaaaaaggttggagttttcgttttcggggttgttagatggtttgggtttttgcgacgcgattggttcgcggagggtagaaattatttagtaaatatgattattattagttgtttagtaatagtttattaaagtagagagattatttaggtaggtaatttagtgtgtgtattttcggtttcggggtagtttttgagagcgttaattttttcgtatgtaatatttttattaaggaatgttttttttttttttttttttattttttttttttttaatagtgttttttttttgtgggatgtttttgcgcgtatatacgcgcgcgtacgtatatatacgaatatttgtttcgcggtagatacggggggaaatgtaatatttttttaagcgtttaaataatttttgaaattttttaaagaaaagttttttagaggtattttggttttaagttgtagtaaatattgggaggttcggttcgtatttttaggtttgtattaataatgatagcgtgttggatagtgcgttagtgtgtgttagatttttttttttttttttttttttttttataattaaagggaagatttaggtttttgtagggaataacgtttcgtattaagataaatagaatggaaagttaaagaggaaagtaaggacgttgggaaaagttattttttttaaaattcgtttgttttttagtcgttttttttttttaatttaaaaaaaaaaaaaatatagttttggtttgaaggagttagtgttttataaacgtggaatttagatatcgaagtagttttgtagaggtagaggcgtttttatttgaatttcgaatgtgatataagtaaaagagaaataatagaatttttttttataatttagagaaacggaattgtttttttgagagagtaaagtttttttgattattttgggtttatttgtatatttttttttattaattagatgtttatatagttagtatttttttttataaaattcggtatgtatgttatatttaataatagtatgacgtaggagattataaatgtttcgatgttggatttattgaaaataaattgtgcgcggatcgcgaggattcgtttcgatatcgcgtttagtgttattaaggtatttcggggattcgtttttcgcggagggggaaaatacgcgattttttgaggtggattttggagttagatacgtttatataattaggttttttatttaaaaaaatttttgttttcggaaaagtggaatgtgttttttttacgtttttaagttattacgtttttttttgcggtaggaattcgattcgtaaatttttgatttgttttattttatttttttttttaaacggggttgaattgtagagggattggtagtagcgagaagtttagtgaagtcgtgaaatggggcggtgtggttttaagatgcgtacggtgtatgtttattgaaaaaaaaagaagaaagaaaggaaaggaaagaaagaaatttagatggagggaaagggggaggagtagggagaaggcggagtttcggtggttacgtgatttcgcgttaggaggttcggtgcgcgcgcgcgttcggttttcggatttttcgcgttcgcgcggtcggggtagagtaggtagggaggcggatgcgtcgggtcggtttcgggtttttagcgcggtttttcgagagtttaggcgaggcgcgcgtttagtcggcgcggacggacgtgtcggacgcgtcgtagtatatttttgaaggcggatcggtttttttacgttgtttaatgttcgcgtcgttttttcgcgatcggttaatggtcgcgtttacgagtttttgtttatttagcggtttcgcgttggttgttcgggcgcgttgggggttgcggcggggcgcgtcggttatcggggcggtttacgcggttttcgtagggggttcgttcgtcggtttttttcgtttttttttttttttttcggcggtttttttttttcgtttttttttttcggtttgcgtttttttttttttttttcgtttcgtttttttttttaatttttttttttttattagtttggttattttttttttagttttttttttttttcggttttagggggaggtttttttttcgattttttaattcgtaaatcgtatgcggtgtcggggttagggcgggatgtttcgaggaagagagggagacggggtggaggtgtttgggggcgttcgcgggattcggagggggatttgagtatcgggttagcgcggaaatttaaaatttagatcgtttaaggagtacgtgattttgtgagtgttttagggaagggttgcggaaattcggaaagtaggcgggtagtatgcgaggaaaatgatattgagttgataaagagtttagacggttttatatattgttagttttatttttgagtacgattttgatgtttattaggtttgataaatagtataaaataggaaaagaggtttattattttagttttttttattgaatggttatgtcgatattttaagtcgaattattgtgtgtttgtttttggaaattgttttttaaaaattgggggaggggggtagtatttttagttttgtatgttagtttttttatattttaagtttgttggagggtaaggaattatatagttaaagatacgttgttatgtttgtttttttaaatttttttattacgttttggtttaaaattattagtgtttcgttttaattttttattagagggattttagtatagtttgtttggaagaaggaattttggaaggaaatggtaagttgtgtgttcgtaatggattcgttttatttttcgtacgcggttgtatgttttttggtttcggcggttgttatatgtacgttattttagtggtaaagttttttttatttaggtttatattttttagtttgatttaatttttaaacgttttgaatattgattttcggagtttttagtgttttgagttttttcgttcgttgtttgatgggttaattttttagtattttagataatggtttcggtttgtaaattttattcgtgggttttaggacgtatttcggagtttcggttttaacgagcgttattttaatttttttattttttattcgtcgttttttttgtggtttgttttttttatatttagagatgaattattttgaggatttaattggttttgtttttgtaacgttttaagaaagggaagaggagttagtgtaaaagtttgttcgatttgggtggttagggttgaggttgtttttaatttgttttattgttgatgtatgcgagtgcgatatttttagcgataatgttgtttttaattaatttgtttttatttatatttgtaagtattgtcggttttaatatgtatgttttgtgtaggggattgttgtgttatatcgggtttgttaattttaattaattataaggattttatagatttgagatgtagattggggtagttagatttgttaaggtgtttttcgggaagatagtttttttaaatggtttttttgtttttggtattttttgtgatagttattaaataaaaataagtgagaatttggggttttattagttagtaggagttgttagtttttatgaagtaatagttgagtgttttattttttttttttaagtaaagtttattttaatgtataaattgttattttggttttttagttatgatttaagattttttattggagtgtgtagtttttaaagtagatgttttaagtttttcggatttttttatatttttttttttttttgttttaatattataaatatttatggttatattatatatattttaaaaatgatattagattatttaaatgatgataatgaaataaaatatttgttttttgtgttgggatgttttaatggtaagtaattgtggaagttagatttggtggagttatgaaaaattatagtgagatttaattttttattggttttttagattaaattaaatgagtttttaaaatttaatgtaatttggtaagttttgtagagtataaatgaataaaggggttaatgtattttagtaatttgattttggggttatttataattttg

SEQ ID NO: 1529 - DNA, 7110 bp, Artificial Sequence
  chemically treated genomic DNA (Homo sapiens)
tgttttttgtgatgttttagaggttagaaggatgttttgaaggggaaaattgtaggagttaggtagagtagggttttggtttttttttaatgtttttttatttagataaattcgggttattttgtagaggttgtagtgagttatgattacgttattgtattttagtttgaggaatagagggagatttcgttttaaaaaaaaaaaaaaaaaaaaaaaaaaaaaaaaaaaaaatttcggtttattttatgaagtatttggtaggtgttttaatattttttggtatatgggaattatttttttttattattggaaggtttaaaaagtaaataatgtgttttatatggttagagttagtattaaggggattaagtagaataattggtagttagtgttagtttggagattaatatagttaaagttgttttgttatgttatgttttttttatttgtattgttttacggtttaagataaaatttttgaacgttatttggatatagtgagtatttggtttgttttattgtttttaggagtaattaatttaatttttatttttttgagaatgatgattttatatagtatatttttttattaagatgtgaaagatgatattatggtatttgaaatagttttaggagagatttgggatatgggaagtttgtagataataatggaaaatttttttttagaatatagttatttgtatgatttatagtagcgttttttggagaatgttttaaaattatttttattgaaagaataataatgtttgttattaggataaatgaaataaggggaaaattttagatttttggaataatgggtttatatttaatttaatgattattatgtttttatattttgtattatttagaaaatagtagttaaatagatagaaatatagaagattgtttaaaaattaaagttattgagttagatttttttttgaaaggttagcgtatgggagatgagaaaggtattatagagattagagtgtttatataaaagatattttagtagatgatttataaagagtatattaagtatttatattatttatattaagttgttggttatttcgtttattaaagaaaataagaaagaaattttttttcgatattattttggtgtagtaataatagagttttggaattagttgttagaagcgataattaaagttagtttattatgtttattaattaatttatatagttattttgaagttttatataattgtttttttgttataagtttttatttttttttatggtattttggttttgaatttagataggtaaagaattaagtatggtcgggcgcggtggtttacgtttgtaattttagtattttgggaggtcgtggcgggtagattacgaggttaggagatcgagattattttgattaatatggtgaaattttgtttttattaaattataaaaaattagttcggtatgatggtgtgcgtttgtagttttagttattcgggaggttgaggtaggggaattgtttgaatttgggaggtagaggttgtagtgaatcgagattatgttattgtattttagtttgtgagatttcgttttaaaaaaaaaaaaaaaaaaagaaaaaaaaaaaaagaattgaagtgtttggagattagtgtattgtaatatttatatagttaagtaggtatttttaattgaattttaaaaaagtattatttttgaaattttttttagtttagatagggttagttatttgggtagaaaggaaaagaaaaataaaaaattggaaaaggatgtattagtattttttttagaaataatttaatattaggaatagaaggaggattttatttattaatttttaataattatttgatgttgttgttgggttggttaaatatttgttaatattgatgatttttttatttattattagagagaagtagagggatttgatgtttagagaagtagtaaaatttattttttattttttttttttagtcggatggaagtatttggaggttggttttatattttagtattttagtgttggtgatgtagattatttttgttttagagtaattttgtgttatggaatttaagaggattttgtcgtattaggataggaatgtatttttgttttatttgtttttatgaaagtagattttagagatttttagatgttatgagattaattgttatttagggtaggttttaggggagggatagagaagggtagtgttaataatagggattttggagataagattagtaatttaagaaataaatgtgagatattttatttttttttaatttattttttttttaaaagtttatttttattttttttttttttattacgtagtaattgataattaaatatagttttggtttttattatgtaatttagtagaatatttagatattaggaattttttatttttggttatttatataataatgaaatttgtagtttacgttaggttgtgtggatagtatttgtatttttggaaattaattggaggttttttttttattttttttcggttgttttttatttttttttttattgtggtttttgttttttttaagttgattagaattatgtataaaattagtttttaataaatattaatattgaagttttagtaggttgttaatttttgtatagttattttaaatgttgtatataagtgtaaagttttatggagttttagaggtttttaagaatattgtaaatattttaggtttaattagtagtttcggagttaggtaatggtttgtggttttttgcgttaggttttttgaggtttttagtttttagaggttgtttgtaattatgatgtgtatatatatagtatttttttttaaatatagtataaattttttttagattttgttaggtatttataattattgaatatatatgtagattgatttttatttttttaaagtttgaaaaataatttagtgttttaatttaggtttcgttagatattttttgatttaaattgtcgtttgtagttttattttttaagggaaatgaaaaaataataaatttttagattggtgttgatgtttattttttttaagcgggtcgattatttgttttgtagatttttgacgggtggggtgcggggtaggagtgcgatttaatttttagtattttcgaattagtttttttacggtgataggttagtttaatcggggttgtaaatagatttgataggtttgttttgggttgacggttattgattaggtttttagattagataagttatttggttgagtttatagtaggtggggcgcgtttattagtttaggggtagtgattggacgtttgttgtaatatcggagaatgtacgttttgggttgtagtaggagatatttttaagtatagaattaaaagggtttattttaagcggtagggtattagcgatggagaggttcgagagttttagcgtttagtttttttttttacgtttgggaaggcgtagaataggtcgatgtagagtaaggagtgagttttaggttttagttttttggtttgtttttagggtagtaggcgaggagtggtattagtttggggatttttttttcgcgttttgtaagaatcggcggtagttagtaggcggggaggcgggggtacgtgtttggatgtgggtgtttgtgtaattagttttttaagcgttagtttcgatagcgttttttcgggaggttggttcgagtttttgttttcgtcgcggcgtaggaagggttggggtttcgttgtttgtattaggtaagagtatttcgagtaaaggaagaagacgatttgttttcggagttattattggggagtgggaatttggaaagttttttaattagggatatacgtgatttttttcggaaagtagtttcgattgtggttcgtgtatttttttatttttttttgaatttttttaggttttttcgtttcgtttattcgttgggttgtagttttttatcgtttcgtattttttatttaattcggtaattttaaacgtgtacggttcggtcggggcgcgcggagtttggtttcgggcgatttattttgtcgggtttttacggcggttaagggggggcggggttaggtggtttttgagaatcgagtttgatttcgacgtcgcgaatcgatttggagttcgaggggaaagatgttcgatttttttgggggtatcggagcgggcgtaggagaggtttgcggggtgcgttttatttatagggatttttttttagtttatttagataggtgttttttgggtttttgaaatttaacggttatgtgtttacgtttagtacgttcggttgagagtttttatttttagggtaaacgagtcgagttatcggggaagcgagaggtggggcgttgtaagggagtcggatgaggtgatatacgttggcgatataatagtaggttgttttttgtgttaagattgatattatgaggatatagatttgggggaagggggaatttttaggtaaaggttgttatagttaaatttttgcgaacgattgtgattcgatagcggtgtaaaaggaaagagcgaatgtagtttacgtcgcggaaatttaggggtagaggtaaggggggagggtattttttttgtagggatcgtttttgtatttttttttatattgagtagcgtggttatttggttttttttatttgtgtataggtaattttagattcgagttagtgatattgtttaacgtatttattttagtttttattattagttttttattttcgttttataatagtttattttgttttcggttgggtttttgggtagaggtcgaggtttagttcgttattttcgtttcgcgttgttgtaaaagtcgtagtaagtgtagttgtaggttggcggttgggaatcggttcgagtaagttttaggtagttatattgggtatgtttagtagagtttgcggtttggggattttgcgttcgtatttagagttatcgttttgtttttttttatcgttttttgttttgttttgtttttttttcgttcggcgcggtttcgttcgtttttcgttcgtttttcgttttttttcggtttttcgaggcgttcgggttttcggcgcggcggcggagggggcgggtaggtcggcgggcggtgatgtggcgggattttttatgcgttgcggtaggatacgcgttcggcgttgggacgcgattgcgtttagtttttttttttcggaagttgtagttatgatggaagtttgagagttgagtcgttgtgaggcgaggtcgggtttaggcgagggagatgagagacggcggcggtcgcggttcggagttttttttagcgtttgtgagtagtcgcgggggtagcgttttcggggagtcggtcggtttgcggcggcggtagcggcggcgtttttcgtttttttttcgttttttttaatcgtgtagtttttttttcggttttttttgaaagggaaggtggaagtcgtgggttcgggcgggagtcggttgaggcgcggcggcggcggcggtatttttcgtttttggagcgggggggagaagcggcggcggcggcggtcgcggcggttgtagttttagggagggggtttgagtcgtttgttattatttttagggttgggaacgtcggagagttggtttttttttttttattgtttttaatacggcggcggcggcggcggtatatttagggattcgggtcggttttaaatttttcgttcgtcgtcgtcgtatttttcgtggttcgggtttcggaggtcgtcggcggaggtagtcgttcggaggattattcgttttttttttatttcgttgtcgtcgttgttaggtttttggttgttgaggagaagtaggtttagtcgttgtaattatttagtagtcgtcgtagtagttattattcggttgcggtttagagttaagcggcggtagagcgaggggtattagttatcgttaagtttagagttatttttattttgtagaagaagtttcgttattagtagtttttgttatttttttttttttttttttttagttataggtttttagatatgatagttattattaaagagatcgttagtagaaataaaaggagatattaagaggatggattcgatttagatttgatttgtatttatttttgcggttgtttttttttatttttttgttatttttttagaacgtgggagtagacggatgcgaaaatgttcgtagtttgggtgattataatatttaattttggttaggttgttaggttatatattttgtgttttttttttgtgtatttaatttagggtgtgtttggttagacggaatttttgtttggttgtaagtgttaagttatcgattgtttttttaggttatttatatggtttttttttgagggttattgttcgttaatatagaatatagtatattgttagtggattagcgagttcggtaattcggttttttaaatgaataaaaaagtagacgttttttgaggttgagtatatttcgattaaattttggtttaggttttagattaagggtttagattagaataaaatgaaaattagtgttgtacgtacgtatattgtattagaattttgtagtgattgttttagttttttgagttgtattgatagatttttttaaaatatgattgatttgtataattttagaagtagaattatttttagtatatatggtgtatattgagggtaaaaagtagttttgttaatgtttaaatttaagttatttataattttgaattgtatgtagaagttttgtagtttgaagttaatagtgttataatatattttataaggcgtttttattagatttttgttatatttatttttttttttttttatggggtgatgtaggatagtgtttgaaatttgtattttagtagtatttaatgtttagtgtttttgttataaatatagaatggatattgagtagtttttgattttagatggtaatgtgtaggtttaagggtattgtgtgtagtaagtgaagattgtagaaataaaattttagtttatgtttgaaatttaagtattgttgtgatgttagaattgttgtttatcgtttttaggttttaggttttttgatattttttggtatcgttaattttattgatttg

SEQ ID NO: 1530 - DNA, 7110 bp, Artificial Sequence
  chemically treated genomic DNA (Homo sapiens)
taaattagtaaaattaacgatattaaaaggtgttagaggatttgaaatttaaaaacggtgagtagtaattttggtattataataatatttaaattttaagtatgaattgaagttttatttttgtaatttttatttgttatatataatatttttgaatttatatattattatttgggattagaaattatttaatatttattttatgtttatgataagagtattgaatattaaatgttattgaagtgtaaattttaagtattattttatattattttatagggagagaaaaaggtaaatataataaagatttagtaagaacgttttataaggtatattatggtattattgattttaaattataaaatttttatatatagtttaaagttgtaggtaatttaagtttaaatattaataaaattattttttgtttttaatgtgtattatatatattgaaaatgattttgtttttaaagttatgtaaattagttatattttaaaagaatttattaatgtaatttaggaaattaaaataattattgtaagattttgatgtaatatgcgtacgtgtaatattaatttttattttattttgatttaaatttttgatttagggtttaagttaagatttaatcgaaatatgtttaattttaaaaagcgtttatttttttgtttatttaggagatcggattatcgagttcgttaatttattaatagtgtattgtattttgtattaacggataatagtttttaggaagagattatatagatagtttaagaaagtaatcggtggtttgatatttgtaattaggtaagagtttcgtttagttaaatatattttaggttgaatatatagaaaggaaatataaaatatatgatttagtaatttgattagggttaaatgttatagttatttaaattacggatattttcgtattcgtttatttttacgttttaagagagtgatagaaaggtaaagaggagtagtcgtagaaatggatataggttaagtttaagtcgaatttatttttttgatatttttttttgtttttgttaacgatttttttgatgatggttgttatgtttgggagtttgtggttgaagaaaaaggaggagagagatggtagaagttgttggtggcggggttttttttgtaggatggaaatggttttggatttggcggtagttgatgtttttcgttttgtcgtcgtttggttttggatcgtagtcgggtaatggttgttgcggcggttgttggatggttgtagcgattgggtttgtttttttttagtagttagaggtttggtagcggcggtagcggaatggggagaagacgaataatttttcgaacggttgttttcgtcggcggttttcggagttcgggttacggggggtgcggcggcggcggacgggaggtttaaaatcggttcgggtttttggatgtgtcgtcgtcgtcgtcgtcgtgttggaggtagtagaaggggagagattaatttttcggcgtttttagttttggaaatggtgataggcgatttagattttttttttggagttgtagtcgtcgcggtcgtcgtcgtcgtcgtttttttttttcgttttaggagcgggaggtgtcgtcgtcgtcgtcgcgttttagtcggttttcgttcgagtttacggtttttatttttttttttaggagaagtcgaggaagaggttgtacggttagaaaagacgaagaggaggcgagaaacgtcgtcgttgtcgtcgtcgtaggtcggtcggtttttcgagggcgttgttttcgcggttgtttataggcgttgagaggggtttcgggtcgcggtcgtcgtcgttttttatttttttcgtttgagttcggtttcgttttatagcggtttaatttttaaatttttattatggttgtagttttcgagaggagagaattgagcgtagtcgcgttttagcgtcgagcgcgtattttgtcgtagcgtataaagagtttcgttatattatcgttcgtcggtttgttcgtttttttcgtcgtcgcgtcgggagttcgggcgtttcggaagatcgaggggaggcgggaggcgagcgagaggcggacgggatcgcgtcgggcgaggggagggtagggtagggtagggggcggtaggagggggtagagcggtagttttgggtgcgagcgtagagtttttaagtcgtaggttttattgagtatgtttagtgtagttgtttggggtttgttcgggtcggtttttagtcgttagtttgtagttgtatttgttgcggtttttgtagtaacgcgaggcgaggataacgagttaagtttcggtttttgtttagaaatttagtcggaggtagggtaggttgttgtggggcgggggtggaggattgatgatgaaagttgagatgggtgcgttgagtagtgttattgattcgagtttgaggttatttgtgtataggtgaaaaggattaggtgattacgttgtttagtgtagagggaaatgtagggacggtttttgtaaggggaatattttttttttttgtttttatttttagattttcgcggcgtggattgtattcgttttttttttttgtatcgttgtcggattataatcgttcgtagagatttgattgtaatagtttttgtttagagattttttttttttttaaatttgtgtttttatggtgttagttttagtataaagagtaatttgttattgtgtcgttagcgtgtattattttattcggtttttttgtagcgttttatttttcgttttttcggtaattcggttcgtttgttttaaaaatgaaagtttttagtcgagcgtgttgaacgtgaatatatagtcgttgaattttaagggtttaaagggtatttatttaaatgaattgaaagaggatttttgtgagtgggacgtatttcgtaggttttttttgcgttcgtttcggtgtttttaagagagtcgagtattttttttttcgggttttaggtcggttcgcggcgtcggagttaagttcggtttttagagattatttagtttcgtttttttttggtcgtcgtgaaaattcggtaggatggatcgttcggggttaggtttcgcgcgtttcggtcggatcgtgtacgtttggggttatcgggttgagtggaaagtacggaacggtaggaagttgtagtttagcgagtgggcggggcgaggagatttaggagggtttaaaaggaggtggaaggatatacgggttatagtcggaattatttttcgaaggaggttacgtgtgtttttagttggggaattttttaaatttttattttttagtgatagtttcggaggtaagtcgttttttttttttgttcggggtgtttttgtttggtgtaggtagcggaattttaattttttttgcgtcgcggcggaaataggggttcggattagtttttcgaaggagcgttgtcggggttggcgtttggggaattggttatataagtatttatatttaaatacgtgttttcgttttttcgtttgttggttgtcgtcgatttttatagaacgcggggagagagtttttaaattggtgttatttttcgtttgttattttaagagtaagttaaaggattgagatttgagatttattttttgttttatatcgatttattttgcgtttttttaaacgtgggaaaaggagttgggcgttagggttttcgggtttttttatcgttgatgttttgtcgtttagggtgaatttttttggttttgtgtttgagggtattttttgttgtagtttagagcgtgtatttttcgatgttgtaataaacgtttagttattatttttgagttggtgagcgcgttttatttattgtggatttagttaagtgatttatttggtttgagaatttagttaatggtcgttagtttagaataaatttgttaagtttgtttatagtttcgattgggttgatttgttatcgtgagagagttgattcggaaatgttgagagttggatcgtatttttatttcgtattttattcgttaaggatttataaagtaagtagtcgattcgtttaaagagaatgagtattaatattagtttgggaatttattgtttttttattttttttaggaagtagaattatagacgataatttgagttaaaaaatatttaacgagatttaggttgaagtattgagttgttttttaaattttgagagaatgagaattaatttgtatgtgtgtttaataattgtaagtgtttagtaaagtttaaagagggtttatgttgtatttgagaaagagtattgtatatgtgtatattatagttgtaggtaatttttgaagattagaaattttaagagatttagcgtagaaagttataggttattatttaatttcgggattattaattaaatttgggatatttatagtgtttttagagatttttgaggttttataaaattttgtatttatatatagtatttaagatagttgtgtaggagttaataatttgttgaagttttagtgttgatatttattgaagattggttttgtgtatagttttggttagtttgggaaaggtaaggattatagtggaaaaggaaatggaaagtaatcggaaaagagtaagagaaaggtttttagttgatttttagagatgtagatattgtttatatagtttagcgtgaattatagattttattattgtataaataattaaagataaggagtttttgatgtttaggtgttttattagattgtatggtaaaaattagagttgtgtttaattattaattattgcgtggtagaaaaagggaaaatgaagatgaatttttaaaaggggagtagattagggaggggtaaaatgttttatatttgttttttagattgttgattttgtttttagagtttttgttattagtattgtttttttttgttttttttttggagtttattttaagtgataattagttttatagtatttgagaatttttgaaatttgtttttatggaagtaaatgaaataagggtgtatttttgttttggtgcgatagaatttttttggattttatggtatagagttattttggagtagagataatttgtattattagtattaaagtgttagaatatgagattagtttttaagtatttttattcggttgaagaaagaaaatgggaaatgggttttattgtttttttaaatattaggtttttttatttttttttagtggtgaatgaaaggattattaatgttggtagatatttggttagtttaatagtaatattaggtggttattaggagttggtgaataaaattttttttttgtttttagtgttaagttgtttttgaaagaaatattgatgtatttttttttaattttttgtttttttttttttttttatttaaatggttggttttatttaaattaaagaaagttttaaaaatagtatttttttaaagtttagttgaaaatatttgtttggttgtatagatattataatatattggtttttaagtattttagttttttttttttttttttttttttttttttttttttgagacggagttttataggttggagtgtagtggtatgatttcggtttattgtaatttttgttttttaggtttaagtaatttttttgttttagtttttcgagtagttgggattataggcgtatattattatgtcgggttaattttttgtagtttagtaaagatagggttttattatgttggttaggatggtttcgattttttgatttcgtgatttgttcgttacggttttttaaagtgttgggattataggcgtgagttatcgcgttcggttatatttagttttttatttgtttggatttagaattagaatattatagggagaagtagaagtttgtaataaagggataattatataaagttttagggtgattatgtagattgattagtaagtatggtaaattagttttaattatcgtttttaatagttgattttaaaattttattgttattatattaaaataatgtcgaaagaaaattttttttttattttttttgataagcgaaatgattagtaatttgatgtggatgatataaatatttgatgtgttttttgtaggttatttgttaagatgttttttgtgtaaatattttgatttttatagtgttttttttattttttatacgttgattttttaaaaagggatttaatttaatagttttaatttttaaataattttttgtatttttgtttgtttaattattgttttttaaataatatagaatataaaaatataataattattggattgaatgtaaatttattgttttaagggtttgaggttttttttttattttatttattttaataataaatattattgtttttttaataaagataattttaagatattttttaaaaggcgttattgtgggttatataagtaattatattttaaaagagaattttttattattgtttataagttttttatgttttaaattttttttgaagttattttagatgttatggtgttattttttatattttggtagagagatgtgttgtatgaaattattatttttagagaaataagggttgagttggttgtttttgagaataatagagtagattaggtatttattgtgtttaagtggcgtttagaaattttgttttggatcgtggagtaatataaataaaaaagatataatatgataagatagttttgattatgttagtttttaggttaatattagttattaattattttatttggtttttttaatattaattttagttatatggagtatattgtttgttttttagattttttaataatagaaaaaggtaatttttatatattagaaaatattgggatatttattaggtgttttatagagtaggtcgaaattttttttttttttttttttttttttttttttttttttgagacggagtttttttttgttttttaggttggagtgtagtgacgtgattatggtttattgtaatttttgtagaatagttcgaatttgtttaggtagagggatattgagaaggagttaaaattttgttttgtttaatttttataatttttttttttaaaatatttttttggtttttaaggtattataaaaaata

SEQ ID NO: 1531 - DNA, 7128 bp, Artificial Sequence
  chemically treated genomic DNA (Homo sapiens)
ttgtttttttgaattattttaatatttttgataaaaatttgttgaatgtttgtatatgtgtatatatatttatatttttatatgtgtatatatgatgttttttataatatttttttttattgatttatagattagtgttttagtttgttttgtgttattataatagtattatatttgggtaatttataaagaatataaatttattttttaatgttttggatgttggggatgtttaaaagtaaggcgttattatttggtttttggtgaaggtttttttgttttgtttttatatgttaggatgataagaaagggattaaattttttttgttaagtttttttgtaagagtagttaattttatttttttaagagatgtttttatagtttaattattttttaaaggcgttattttttaatattattatagtagttattaagttttaatacgaattttggagaagatatatttaaattatagtatgtttatttttatgttagtattacgttgttttgtatataataatagtaaaatatagttaaatttgtaaaaataagtatttgaattttattaaattattgtattggaaggtatttaaaagtatatagaaattatagaagagaaaaaaagatttgtaaatgaaaggagtaaaaattatgatttattggtttttgggatcgaggattttgtttattttttatgattatggttatgggaaatattggtagaaaaaaaaaaattatagttttattggtaaaaagttttagagattggagttaaggtttgaaaagttattgtaaatttaagtaggaaattttggtaatgagaattagagaagaaatgagatagaattatttaaatttatgttttatagtaaattttgtatgagtgaaggagattatatgaagtttgaggaaaaagtaagtaaagattagatagaaatttagttttagtattttgggaggttaaagtgggaggattatgatgttaggaaatcgagattattttggttaatatggtgaaattttgtttttattaaaaatataaaaaattagttaggcgtggtggtgggcgtttgtagttttagttatttgggaggttgaggtaggagaatggcgagaatttgggaagcggcgtttgtagtgagttaagattgtattattgtatttaatttggatgatagagtgagatttcgtttaaaaaaaaaaaaaaaaaaaaaaaaaaataaaatatatataaaaattattatttaagaatatatttattttgattattttgatgttttatttaaggggatgtatttttttttgtgttgtgtgtattttgggtgggagaaagttgaagttttagaaattttaaatgttagggaatagttttaagttggtagagtagttgtaaataagaggagaatttttagaattaaggaatttatatagaaggtgatttttattgttaattgattagtaaattatataggtatagggaaattaatttttaggaagttaagttaaaagagtatggaaaattatgagaatgaagtagagatattaagagtagtatgttttatgggaggtaatattggtagtttgaattcggataagttaattgttaaatagagtaaataaatataaaatagataatatttagggaaaaaaattcggtagattttagagttattataatatattataatgtttagtttttaattaaaaaaaataggtatgtaaagaataggaagaaaagatagtagaaaaggtatttatagaaagggattttttgatttagtaaagatttttaggtattgtttttattttgatatagtaattatattgattgatgtttaaatgttaagtttatattgtattgtatttttatgataattattttgagaagataaaagttatgggattagtgttttttttgttatttggtatttagaattagtaattttgtattaaaatataaattttatgaatataggtattgttatgtattgtttttgtatttttaatgattgaaatagtgtttgatatagattgggtgtttaatgaatggttattgaatgaatgaatgattaaaatataaattaaaattattggttggttttatgaagaaagatttttagatattttttatttatagtgaggtaattaaaggttgattatgtgatttattattaattttattttgtatttatatttaagatttttaaatagatgtttaatagaagtaaatagtaaaataaatttattattattagttaaatattgatatatattatatattttaagttgtagggtataattaagtaatttgtgaatttaaaatatgtttaggttagaattttattgaaaatataataggtgaatatatattttaaattaaaaaaaaatgaatatttggttttttagtttaattttttattggtttattgattgttaaataaagttgttaatttgtaattttaaaggaaaataaagtgattataattatgtattgataagtagatttttaggaaagaaattagagattttttaagtaaagtatttattggttttatggaaattttttttaaaatagtataaagtatgttattagttttttggttattagagggtggtgttgttttagattaatataatttatattatattcgtagtaattgattagaaagtattaattagaatttaattgttagttttatattgttattttataaaattttatagttatttgtttataaggtgaatagttaaaggtagataatataggatgaagtaaagtgttgaaagaagagaaatatttaaattatttgaaatgtaatatattttgtttattggtatagaggttagtgagaggttaataattttttattaatatatgtttcgacgtttattatgtttattaagtttaattggttatagtaagtattttagtgggagaagtaaaagttttaaagaagttaaatatttgtgaataaaaatgagaatagtttttgatgtaattggaaaaagataagttttgttttttttgttgtgtgaatggtgatatggttttaaattttaaatattgaattatattagaattttattaattatagatggtataaatttgatagttatttttatttaaatgttttggataaagttttgtttaagaataattttaaatattattttatttttaaatgatattaggttagaaaaatattattttaaatataggtttgagattaatttaaaataataagataaaagtttacggaagattttagaattaaattattttattttttttagttgttgtttttattgtaaacgtgatattttagttagtaaaacgtaaaagtgtaaaatatttttaaatgatagtaaaatataaaatgaaatttatgttgtgattaatgtattttattaaaatggagtttaagttgtatttttgtttttttttttttaaaaaatatataatgttatagtgatatttttttaaatttttatatagaattaagataatagtatataaagtatgtagagggatatattttatttttattttttaatagtaatttaaaagttaagaatatttatatagaatattagttaagttaggaaaggtaaaattgattgggtttgttttgaaagttgatttgtgttaattaaaataatggtttttagagtgttatatgattaagtttaattttttaaatatgaggaaaaatgaattttgtaattatttttaaaaatttttttattttttagatagtgtaaaaaggtaaaaagtaaaaaatataagatttttttaagattaggggaagatgattttatcgttaatatttatttgttgagagtagttatgggatttatgttaggaatatatgttttaaataagatgggatttgagaattgttgagagattttaggaatattttttaattttatggggttttagttattttatttttaagggaaataataatagtaatagtattttggaggatttttgtgataaaatgagaaaatgtttgtgagaagtatataaaatattggtttattgaaagatgttacgaggtaagtaagtatgtttatttttatttaatgtttattattttaaaggtaaagtttttatatagattaaggtttttataatatttgaatattttttttagtttttattgtatgaagataagaaggatggttggaggttttgtaaggaatattttttttttttgttttttttttatttttataggttgggagtagttgattttattattttagatatgtaaattgatgttatttttttgtagttatttttgttatagttgatttttttgttgggtggtggggaggggagcgggtaggattaggcgaggggtagtagttgggattttttggttttggaatttaattattcgatgtatttgtttttttgtgtttatttttttaagtttataggtattgtttagtaattttatagtttttagcggtattttaggggataggatattttggtttttttataattattttagagttataaagtagaaaggaaaaaagttaacgattagttatgtaaaggtttgtgtggattgtttaaggataggcgatttttattttattagagttattaaaggattttaggagaaggatttcgtttttgtaggagcgtttgtggttgaagaagtaggaggacgagcgtttaggtgcgtttcggtagtttgtttggggttcgtaagtttagtgttatttattagttgtttgtcgtttatcgatattttagcggagaattggaggagattttagtgggttttcggttcggttaggagtagggcgttttagaggagatcgtttggggttttttaatttaggcgattaggataggtaatagttaagagaggcgtttagttgttttgtattttttttttatttcggttttgtttatatttacgggcgtttcgttttttcggttttataaaggggattcggtattttcgcgcgtttcgttattagaggttttttagagaggaaggcgtggttttttttcgggttagtgagttttggcgtcgtcgcggtcgcggttttagtagcggagtagggcggcggttgcgtttcgtattatggggggtagtttagttttagtcgcggtaaacgtcgattttcgtcgtcgttcgcgtcgcgtttgttttttttcgttgcggttttttggacgttattttttttttatttcgaagttaatatgaaggagattcggggttacggaggggatgtttttttttgtattcgttttaattatttttatataggtatgtgggcgttcgagcgtttcgtcgaggcgcggggtaattttacgcgttttttagggtttggcgaggattgcggatcggtgttcgtggttttttcgattattatgttgtttattggtttcgtgggtaacgtattggttatgttgttcgtgtcgcgtagttatcggcgtcgggagagtaagcgtaagaagttttttttgttgtgtatcggttggttggcgtttatcgatttggtcgggtagttttttattatttcggtcgttatcgtcgtgtatttgtttaagtagcgttgggagtatatcgattcgtcggggcggttttgtatttttttcgggttgattatgattgttttcgggtttttttcgttgtttatcgttagcgttatggtcgtcgagcgggcgttggttattagggcgtcgtattggtatgcgagttatatgaagacgcgtgttattcgcgttgtgttgttcggcgtgtggttggtcgtgttcgttttcgttttgttgtcggtgttgggcgtgggttagtatatcgtttagtggttcgggacgtggtgttttattagtatcgggcgagggggtaacgggattagtttttcgtataattggggtaatttttttttcgtttttgtttttgtttttttggggtttttggcgttgatagttatttttttttgtaatttggttattattaaggttttggtgtttcgttgtcgggttaaggttacggtattttagtttagtgtttagtggggtcgtattacgatcgagacggttatttagtttatggggattatgtgcgtgttgtcggtttgttggttttcgtttttggtaggtagttttagggttgggggaagttaggatgcgtgtgcgagtaagcgggaatttaagattttgttaagtggtagtattcgtaggggtgtgtttgtaatcgtagagcgttgaagtgttttttttttttgttcgcgcggttttggttatagttttagagttgagttttttatttattagttgagcgttttttaagagttaggattcgtattaggtattgtttatgagtatatagagattatagggttgtttatattttagtcgggtaggagataggatgtgttattgaaatgatatatatgtagagttagaagtttgttttgagtgtattaaaagtagaattgttatgataattgtagtttgatattgtggggtttttttttttttttttttttgagacggagtttcgttttgttatttaggttggagtatagtggcgtagtttcggtttattgtaagtttcgtttttcgggtttacgttatttttttgttttagttttttcgagtagttgggattataggcgttcgttattacgttcggttaattttttttttttatttttagtagagacggggttttatcgtggtttcgattttttgatttcgtgatttattcgtttcggttttttaaagtgttgggattataagcgtgagttatcgcgttcggtcgggttttttttttttaattttaaattttttttttacgttaataagatttttagtttgtaattttatatagttatagtttttttgtagtttttgaaagattgcgcgatttatgggtgtttttaaggtttatttttgatgaggtaggagaatgaaagatacgagttgtttttttagtttttcgttatggtgtttgattttttaggaagtgttcgaacgatagttagtgggattcggaagtttagtagtttttttaggttagtatttatttatttttgtagtatttaagtagggttcgttaattttgagataggaggtagaggtttttttatgt

SEQ ID NO: 1532 - DNA, 7128 bp, Artificial Sequence
  chemically treated genomic DNA (Homo sapiens)
atatggagaaatttttattttttattttaggattagcgaattttgtttgagtgttataagggtaagtaaatgttggtttgaagaagttgttgagttttcggattttattgattgtcgttcgggtattttttagagggttaagtattatggcgaaaggttgaggaggtaattcgtattttttatttttttgttttattaagaatgaattttgaaggtatttataggtcgcgtagttttttagaagttgtaggagggttgtgattgtatggggttgtagattgaaaattttattaacgtgaaagaggaatttgaaattaaaaaaaaaaaattcggtcgggcgcggtggtttacgtttgtaattttagtattttgggaggtcgaggcgggtggattacgaggttaggagatcgagattacggtgaaatttcgtttttattaaaaataaaaaaaaaaaattagtcgggcgtggtggcgggcgtttgtagttttagttattcggagaggttgaggtaggagaatggcgtgaattcgggaggcggagtttgtagtgagtcgaggttgcgttattgtattttagtttgggtgatagagcgagatttcgttttaaaaaaaaaaaaaaaaaaaaattttataatattaggttatagttattatagtaattttgtttttaatgtatttaggataaatttttagttttgtatatatgttattttaatgatatattttgttttttattcgattagaatgtgagtagttttgtgatttttatgtgtttataaatagtgtttaatgcgaattttggtttttggaaggcgtttagttagtaagtgaggagtttagttttgaagttgtaattaagatcgcgcgggtaggaggaaaggatattttagcgttttgcggttgtaaatatatttttgcgggtgttgttatttagtaaagttttaggttttcgtttattcgtatacgtattttgattttttttaattttggaattatttattaggagcggagattagtagatcgatagtacgtatatgatttttataagttgaatggtcgtttcggtcgtgatgcggttttattgggtattggattgagatgtcgtggttttggttcggtagcgggatattagggttttaatggtggttaggttgtaggaaaaggtgattgttagcgttaagagttttaggaaggtaaaggtagaggcgaagaaaaggttgttttagttatgcgaagagttagtttcgttgttttttcgttcggtgttgatgaagtattacgtttcgggttattggacggtgtattggtttacgtttagtatcggtagtagggcgaaggcgagtacggttagttatacgtcgagtagtatagcgcgggtggtacgcgtttttatgtggttcgtatattagtgcggcgttttgatggttagcgttcgttcgacggttatggcgttggcgatgaataacgaggagagttcgaaaatagttatggttagttcgaaaaaggtgtagagtcgtttcgacgggtcgatgtgtttttaacgttgtttggataggtatacgacgatgacgatcggggtggtgagaagttgttcgattaggtcggtgagcgttagttagtcgatgtatagtaggaaggattttttgcgtttgttttttcggcgtcggtagttgcgcgatacgagtagtatggttagtgcgttgtttacgaaattagtgagtagtatggtgatcgggaaggttacggatatcgattcgtaattttcgttagattttggagggcgcgtgaggttgtttcgcgtttcggcggaacgttcgggcgtttatatgtttgtgtaggagtggttgaggcgggtgtagaagggggtatttttttcgtagtttcgggttttttttatgttggtttcgaggtgaggaggggatggcgtttagagagtcgtagcgggagggggtagacgcggcgcgggcggcggcggaggtcggcgtttatcgcggttggggttgggttgttttttatggtgcggggcgtagtcgtcgttttatttcgttgttgggatcgcggtcgcggcggcgttagggtttattggttcgggagggagttacgtttttttttttgggaaatttttggtggcgaggcgcgcggaggtgtcgagttttttttataaggtcgagggggcggggcgttcgtgggtgtggatagaatcgaggtgggaggagggtgtaaagtaattgagcgttttttttggttgttgtttattttgatcgtttgggttgggaagttttagacggttttttttgaaacgttttgtttttggtcggatcgggagtttattggggttttttttagtttttcgttaaagtgtcggtggacggtaagtagttaataagtagtattggatttgcggattttaggtaaattgtcgaggcgtatttgagcgttcgtttttttgtttttttaattataaacgtttttatagggacgggattttttttttgaagttttttagtaattttggtaaagtgaaaatcgtttgtttttaagtaatttatataagtttttgtatagttgatcgttaattttttttttttttgttttgtgattttagagtgattataaaaaggttaaggtgttttgttttttggggtgtcgttgaaaattataaaattattagatagtgtttgtagatttaagggaatagatatagggaaataaatatatcggatggttgaattttaagattaagaaattttaattattatttttcgtttaattttgttcgtttttttttttattatttaataaaaaggttagttatggtaaaagtggttataggaaggtggtattaatttgtatatttgaggtagtgaaattaattgtttttagtttatgggagtgagaggggagtagaagagaaaggtattttttataaagtttttaattattttttttatttttatataataagaattagaaaaggtatttagatgttatgaaggttttaatttatatggaaattttgtttttgaaataataaatattgaatgaaaataggtatatttgtttgtttcgtaatattttttagtaagttaatattttatgtattttttataagtatttttttattttattatagaaattttttaaggtattattgttattattattttttttaaaggtggggtaattgaggttttatgaagttaaagaatgtttttgaagttttttagtaatttttaagttttattttatttgaagtatgtatttttgatatgggttttataattgtttttagtagatgaatattaacggtgagattatttttttttaattttgggaaagttttgtgttttttgttttttgtttttttatattgtttaagagatgaaaagatttttaaaaataattgtaaagtttatttttttttatatttaagaaattagatttaattatatagtattttaaagattattattttgattgatatagattaatttttagaataagtttaattagttttgttttttttagtttagttgatgttttgtatgggtgtttttaatttttaaattattgttaagaggtaagaatgggatatgtttttttgtatattttatgtgttgttgttttgattttgtatgagagtttgaaaaaatattattataatattatatgttttttaaagaaggaaaagtaagaatgtaatttaaattttattttaataagatgtattaattataatatgaattttattttgtgttttgttgttatttaaaaatgttttgtatttttgcgttttattgattaaaatgttacgtttataatgggaataatagttaggaagggtgaaatggtttgattttaaaatttttcgtaaatttttgttttattattttgaattaattttaaatttgtatttgggatagtatttttttagtttaatattatttgaaaataaaataatatttgaggttatttttagataaagttttatttaaagtatttggatgaaagtggttattaagtttatattatttatagttagtaaaattttagtgtaatttaatatttaaaatttaagattatattattatttatatagtaaaggaagtaaggtttatttttttttagttatattaaaaattatttttatttttatttataaatatttgatttttttgaaatttttattttttttattgaagtgtttgttgtagttaattggatttgataagtatggtaagcgtcggggtatgtattagtaaagaattgttagttttttattaatttttatgttaatgaataaaatgtgttgtattttagataatttgggtatttttttttttttagtattttgttttattttatattgtttgtttttagttatttattttgtaaataagtgattgtgaggttttgtggagtaatagtgtgaagttggtagttggattttggttggtattttttggttagttattacggatatagtgtgaattgtgttggtttgaaataatattattttttagtgattaaaaggttaataatatgttttatgttgttttaaagagaatttttatagggttaatggatgttttgtttagggaatttttgattttttttttagagatttatttattagtatataattgtggttattttgtttttttttgaggttataaattggtaattttgtttaatagttaataaattagtagaggattaaattgaaagattagatatttatttttttttaatttaaagtatatatttatttattatgtttttaatgaaattttaatttggatatgttttaaatttatagattatttaattgtattttatagtttaaaatgtataatgtatgttaatatttagttagtgatgatgaatttattttgttatttatttttattaaatatttatttaaaaattttaaatatggatataaaataagattaataatgagttatatgattagtttttgattgttttattatggatggaaaatatttgaaagtttttttttatggagttaattagtaattttagtttatattttagttatttatttatttaataattatttattgagtatttaatttatgttagatattgttttagttattagggatataaaagtaatatataatagtgtttatatttatggggtttatattttagtgtaaaattattgattttaagtgttaaataataggagaaatattgattttatggtttttgtttttttagaatgattgttatggaagtatagtgtaatgtagatttaatatttaaatattaattaatgtaattattgtattaaaataaaagtaatgtttagaagtttttgttagattaaagagtttttttttatgaatgttttttttgttgttttttttttttattttttatatgtttgttttttttaattgaaaattggatattgtaatatattgtaatgattttggagtttatcgggtttttttttttgagtattatttattttatgtttgtttgttttgtttgatagttaatttgttcggatttaaattgttaatattgttttttatggggtatgttgtttttggtatttttgttttatttttatggttttttatgtttttttagtttggttttttagagattgatttttttatgtttgtgtaatttgttggttagttagtaatggagattattttttgtgtgggttttttgattttagggattttttttttatttgtagttattttgttagtttagggttattttttgatatttaaagtttttgaagttttagtttttttttatttaaagtatatatagtatagggaggaatatatttttttaagtaaagtattaaagtaattaaagtagatgtatttttgaataatggtttttgtgtgtgttttgtttttttttttttttttttttttttttagacggagttttattttgttatttaggttggatgtagtggtgtaattttggtttattgtaagcgtcgttttttagattttcgttatttttttgttttagttttttaagtagttgggattataggcgtttattattacgtttggttaattttttgtatttttagtagagatagggttttattatgttagttaggatggtttcgattttttaatattatgatttttttattttgattttttaaagtgttgggattagatttttatttggtttttgtttgttttttttttaggttttatgtggttttttttatttatgtagagtttgttgtgagatatgaatttgggtagttttattttattttttttttggtttttattattaagattttttatttaaatttgtagtggttttttaagttttaattttagtttttggaattttttgttagtaaggttatgatttttttttttttattagtattttttatagttatagttatgaagaatgggtaggattttcgattttaaaaattagtaagttataatttttattttttttatttgtaggttttttttttttttttatgatttttgtatgtttttgaatgttttttaatgtaatagtttaataaaatttaaatatttgtttttataaatttaattatattttattattgttatatgtagggtagcgtgatattggtataaagataggtatgttatggtttgaatgtgttttttttaaaattcgtgttgaaatttaatggttattatgatggtattaagaggtgacgtttttaagaggtggttgggttatgaggatattttttgagggaatgggattagttgtttttataaaagggtttgatagagggagtttggttttttttttgttattttgatatgtgaggatagggtaagaaggtttttattagagattagatgatggcgttttgtttttgaatatttttaatatttaaaatattgagaaataaatttatattttttataaattatttagatgtagtattgttatagtagtataaaataaattaagatattgatttatagattaatgaaagagagtattatagagagtattatatatatatatatagagatatagatatgtgtatatatatgtagatatttaatagatttttgttaaaagtgttaaggtgatttaggagaatag

SEQ ID NO: 1533 - DNA, 5814 bp, Artificial Sequence
  chemically treated genomic DNA (Homo sapiens)
agagaaaggaggtttttggttttggatgttggaattagttaaggcgagataggtttgggatatatatagtagttttttaaagtagtgagagggtatagtaggtagacgggaggtttggtaggtacgagtagttggtggtgcgtgtgtgtagaatatgagataaggtttatttttttttagggttagagttaggaggacggaaattagggagttcggagagggttaggtttagggtaagttaggattttaggtttgcggtatttttagatgtaggtttgggttgggcgtgatgggttaagtttgtaattttagtattttgtgaggttaagttgggcggattatttgaggttatgagttcgagattagtttggttaatatggcgaaatttcgtttttattaaaaatataaaaattagttaggtatggtggcgggtatttgaagttttagttatttaggaggttgaggtaggagtatcgtttgagttcgggaggtggaggttgtagtgagttgagatttcgttattgtattttagtttgggcgatagagcgagattttattttagaataataataataaaaaaaaatagatgtaggtatttttgtttaggatttttatattgggtggataaatttgtttgagaatattttttttgggttgtgttttttgagtttttttgtgtttttagtttttagtatatagtaaattgttggttacggtttgttgaatgaataatattaatagttatttgagggttttttgggaggtaggtagggggaattgttttttatttttatataatattttaataaggttaaggtagttatttgacgaagaatattaaagttttgttaggggaagttatttttttaggttatatggtgattgattggtgagtggtggagatgaattttaaaatttatttttagttaggcgcggtggtttacgtttgtaattttagtattttgggaggttaaggtaggtagattatttgaggttaggagtttaagattagtttggttaatatggcgaaattttatttttattaaaaatataaaaattagttgagtatggtggttcgtatttgtagttttagtaatttgggagattgaggtaggagaatcgtttgaatttgggaggtagaggttatagtgagcggagatggtattattgtattttagtttgggtaatagagtgagattttattttaaataaataaataaataaataaataaaaaaattaaaaattattttcggttaggtgttatggtttatgttagtaattttagtgcgttgggaggttaaggtgggaggattatttgagtttatgaatttgagattagtttggataatatagtgggattttatttttataaaataataaaagtattagttgggtatggtggtgagtatttgtggttttagttatttgggaggttgaggtgggaagattgtttaagtttgggaggtagaggttgtagtgagttgagatcgtgttattgtattttagtttgggtgatagagtgaaattttgttttaaaaaaattaggttgcgtacggtggtttatatttgtaattttagatttttgggaggttgaggtcggcggattatttgagattaggagtttgagattagtttggttaatatagtgaaattttatttgtattaaaatataaaaattagttgggcgtggtggtaggtgtttgtaattttagttattcgggaggttgaggtaggagaattatttgaatttgggaggtggaggttgtggtgagtcgagatggtattattgtattttagtttgggtaaaagagtaagattttattttaaaaataaaataaaattataatatagttgtgtgtttatgtgtatatagagttttacgagtttataatatatatatatatataatatatacgtaaatataattaatgttgagaaaaatgtttatttaggttatatgggtcgtattaattttatagagagttataattcggttatatatttatagtttttagtatattagttttaattttttttttttttcgggtgttgtgtgtgcgtttttaattttagtggtttttgagttgttttttttttttttttttgttgttttagggttttttttagggaggtttggttttgtttttcgttatgggtggagagagtgtgagatggaggttacggatttacgtttttagggtagttttttttatagtttcgtttattttggaagttgtttttggtataacgtatcgtgggtgattttttattttaaggtatttggttggggagtggaattttcgtgtggattttgttgtgggtttggttcggttagttggggttacggttaagtaggaggttgggttttagggtaaggtgattgaggtatgtttggcgttagtacggattttggggaatttagtttttttattaggagcgagttatagttattgttatttttatttgtttttgatgtaggaatatagaatcgattttggggttgcgagggtttatgatttttagtggtatcggcggggaaattgaggtttgaggttaggcgtggtggtttataattttagtattttgggaagtcgaggtaggtagattatttgagtttaggagtttgagattagtttgggtgatatagtgaaattttgtttttataaaaatataaaaattagttagcgtggtagtgggtgtttgtagttttagttatttaggaggttgaggtgggaggatcgtttgaattttagaggtagaggttgtagtgaatcgagattgtagtattatattttagtttgggtgatagagtaagattttgttttaaaaataaacgaatagttaggtaaggtggtttacgtttgtaattttagtattatgggaggtcgaggcgggcggattatttgaggttaggcgtttaagattagtttggttaatatggtgaaattttatttttattaaaaatataaaaattgggcgtagtggtatatgtttgtaattttagttattcgggaggttgaggtacgagagtcgtttgaattcgggaggcggaggttgtagtgagttgagattatgttagtgtattttagtttgggtgatagagtaagattttattttaaaataaaaataaataagtaaaaagaaaaataataataaaaaagaaattgaggtttggaagggataagggtttgattgtggttttattgggtatgggagtagaggggattttttgaatgttaatcgtttttgtaataggaagcgagagagggagttttcgggaattagaggttttttcgatgtcgaaataagatgtacgtttgttaggtattattttttattaatatgatataattttttgagttttttttggtttgtttggggattttacggtatgaggcgggataacgtggtaggatttggagtttatatgtataggtatttttagagtagggttggggggttttttagggagttacggtggggttggaatttgggcgtttattttgttggaagttgcgggtgttagttgggtaagggtgatagggagatgggggggaggggtaaaggggttgtggttatatatcggggtatagagggtaagacggtagttgtttatagtttagtttttgggttggatatattttttttggttttggataagagatattcgtatagtttttttttttgttataaagattaatttgggatgtgttgtaggtcgaggttggttattaggtttttgaggttcgtgttattttacgtatagagaaggaggttgaagtttattagttttttttttttatttgggattatttcgtagtaagaaaaaaggtggttagatggaaataggaagttaagtcgaatggatttgagatcgtttttttgagaaatagcggggtttagagagggtttttgaggttttatttggtttttttgggttgggaggttgtttgggaagttatcgatttcgtgggaagggagattcgtgaacgttgtgcgggtagcgggaatatgtgggtttgttatattggttcgaggttgtagcggtggtggtttggttgtgtttggggagggtgggggatatatggtagtaatgttggagttgtggatagttttttgtgattaaaatatgatttttgaaggttaaggttattagagtttggtttggggtttaggggtgttgtgcgagaagtcggacggtggtttagtgttatttttttattatgggttatggaagttttttaagtttgtttttgataattggatattaaatatatttttttatgtttttttttcgggtttttgtagggtgagttgggtgtttagggataggttcgagggattggtatgtttttttttggttaagtttttttttttagttttttggaaggagtgaattgtgtttagggattagaatttttagtggtgtttggaaaatattatattagagaggaattttttggttattttttaatttttgggtaatgtttttagtttcggggtttggagtttagaatagattttagaggttattttgagatagtttaggttaagattattttattgaagtttggttaattgtgttttttaggttttttttagaggttttttattatttcgggaggttttaagtttaagtgatggtgatttaggaattttttatttaggttagagagggagatattgggggagggaggagatttgtgtgtggggaggtggtaggtggtttagtgatgggaattaagagaggatgtggggaggagagtggaggtagcgatgggagatggatgttttggattgggcgggtggacggggagtggggagtgtgttagggggttttttggagaatagtgagggagggcggggtagagagaggaaatgaaaaagttggggtgagtaggtaagttgaggagggtgggaaggagggagggacggagggaggagggaaggagaagttgatatatagatcgatataggtagcgagagatacgaggagtaaagtaagtgaaggtatagacgtacgggataggagagtttgggtaagattggagaggtgcggtgaggggttggggatgtagtaatatagagtaggagtaggtagagggtgtggggttagagggagaaaggtacggggaggataaggataagggaggggatagagatagggagatattagtaagagatcgagagatagggagggaaagaattggtaatgttcggatgttttttgtttttttaatggtagaaatagagttagagaaggaaagaaataggaggtggtgggggggtggtgggtgttaggtatggtggtttatatttgtaattttagtattttgggaagttaaggtggatggattatttgaggttaggagttcgagattagtttgattaatatggtggaatttcgtttttattgaaaatataaaaattagttgggcgtggtagtggacgtttgtaattttatttattttagaggttggggtaggagaatcgtttgaatttaggaggtggaggttgtagtgagtcgagattatgttattgttttttattttggataatagagtgagattttgttttaaaagaaacgaaagaaaagaaagagagaaagagaaataggaaggtggggagagatagagagagatattggagaagttagaggggagaggattgtatattcgtatatataggagaattgggggttggttgggaggttttagttgttaaaaggattggttagtagggatatttgagtgggttgggtggtgggggtagttttggttttttttgattttttattttgggaattttttagt

SEQ ID NO: 1534 - DNA, 5814 bp, Artificial Sequence
  chemically treated genomic DNA (Homo sapiens)
gttggagggtttttaaggtggggggttagagggagttagggttatttttattatttagtttatttagatgtttttgttggttagtttttttggtagttggggttttttagttaatttttagtttttttgtgtgtgcgggtatgtagtttttttttttttggtttttttagtatttttttttgtttttttttatttttttgttttttttttttttttttttttttttcgttttttttgagatagagttttattttgttgtttaggatggagagtaatggtatgatttcggtttattgtaatttttattttttgggtttaagcgatttttttgttttagtttttggagtagatgagattataggcgtttattattacgtttagttaatttttgtatttttagtagagacggggttttattatgttggttaggttggtttcgaatttttgattttaggtgatttatttattttggttttttaaagtgttgagattataggtgtgagttattatgtttgatatttattatttttttattattttttgtttttttttttttttagttttgtttttgttattaaagagatagagaatattcgggtattgttagttttttttttttttgtttttcggttttttgttgatatttttttgtttttgtttttttttttgtttttgtttttttcgtatttttttttttttaattttatattttttatttgtttttgttttgtgttgttgtatttttagttttttatcgtatttttttagttttgtttaggtttttttgtttcgtgcgtttgtgtttttatttgttttgtttttcgtgtttttcgttgtttgtgtcggtttgtgtgttagtttttttttttttttttttttcgttttttttttttttttattttttttagtttgtttgtttattttagtttttttattttttttttttgtttcgtttttttttattgttttttagagggttttttggtatattttttatttttcgtttattcgtttaatttaggatatttattttttatcgttgtttttatttttttttttatatttttttttggtttttattattgagttatttgttatttttttatatataggtttttttttttttttagtgtttttttttttggtttgggtggggaatttttgagttattattatttaggtttggagtttttcggggtagtagggggtttttaggagggatttgaagagtatagttgattaggttttagtggggtggttttggtttgggttgttttagggtggtttttgggatttattttgggttttaggtttcggggttgaggatattgtttagggattgagaaatgattaggaaatttttttttgatgtagtgttttttagatattattgagagttttggtttttggatataatttattttttttagaaagttgaggaaggaggtttggttagagagagatatgttagtttttcgagtttgtttttgggtatttagtttattttgtagagattcgagaagaaagtatgaaggggtgtatttggtgtttagttgttagggataggtttgggagatttttatggtttatgatggaaaggtagtattgggttatcgttcgatttttcgtatagtatttttaggttttaggttaagttttggtgattttgatttttaggaattatattttgattataggaagttgtttatagttttaatattgttgttatgtgttttttattttttttaaatatagttaagttattatcgttgtagtttcgggttagtgtgatagatttatatgttttcgttattcgtatagcgtttacgggtttttttttttacggagtcggtggttttttaggtagttttttagtttaaaagggttagataaaattttagagattttttttgagtttcgttgttttttagggggacggttttagatttattcgatttggttttttgtttttatttgattatttttttttttgttgcgagatggttttaggtgaggagagggagttggtagattttagtttttttttttgtgcgtggggtaatacgggttttagggatttggtggttagtttcggtttgtagtatattttagattggtttttgtaataaggagagaggttgtgcgggtgttttttgtttaaggttaggagggatgtgtttaatttaaggattggattgtgggtagttgtcgttttgttttttgtatttcggtgtgtgattataatttttttgttttttttttttatttttttattatttttgtttagttggtattcgtagtttttagtaggatggacgtttaagttttagttttatcgtggttttttaagggattttttagttttgttttgggggtgtttgtatatgtgggttttaggttttgttacgttgtttcgttttatgtcgtgaggtttttagatagattagagggaatttaggaagttatattatattaatgaaggatgatgtttggtaggcgtgtattttgtttcggtatcgggggggtttttggttttcggagattttttttttcgttttttgttataaggacggttaatatttaggaagttttttttgtttttatgtttagtgggattatagttaaatttttgttttttttaggttttagttttttttttgttgttgtttttttttttgtttgtttgtttttgttttgagatggaattttgttttgttatttaggttggagtatattggtatgattttagtttattgtaattttcgtttttcgggtttaagcgattttcgtgttttagtttttcgagtagttgggattataggtatgtgttattgcgtttaatttttatatttttagtagaggtggggttttattatgttggttaggttggttttgaacgtttgattttaggtgattcgttcgtttcggttttttatagtgttgggattataggcgtgaattattttgtttggttgttcgtttgtttttgagatagggttttgttttgttatttaggttggagtgtagtgttgtaatttcggtttattgtaatttttatttttggggtttaagcgatttttttattttagttttttgagtagttgggattataggtatttattgttacgttagttaatttttgtatttttgtaaagatagggttttattgtgttatttaggttggttttaaatttttggatttaagtgatttgtttatttcggttttttaaagtgttgggattataggttattacgtttggttttaggttttagttttttcgtcgatgttattaggagttatgagttttcgtaattttaggatcggttttgtgtttttgtattaggagtaggtaggggtggtagtgattgtgattcgtttttaatgaggggattgagttttttagagttcgtattggcgttagatatgttttagttattttgttttgaaatttagttttttgtttggtcgtggttttagttagtcgggttaagtttatagtagggtttatacgggggttttattttttagttaggtgttttggggtgagaaattatttacggtgcgttgtgttaggggtagtttttagggtgggcggagttatggaaggaattgttttgggggcgtgggttcgtagtttttattttatattttttttatttatggcgaggaataggattaggtttttttgagggggattttgaagtagtagggaaaaagaggaaggatagtttagagattattgagattagggacgtatatatagtattcgggaggggagagagattgaggttagtgtgttggggattgtgggtgtgtaatcggattgtgattttttgtagagttagtgcggtttatgtgatttaagtgagtattttttttagtattgattgtgtttgcgtgtgtattgtgtgtatatgtgtattgtgagttcgtgggattttgtgtgtatatgggtatatagttatgttgtagttttgttttgtttttgagatggagttttgtttttttgtttaggttggagtgtagtggtgttatttcggtttattataatttttattttttaggtttaagtgatttttttgttttagtttttcgagtagttgggattataggtatttgttattacgtttagttaatttttgtattttagtatagatgggattttattatgttggttaggttggttttaaatttttgattttaggtgattcgtcggttttagttttttaaaggtttgggattataggtgtgagttatcgtgcgtaatttagtttttttgagatagggttttattttgttatttaggttggagtgtagtggtacgattttagtttattgtaatttttattttttaggtttaagtaatttttttattttagttttttagatagttgggattataagtgtttattattatgtttagttaatatttttattgttttgtagagataggattttattatgttgtttaggttggttttaaatttatgggtttaagtgatttttttattttggttttttaacgtattgggattattggtatgaattatggtatttggtcgagaatggtttttggtttttttgtttgtttgtttgtttgtttgtttgagatggagttttattttgttgtttaggttggagtgtagtggtgttattttcgtttattgtaatttttgttttttaggtttaagcgatttttttgttttagttttttaagttgttgggattataggtgcgagttattatgtttagttaatttttgtatttttagtagagatgggatttcgttatgttggttaagttggttttgaatttttgattttaagtgatttgtttgttttggttttttaaagtgttgagattataggcgtgagttatcgcgtttggttgaggatgggttttgaagtttatttttattatttattagttagttattatgtgatttgagaaaatgattttttttagtaaagttttgatgtttttcgttaaatggttgttttgattttgttggggtgttatgtgaagataagagatagttttttttgtttgttttttaggaagtttttaaatagttgttgatattatttatttaataaatcgtaattagtagtttattgtgtgttaagagttggggatatagaggggtttagagggtatagtttaggaagagtgtttttaaataggtttgtttatttagtgtggggattttgagtaggggtgtttgtatttgtttttttttgttgttgttgttttgagatggaatttcgttttgtcgtttaggttggagtgtagtggcgagattttagtttattgtaatttttatttttcgagtttaagcgatgtttttgttttagttttttgagtagttgggattttaggtgttcgttattatgtttgattaatttttgtatttttagtagaggcgggatttcgttatgttggttaggttggtttcgaatttatgattttaagtgattcgtttaatttggttttataaagtgttgggattataggtttgatttattacgtttagtttaggtttgtatttggaagtgtcgtagatttaagattttggtttgttttgggtttgatttttttcggattttttggttttcgtttttttggttttggttttgggaggaagtgggttttattttatgttttgtatatacgtattattagttgttcgtgtttgttaggtttttcgtttgtttgttgtgtttttttattgttttgagaaattgttatgtgtgttttagatttgtttcgttttggttggttttagtatttagagttagaggtttttttttttt

SEQ ID NO: 1535 - DNA, 5987 bp, Artificial Sequence
  chemically treated genomic DNA (Homo sapiens)
tttttaatttgtattattttttttattttaataattttttttaatattttttataaagtagatttattggttatagaatgttttaatttttatttgtttgagaaaattttattttttttttatttttgaaagataattttgtagggtatagaattttaggttgtaggttttttttttttaaagtgaaatattttattttattttttttttttttgtatggtatttgagaagaagttagatgtaatttttattattattatttaaaagattgtttttgtttttttttttttttttttttttttttttttttttttgtatattatattttttatagttgttttatattttttagatattatgttttggtttttttttgtgtttttttttttgatttttagttttagaagtttttatttatatatttgtaatcgtagggatttttttttttgttatgtttagtttattaataagtttttatagatattgttgatttttgttttagtgtttttgatttttagtatttttttgattattttttggaattgttatttgtttatttatattattaatttatttttgtgtgttgttttattatagtaattgtagttgttttaattttataggtattgtaattttaatatttttattatatttgatattgattttgatgtttgttttgttttattaagttatgtttttgttttttagtgtgatttttaattttttgttgaaagttaggtatgatgtattgagtgaaagaaatttaatatattgtaatgtgacgataagagtttaggggaagtgaagtattttatagttttatagtaggtttcggttttttagtgagtttgtgtttatgaacggtgatttttaataagtgttttttattttattttttttttgtttttaagtgggataagattattgggggggggttagaattgggtattttttttttttaatgtagaagttaaagagagggttggagttgggtatttttttttttttgtatggaaagttagaggtagttaaatttggatatttttttttttttaatttagttaggttgcgataaaaatttcgatagtttaggttttaatattataaaataattttttttgagtataggttttattaagaatattatattttgatggagttgagggggagttttttttgatatttattgcgagaatttcgtagagttttaggaagtaaaatttataaaagtgtgggagttttttagaattttttttttgtagatttatttgtattgaatttttagaaatttattaattatagtttaggtttttttatttaggtattggtttttatggaggtttttgtttgtgtatttttgttttagtaagttgttttttttgtatggtttgttttttaaattttttaagtagggttatgatttgtcgttttatttttttgatagttttgagagtgttgattttttagtttgtttagatttttatttgtttttaggatgaagtgataatttttaagtttttttttgatatgttagattagaaattgaaagttttaagttttatattttgtgcgtgggtatgtttatattttgtttgttttagtgtttttattttatatttttttttttttttttgtttttttgtgagatttttaggtttaatataaagattgtgtttaatttatttaattattttggtttatttgagtattataatgaataattataaaaaaaaatgaagtaaaagaaaaatttattaaagaattgagatatttgagaaaaagaaaggagattagtgttttataaaatttagaaatagattttttaagtgtttttttattgatttatgtgaaaggattttttttaatttaataaattatgtgttttcgtttatagttttaaaattttttgtgtagttaagaatgggtaaataattaggttttattaaaggattaacgtaaagattttttgtaagtaatatttttgttatttaaggaagagataaattttatggtataattttgttaaagtatattaagaataattttgatataaagttttttttttagttaatatgttatgaaagaaagaagataaggggtgatttttattttttaagtgaattattaaatttattaaagaagaaacgagggaaatagaaagaggatttttgtttgagataatggatttgtatgtatgagtagtagaattttgtttaaagtataaggaagggaaaaaaaagttagtttatttggaattttggatattaagagtttttattgtttatttttttttaatttatatgaatggtttattattttaattaataaatattttatttttttttaatatatttatgaaataaatttgaaatgaatagtgtaatatgtgaatgtttagaatattataaaattaaatataaaatttgtttggtaatttttttagtattttaggaaaaaagttgataaaattttaagtagtagaagggggtagtaaaatttaatagaaagttttggaagatttttaagatttttttttattttttttttatgtagattattttttaataaattttagacgttaatagaaattttgtataatagatttatatatttgtttaaaatagatatagaaatattgaatatatgtaaatatgagagttataagttttatatgattaaattttttttttatggtatataatagttatagtatttttttatataaaataggtttagtggttttaatttagtttggtatatttaatatatttttatgattagtattttaaatgtatttattcgttttattttattgttttagaattgttagttatttaataaattatgtaatttttttttttatgtttagatttgtatttttttttaaaattttgtttatttttaaagttttagattttttttgaatttttttttttgattttttaagtatatggaattttttattttattttgttatataagtgatagaatttttattatgggatagatggagtttaatttttttgagtttaaaataatttaaatataattattttttatgttttgttttttttttatttttgtatttaaatttttttttagataatagaataattaatgtttgataaggaagataatgatgatgattattttaaaatgaatttaggattgtaatgtaaaattttagtatttttttatagtatggattttaatatggtttttaatttaaattaatattagtagttttaattataaattttaaattttagtagatgtaatttatttttttaaaatgaaatagaagattgaaattattaaattattaaaaagaaaatgatttacgtttttagttgaaattttatgtaagattttatgtaataaataggagtgttataaatggaatgatgaaatatgattagaggaggagaaaggttttttagatgagatggaattttagttattcgtgttttatgaagaattagatgtgtatattaagtaaaatagttaaaaaaaaaatttttaagtgagttttttatttattttttttttataagatttttataaattgaggtatttggtgtagttttattttaggttttatgttgttatttttttgtaatgttaaggatttaggatataattgaattttttattttttattttttttttggtgtgtgtgtatatatatatgtatatatatatatatatatatatatatatatattttttagtattttatttttatatgtttttttttgagtattatttatgatagatgttaaataaaagtaaagatgaaattttaattgttaaaattttttttttatttaattaattttttatttaattatgttttaaaacgagaatagaaaattagttttaataagtttaggtaattgaaaagtaaatgttatgttgtattttgatttatggttataatttataattttggaaaagtggatagaaaagataaaagagtgaattttaaaattcgaatttattttattagtattttttatgaagggttagtaattaaaataatttacgtattagggagagaaatgttttaaggtatacgttttggatatttagcgtttttgtaaattttggttatcgtcgttttttttgtttattagaaggtaggaaattttatattggtgattcgtggagtttatattaattatttatagggtaattgtttaggattagtattatgaggagaatttatttttttcgtttttttttttaagaaataaggagggggtgaaggtacggagaatagtattttttttgttgaaagtaatttagttataaagataaattatagttatgtatattgaaggtagttattttattttataaaataagagttttttaaaaagttatgtatgtatgtgttgtatatagagtagatatatagtttattaagcgtcgttattaaaatataaaatatgttagttttttttaattttattcgttttagtttgtttcgacgtgattttttcgattttttaaagacgtatagattagatacggcggcggcggcgggagaggggattttttgcgttttcggattttagggtcgtttagatttttggagaggaagttaagtgtttttttgttttttttcggtattttatttaaggcgattagtttagaattggttttcggaagcgttcgggtaaagattgcgaagaagaaaagatatttggcggaaatttgtgcgtttggggcggtggaattcggggaggagagggagggattagataggagagtggggattattttttttgtttttaaattggggtagttttttgggttttcgatttttttattttcgtgggtaaaaaattttgtttttatcgggtttacgtaatttttttaaggggagaggagggaaaaatttgtggggggtacgaaaaggcggaaagaaatagttatttcgttatatgggtttggtttttagttttataaaaaggaaggttttttcggttagcgattaattgttatacgatttgtagtgagcgttaggagtacgtttaggaattttttagtagcgttttttttagttttatagttagacgtttttagatagtaaagtttattttcgcgtcgcgttttgttcgtcgttgcgatgttcgttcgcgttttgttgttgtgcgcggttttggcgtttagttatataggtgagtatttggcgtcgcgtatcggggatttcggttttacgtattcgggtagagttttcgttttgattttttgggtttattttagtatttcgattttttttcgaatagagaagttacgtgatttgggaaagagtttggatcgttagagttcgaaagaatttcgtggatattttagtttttttataagtattgattattatgagttagttatttaatcgatttgagatatttttattttttaaatagggatagatgatattaatttgtaggttgttattatgataagataggatttgattaatatatgtgaattgtttatatttggaatttttttattgagtggaagaagttgttttaaatattttagttagtttttttttgtttttaggaaagttcggattatgttttaagataagtaaaatgttttaaaagtaagttgttttattttgaatttttttttaaatgttgattagtgtattagatttattttaatttggaaagtgaagtgttatttatttgaattttttaaaaatgttaattttaatatttaaagagttaattaagaaaagtttagtaatatgatgtattaagttgaatatgttgttatttttatttagaatagaaaattggtatttttacgttttatttattttaaggtaggttaaaaaattgtatttttatgattatttatatattttttgaatttattattgtaaagttgatttatagttaaataattaaatgtttaaattaagattaagatattagagaatgatttatttgttgttttttaattgtagt

SEQ ID NO: 1536 - DNA, 5987 bp, Artificial Sequence
  chemically treated genomic DNA (Homo sapiens)
gttgtaattaaaggatagtaaataaattattttttagtgttttaattttaatttaaatatttaattgtttgattatgaattaattttataataataaatttaagaaatatataggtagttatggaaatataattttttaatttgttttagaatggataaaacgtagaaatattaattttttattttaaataaggataatagtatatttaatttggtatattatgttattaagttttttttagttaattttttagatgttaaaattagtatttttaagaagtttaaataagtagtattttattttttaaattaaaatggatttagtatattaattaatatttagggaaaaatttaaagtaaaatagtttatttttaagatattttgtttattttaaaatataattcgggtttttttgggagtaggaaagaattgattagaatatttaaaataattttttttatttaataaaaaggttttaaatataaataatttatatatattgattagattttgttttattataatgataatttgtaaattagtattatttatttttatttaggaggtgagagtgttttagatcggttaagtaattggtttataatgattagtgtttgtgggaaagttggaatatttacggagttttttcgaattttagcggtttaagtttttttttaagttacgtagtttttttattcggagagaagtcggagtattgggatagatttaggaggttagagcggaaattttgttcgggtgcgtggaatcggagttttcggtgcgcggcgttaggtatttatttgtatggttgagcgttaggatcgcgtatagtagtagggcgcgggcgagtatcgtagcggcgggtagggcgcggcgcgggggtaggttttgttgtttgagggcgtttggttgtggagttgaaggaggcgttgttgaggagtttttggacgtgtttttgacgtttattgtaagtcgtatgataattggtcgttaatcgagagaatttttttttttataagattgaaaattaagtttatgtgacgaaatgattgttttttttcgttttttcgtattttttataaattttttttttttttttttttaaaaaaattgcgtaagttcggtgggggtagggttttttatttacggaaatgagaaaatcggaaatttaggaagttgttttaatttgggagtagagggggtagtttttatttttttgtttgatttttttttttttttttcgagttttatcgttttaggcgtataggttttcgttagatgttttttttttttcgtagtttttgttcgagcgttttcgagagttagttttggattgatcgttttggatgggatatcgggggagggtagaaggatatttggttttttttttaggaatttgagcggttttgaggttcgggggcgtagggaattttttttttcgtcgtcgtcgtcgtgtttggtttgtacgtttttagagggtcgaggaagttacgtcgggatagattggggcgagtaaggttaagaaaggttgatatgttttatgttttagtgacgacgtttaataggttgtatatttgttttatatgtagtatatatatatatagttttttaaaaaatttttattttgtggaatgaaatagttatttttagtgtatatagttgtaatttatttttgtagttaagttgtttttaatagaagaaatattgtttttcgtatttttattttttttttgttttttggaaagagaggcgggaaaggtaaattttttttataatattggttttaagtagttattttgtaaatagttaatgtgagttttacgggttattaatataaagttttttgttttttgatggataaaggaagcggcgatggttagaatttgtagggacgttaaatgtttaaaacgtatgttttaaggtatttttttttttgatgcgtggattattttggttattagttttttataggagatattggtaaaataaattcgagttttaaagtttatttttttgttttttttgtttatttttttaagattatgagttgtgattatggattaaagtataatatagtatttattttttagttgtttgggtttattggggttaattttttattttcgttttggaatatagttggatgaggaattaattagatggaagggagattttgatagttggaattttatttttgtttttgtttaatatttattatgggtagtgtttagggaggagtatgtgagggtgagatattaaaaaatatatatatgtatatgtgtgtgtgtatatatatatatatatatatatatatattagaaaagaagtggaaaatagaaaatttagttatgttttaagtttttagtattataggaaaatgatagtataaaatttgaaataaaattatattaggtattttaatttgtagaagttttataagaaaaaaataaataagagatttatttggaggttttttttttaattgttttgtttagtgtatatatttgattttttatgagatacggatgattaaaattttattttatttaggaagtttttttttttttttagttatattttattattttatttatggtatttttatttattgtatggaattttatatgaaattttaattaagagcgtggattattttttttttgataatttaataattttaattttttgttttattttaaaggagtaggttgtatttattgaaatttgaagtttatagttagagttattaatgttagtttgggttagaagttatgttagaatttatattgtgagagagtattaaaattttatattataattttgaatttattttgaagtgattattattattgttttttttattagatattaattgttttgttgtttgaaaagagatttggatataaaagtgagggaaaaatagggtataaggaataattatatttagattattttaaatttaaaggaattgaattttatttattttatagtggaaattttgttatttatatagtaggatagagtgaagagttttatgtatttggaaagttaaaaaaaaaagtttaaggagaatttgggattttaaggatgggtagagttttagaaagaagtgtaaatttgagtataaggaaaaaagttatataatttattaaataattgataattttgagataataaaataaaacggataggtatatttgggatgttggttatgggagtgtattaaatgtgttaaattaaattaagattattaaatttgttttatatggaaaagtattgtgattattgtgtattataaaaaaaaggtttgattatgtaaaatttatagtttttatgtttgtatatatttaatgtttttgtgtttattttaggtaaatatatggatttgttgtataaaatttttattagcgtttgaaatttgttgggaaataatttatatgaaaagaaaataaggaagaattttaaaaattttttagagttttttgttgagttttattgtttttttttgttgtttgaaattttgttaattttttttttaagatgttaggaagattgttagatagattttgtgtttaattttataatgttttaaatatttatatgttgtattgtttattttagatttgttttatgaatatgttgaaaagaaatgaaatatttattaattgaagtgataagttatttatgtgagttaaaagaaaatgaataataaagatttttaatgtttaaaattttaaataaattaattttttttttttttttttgtattttgagtagggttttattatttatatatatagatttattattttaggtaagggttttttttttatttttttcgttttttttttggtgggtttagtggtttatttagagagtggagattattttttgtttttttttttttatggtatgttggttgaaaaaagagttttgtgttagggttatttttagtatattttggtaaggttatgttatgaagtttattttttttttgagtagtagaaatgttatttatagaagatttttacgttagttttttagtaaagtttgattatttatttatttttagttatataagaagttttgaggttataaacgaaagtatataatttgttaaattaagaaaagtttttttatataagttaatgaagaaatatttaaaaaatttatttttaagttttataaaatattgatttttttttttttttttaaatattttaattttttgatggattttttttttattttatttttttttgtgattgtttattataatatttagatgagttaaagtagttgaatgagttgaatatagtttttgtattggatttagaaattttataaggggataaggaagggaaagagagtgtgaggtgggggtattggagtaggtaggatgtgaatatatttacgtatagaatatgaggtttaggatttttagtttttgatttggtatgttagggaggagtttggaaattgttattttattttaaaaataagtaaaaatttaagtaaattgaaaaattaatatttttagaattgttagagaagtgaggcgataggttataattttatttaaaaaatttgaaagatagattatataagaagaataatttattggagtagaaatgtataggtagaaatttttatgaaaattagtatttgggtaggaaaatttgaattgtaattgatgaatttttggaggtttagtgtagataagtttgtaaaggaaaaattttggaagatttttatatttttgtgagttttgttttttggagttttacgaggttttcgtagtgaatattagagaaaatttttttttagttttattagagtatagtgtttttaataaggtttatatttaagagaaattattttataatattagagtttaaattgtcgggatttttgtcgtagtttaattgaattagaagaaggaaaatatttaaatttaattgtttttagttttttatataggggaagaaaaatatttaattttagttttttttttagtttttatattggagaagggaaatatttaattttagtttttttttagtgattttgttttatttaaggataggaaaagagtggaatgaaaagtatttgttgaaagttatcgtttataggtataggtttattaaaaggtcgagatttgttataggattatagaatgttttattttttttgaatttttatcgttatattataatgtattgagttttttttatttagtatattatgtttggtttttaataaaaaattagaagttatattaaaagataaaaatatagtttgataagatagagtaagtattagaattaatgttaaatatggtagagatgttgaaattataatatttatgaaattaaaataattgtaattattatgataagataatatataagaataggttggtaatgtaagtagatagatggtaattttaagaaataattagagaaatgttagagattaaaaatattggaatagaagttaataatgtttgtaagggtttattagtagattggatatggtagaggaaagaatttttgcgattgtagatatataaatagagatttttaaaattgagaattaaagaaaaaaatatagaagaaaattaaaatataatatttaagaaatatggggtaattataaaaggtgtaatatatagagaaggaaagaagggaaggagaagagagaaaggaatagaagtaattttttaagtaataatgataagaattatatttgatttttttttagatattatataaagaagaaaagagtggaatgaaatattttattttgaggggaaaaaatttataatttagaattttgtattttataaaattattttttaaaagtgaaggagaaataaggtttttttagataaatgaaaattgaggtattttgtggttagtagatttgttttgtgagaaatgttaaaagaagttattgagataagaaaaatgatataggttagaaa

SEQ ID NO: 1537 - DNA, 6061 bp, Artificial Sequence
  chemically treated genomic DNA (Homo sapiens)
gagcgagtaggagatggaggaatagaggcgttttgtagaaatggtttttgggtttgtggggaaggagaatagagaggtatttgagttttttttattttggagaggcgtgtggggttaagggagggaattttttttaggatgggaaagatatgcgtatgggtagatgggaatgttatagtgaagagggtgtagtggacggggaatagagagtaaagtttggaggcgtcggagtattttgagtataggggagatagagcggaaggaggagaggtgtgtgggtttgcggatttggtagtgggagatgagggagtttttttgtggtggtttttgtttttttcgggaaatataagtagtgtttattgagaaattaatttttgtattatttttttttgtttatagtgatttagtcggaagaaatgaaaggtattagttagggttaggtattgtagtttatggttgttgtaattttagcgttttgggaggttgaggttggaggattttttgagtttaggagttcgagattagtttgggtaatatgatgagattttgtttttataaaaaaaattttttttttttaattaaaaaagtattagttaagtttttgtgttttaagttttgggtttttttttttttattttatatttgagaaagtaaataggtcgttttgtagtttttgtgtttgagttaagagggagaatattattgtgttttggggaattgatgttttggtatggaagagaggggtaggggaataggtattttttattttattttgatttgtttttagaagaaagtggttgtatgcgattcgaaagttaaggattaagggttgtaattgcgggggtttgtgggagaggtttttttgaaagagttgggatggagggagtagagggttatttttttaaggattaggttggataagtgaggttttgtagatgggtaaaaaatagtggaagttttgtgattgtgattattgatgtttgtaatagtagtagtagtagtttgaaaaatttttttatttttttttgtaaggttgtggagtacggattgattatttttgggattgtgtaaatttttggagtttatggatgatcggagggagttgaagggtagttatgagtgatagggaaattttgttgatttgatgggtagagatttaagttgaatttaatttggtttagattaattaagggatgattaaaaggtgtatttacgttatgagttgtagagagtgtttagttggtttaggatttggataaagggtgagtagtgagtgggagttgatatttggttttttttttattttgtattttggggttggaatatagtagatatataatgattatatggtgttattcggtttttatagatgagtataaggatattttttttcgttaggtttaggagtagggtagtagggtagttttacgtggatttcgtgtttatagtttggtaaattggatagagttttggttttttttttttagtagttattacgtttttttaggttcggttatttgagttttttatttatgtggttttggtatttaggtttttagttttattattttgggtttgtatttagttttagatggcgtatatgtagagatttgggtaggttgtttataggtatttttttgttttgtttcgataaatattttgttatatgtgggtgaatgagagggtagacgttaatgggttaggattttgagatttttgtgtttttgtggggtttggagtaagagattggttggtatagtagtgagtatatttgttaattttaattataggaagttaggggttttagtttatttattttttagtattgtgtttagtagttttgataatgcggggtagagggaatagggttgttagagttttaggattattaaggtttaggttagtaggtatataggttagcgaatattacgagttttttttttagtgtatgttagggttatagaagattggggttggatgagttttaagatttggttagggagttgtttttttatttagttatttatgtttgatggttttttgagtatagataggaaagttaatttttattttttaataaatatgtattaagtatttattgtgtgtgaggattttgtgttggttattgggatatgatagggaataaggtggatttattttttttgtttgtaaggaattgttgtttataggttagggagataggtatagatataaatagtggtgatagttaggatggttttttggaggaaataatggttttaaataggtatagttggttttgaggtgttaaaatatattaaaggtagagtaagttttttattttattttattttttaaaatagagttttgttttgtggtttaggttggagtgtagtggagtaatttttattgtaatttttgttttttaggtttaagtaatttttttgttttagttttttaagtagttggaattataggtgtatatttggttaatttttgtatttttttttttttttagtagagatggggttttattatgttggttaggttggtttcgaatttttgatttcgggtgatttgttcgttttagttttttaaagtgttgggattgtaggcgtaagttattatgtttggttagtagagtaagttttaaggggtattatattataattgtatgtaagagaagttaggattagtttggttttgtgcgtgtgtggattgaaatttaaaagttagaaattttttgtatgtgttttttatggagttatatggtttttagtttttgttttttaaaatttgtaggattgatgattgattggatagtggtgtaggagggaaggtttttgtatgttagtgattaaattgttgaagatgttattgtttgagacgggtagtattgaaggtaagtagatttggggtgggcgggatagaggaggtttttagttatatggatttggagtttataggagcggtttagattggagatagagatttggaagttattagtatatggttggtagtggttaagatgatttagagaaaaggggtagagtaggagaaaagaggaggtttaggatagagtttcggaagagtagaagacgaggtggtaaaggaattagagatagtagttagtgaggagagggtgggttaatgaagttaaggaaaagaattgttttaataatttagtaatgggtaggaataattggttgaaaagtatatttttaaaatttgggggtcgagagggaatttttaaatttttaaagttttggaaaaaaaggtaaaaatgtttaaagatgtataaaatttgtaatatttttttcgtggtgtattaaaattattaatggtgaaaaattatttattggaaatatttatttttgattcgtttgttatttaaattaaattgtttagaattattggagttagttttattttttttttatacgttagggggcgtatacgtattgtttgtgaatttaagtttaggataaaaataggtagtgaattaggtggttattagaatttgattttttagtttagatttttgaatattatagtaattatgttttgtatattattacgtgatttttgaatttaggtattttaacgatttttaaattttattttttatttgattttaaatttatagggttattagaaagattttatagaagaaattttatagaggagaaattttatttttttttttgtttagttatttgatttagggtagtgggggtaggttttttattttttatggtgaagtttagtaagcggcggggggaggaggggtggggtagataggaaagagttggtgtggttttggttgatttttaagtggttttaatacggattgcgtgggggcggggtttggaggtaggggcgtttggattgaagtttattaaatttttttgattagtaggttttggaataaatttttaggtaggttattggttttatttagaaatttttagggttattatttgagtttggtatgagaagttagaaatttagtattgatatttaaattatatttagagggtattattatgtttttaatttcgaggttaatgtaaggtttatagttggaattggtataatattggggtattagttagtttttgtttggggttgatattaggttagagaagtggagggtgaatatgaggatgaaggggttttgtgtggagtttttgtaaagttagttttattttgggttttaagattattattaaagttgggttggtttagggttttaaatggttttaagtttgggtggggttttaggttagtatttgtgtttgggggtttttttatggtgatttaattttaattttggaattgagaatcgaatttagagtgtattggtgttgatttgggaatgggagagtagtattggagttttatgtaaggtttggggtttagaagagagataattggggtttatagtaaggtagtttttggattttagggtttatttagggattgggggttgagtattagtatagggttttatttaaggtttagcgttggtgttagcgttattattaaggttagggtaagtagaagtaataaagagatttagagttagaattggtatttgggattagtatagaggtttataataaaattattatttgtgttaatttgggggtagattaagggttttggatttaatattgggtttagggtaaggtgtgggtttagtattaggtttagatttgtatggggaggaaatggggttttagagtggtattaggtttatgttagggttgggagttattagaaggatttggatgtagtattagagtttggtttgtttatgtttattattggggttcgggtttaatattgaggtttcggtcggtttcgatttggcgttgggttgtggtttgtttgggttttagcggtttcgcggttttacgagcgagagtgtacgaggggaggggcgtcgtcgggggcgcgtacggtaggggtaggggcgcgggcgcgagcgcgaggggagcgcgcggttggagttggcgcgggagcggcgggagcggtggcggcggtagaggcggcggttttagtttcggtttcggttcgggttcgggtttcggtttcggtttcggtttcggttttagttcgggtggcggtggcgggagcgggattaggtggaggcggcggcggtagaggagtgggagtaaagtttttttattttttttgttcgcgagtacgggatggggagggggcgaacgggttgtattcgtttttaatcgggtgtaacgttttggaggttttggagcgatttgtttcgtgaggacgtggttattcggatttttttcgaaagtttatttttagtggcgcgttttcgttgttttttgtttcgtgttcgttttcggtttcggggggggggtgtcggcgtttttgtttcggttgttttttgtttttttcggggggtttgttttttcgtgttagtgttttttaattttacgtttttgtaattttagggtttttttagttgtttttattttttttttttaggttattttgttttttttttttaggtttttcgattttgtttttttgggtcgttttgttttttgtttttgagtttgtttttttcgtttgggtttttttattttttttttttgggtttttgtttttttttttaagtttttgttttttgttttttatttattttttggtgtttttgtattttttgtgttaggcgtttttttatttttttggaatgttgtttttttggtttttttatttcggagggggaggggttagattttttttttattttaagtttttttgttttttagtgtacggtttttgagttggagtaggttgggggtggggagcgttatttgtttgagttgtgaaatgggagagggaggttgttttagtttgggggttgtttggatttttttgaggggttatagggtagggtcgggaggttggattaggttgaggaaggttttatttttgaaggaataggggtagggatttagagcgatttggtgtcggatttggtttgagaagtagggaagtgtattggggtgagaggcgtagaaaaggatgtggggtggtggtttta

SEQ ID NO: 1538 - DNA, 6061 bp, Artificial Sequence
  chemically treated genomic DNA (Homo sapiens)
tggaattattattttatatttttttttacgttttttattttagtgtatttttttgttttttaggttagattcgatattagatcgttttggatttttgtttttgtttttttaaaagtggagttttttttaatttaatttagtttttcggttttgttttgtggttttttagggagatttagataatttttaggttggggtagttttttttttttattttatagtttaggtaggtagcgttttttatttttaatttgttttaatttaggggtcgtgtattggggggtaggggggtttgaaatggggagaaagtttagttttttttttttcggggtggaagaattagaggggtagtattttagggaaatgggggggcgtttagtatagagagtgtagagatattaagagatgggtgagagataagaggtagagatttaaggagggagatagagatttagggagaggaaatagagagatttaagcggagagaatagatttagggatagggaataagacgatttagggagatagaatcgagagatttggggagaaagaatagagtgatttggggaaaaagaatggagatagttggagagattttgggattgtaggggcgtgagattgggaggtattgatacggggaggtagatttttcgaggaaaatagaaagtagtcgagatagagacgtcggtatttttttttcgaaatcggagacgggtacgggataggagataacggggacgcgttattggaagtgaattttcggagagggttcgagtggttacgtttttacgggataggtcgttttagggtttttagggcgttgtattcggttgggggcgggtatagttcgttcgttttttttttatttcgtgttcgcgaataaaaagggtgggggggttttgtttttatttttttgtcgtcgtcgtttttatttggtttcgttttcgttatcgttattcgagttggagtcggagtcggagtcggagtcggagttcgagttcgagtcggagtcgaagttggagtcgtcgtttttgtcgtcgttatcgttttcgtcgttttcgcgttagttttagtcgcgcgtttttttcgcgttcgcgttcgcgtttttgtttttgtcgtgcgcgttttcggcggcgttttttttttcgtgtattttcgttcgtagagtcgcggagtcgttgaggtttagataggttataatttaacgttaagtcgaaatcgatcggaattttaatattgaattcgaattttaataatgaatatagatagattaaattttgatattatatttagatttttttagtggtttttagttttagtatgaatttaatattattttaggattttattttttttttatatagatttgaatttgatattgagtttatattttgttttaaatttaatattgagtttaaagtttttaatttgtttttaaattagtataagtagtaattttgttgtgaatttttatattgattttaaatattaattttgattttaaatttttttattatttttatttgttttaattttgatagtgacgttagtattaacgttggattttaaatggaattttgtattaatgtttagtttttagtttttaaatgaattttaaagtttaaaagttattttgttatggattttagttattttttttttgaattttaagttttatataaaattttagtattgtttttttatttttagattaatattaatgtattttgaattcgatttttaattttagagttgggattgggttattataaaaggatttttaaatatagatattgatttgaaattttatttaaatttgagattatttaggattttaaattaatttagttttaataataattttggaatttaagataagattggttttgtagaaattttatataaagtttttttatttttatgtttattttttatttttttgatttagtgttaattttaagtagagattgattaatattttaatattatattaattttagttgtgaattttatattggtttcggaattaaagatatgataatgttttttaaatgtaatttaaatgttagtattgagtttttgattttttatattaaatttaaataatgattttagaaatttttgggtgaaattaataatttatttgaagatttattttaagatttattgattagagggatttgatgagttttaatttaagcgtttttgtttttagatttcgtttttacgtaattcgtgttaaaattatttaagagttagttaaagttatattagtttttttttatttattttatttttttttttttcgtcgtttgttaggttttattatgaaggatgggggatttatttttattgttttgggttaggtaattgagtagaaaaagagatgaggttttttttttgtggggttttttttgtggggtttttttgataattttgtaagtttggagttaggtgagaaataaaatttggagatcgttgaggtgtttggatttagggattacgtggtaatgtgtagggtatggttgttgtggtgtttagggatttgggttgaggaattaggttttggtaattatttgatttattgtttgtttttgttttgaatttgaatttataaatagtgcgtgtgcgttttttggcgtatgaggaggggatgggattggttttagtgattttggataatttggtttggatgataaacggattaaaaatgaatatttttagtgagtggttttttattattggtaattttggtgtattacgggggaggtattgtaaattttatgtatttttaagtatttttgtttttttttttagaattttgaggatttagagattttttttcggtttttaaattttaaaagtatattttttagttaattatttttgtttattgttgagttattaaaatagtttttttttttggttttattggtttattttttttttattggttattgtttttgatttttttattatttcgttttttgttttttcgggattttgttttaggttttttttttttttttgttttgttttttttttttggattattttgattattattaattatatgttgatgatttttaagtttttatttttagtttgggtcgtttttgtgagttttagatttatataattaagagttttttttgtttcgtttattttagatttgtttatttttaatattgttcgttttaggtagtggtatttttagtaatttaattattgatatgtagagatttttttttttgtattattgtttaattagttattagttttgtaaattttgaaaaatagagattagagattatatggttttatgagggatatatgtagagagtttttggtttttgggttttagtttatatacgtataaagttaaattggttttaattttttttgtatgtagttataatataatgttttttaagatttgttttattggttaggtatggtggtttacgtttataattttagtattttggggggttgaggcgggtagattattcgaggttaggagttcgagattagtttggttaatatggtgaaattttatttttattaaaagaaaaaaaaaatataaaaattagttaggtgtgtatttgtaattttagttatttgggaggttggggtaggagaattgtttgaatttggaaggtagaggttgtagtggagattgttttattgtattttagtttgggttatagagtaagattttgttttaaaaaataaaataaaataaaagatttgttttatttttagtgtgttttggtattttagagttaattgtatttgtttggaattattgttttttttaggaagttattttggttgttattattgtttgtatttgtgtttatttttttgatttgtggatagtagttttttgtaggtaggagaaatgagtttattttgttttttgttatattttagtggttagtatagggtttttatatataatagatatttgatatatatttgttaaagaatgaagattgatttttttatttgtgtttaaggaattattagatataaatgattaagtgagggaatagttttttgattaagttttagagtttatttagttttagttttttgtagttttggtatgtattagaagaggggttcgtggtgttcgttagtttgtgtgtttgttagtttgggttttggtagttttgaagttttggtagttttgttttttttgtttcgtattgttaaggttattgagtatagtattggaaggtaggtgagttgggatttttggttttttgtggttgaagttagtagatgtgtttattgttgtgttaattagttttttgttttaaattttatagggatataggggttttagaattttaatttattggcgtttgtttttttatttatttatatgtggtaaagtgtttgtcgaggtagggtaagagaatgtttgtaagtagtttgtttagatttttgtatgtacgttatttggaattagatataaatttaaggtaatgaaattagaggtttaggtgttaaagttatatggatgagaagtttaggtggtcgggtttgggagagcgtgatagttgttgaaggagaagagttaaggttttgtttagtttgttaaattgtgagtacggggtttacgtggggttgttttgttgttttgtttttgggtttggcggggagggatgtttttgtgtttatttgtgaaggtcgagtggtattatgtggttattgtgtgtttgttgtgttttagttttagggtgtagggtgaggagagagttagatgttagtttttatttattgtttattttttgtttaggttttgggttaattggatattttttgtaatttatgacgtaaatatattttttggttattttttagttggtttaaattaaattaaatttagtttgagtttttatttattagattagtaagatttttttattatttatggttgttttttagtttttttcgattatttatgaattttaggggtttgtataattttagagatggttagttcgtgttttatagttttgtagagaaaggtggaaggattttttaggttgttgttgttgttgttgtagatattagtggttatagttatagggtttttattattttttgtttatttgtagggttttatttgtttaatttggtttttgggaagataattttttattttttttattttagtttttttaagaggattttttttataggttttcgtagttgtagtttttagtttttggttttcgaatcgtatgtagttatttttttttgggggtaggttagggtgggatggagaatgtttgtttttttgttttttttttttatgttaaagtattaattttttaagatatagtggtatttttttttttagtttagatataagaattataaaacggtttatttatttttttaggtatgaggtgggagaaaaaaggtttaggatttagaatataaaagtttgattaatgtttttttaattaaaaaaaaaaaattttttttgtagggataaaattttattatgttgtttaggttgatttcgaatttttgggtttaggagattttttagttttagttttttaaagcgttgggattatagtagttatgagttgtagtgtttggttttggttaatgttttttatttttttcggttgagttattatgggtagggagaaatgatataggagttaattttttaatgaatattgtttatgtttttcggagaaaatagaagttattataggaggatttttttattttttattattaaattcgtaaatttatatatttttttttttttcgttttgttttttttgtgtttagggtgtttcggcgtttttaggttttgttttttatttttcgtttattgtattttttttattatagtatttttatttgtttatgcgtatgttttttttattttaaaaaaaatttttttttttggttttatacgtttttttagagtgggagagatttaagtgtttttttgttttttttttttataaatttaaaagttatttttataggacgtttttatttttttattttttgttcgttt

SEQ ID NO: 1539 - DNA, 5647 bp, Artificial Sequence
  chemically treated genomic DNA (Homo sapiens)
agatggagttttatattgttgtttgggttggagtgtagtggcgtgattttggtttattgtaattttcgttttatgggtttaagtgatttttttgttttagttttttaaatagttgggattataggtgtttgttaatatatttagttaatttttttgtatttttagtagagatggagttttattatgttggttaggttggttttaaatttttgattttgtgatttgttcgttttagttttttaaagtgttgggattataggcgtgagttattatatttagttttttttatatatttataggtgatttttttatttgtgatttggttatttatattttttgtttatatgttattaggatgttgttatttttttttattaatttttagaagttttttaattattttgagttattgaatgaatttttgatttattgatttaaaattatatttttaatatagttaattgtttttatttttttattttatggtttaggtttttttgttagaaatttttttgtattttagggttataaaaatatttttttatatttttttttaaaggtattatggttttgtttttttgtagttgtttttaatttgtttggaaatgattttggtatataggaggaagaagtttaattatatgtttttttttgtatataaataattttttttattgagtagttaattgttatttttttgatttgttatattttttttatatattaggttttttatatgtgtttgggtttgtttttgggtatttatttatttttttattaagtttatatttttttaattataataattttataataaattattatattttataggatttattttttgattttttatttttttaagttttttttggttattttatataaattttagtattagtttgttaatatttttgaaaaattagattgggattttttttttatattgaatatattgattaatttggtataattgatattttcgtaaaattgagtttttttatttaaggagataatttatttttttgtttatgtagatttttttatgtttttaaataaggtgttataattagttttgttttatgttaaattgttgtttaggtattttatagttatttttgttattgtaaatgaaaattttatttgtaaaggtatttttaatttatttgttggtattaataaagtaatagatttttgtatgttgattttatatttaataaaagttgtttagtttttattaatatgttttttgagttttttagatttttttttatgtagatgatttatttatgataaataataataattttatttttttttattttaatttttatgttttttttttttatgtttttatgttttattttatgggtagggatttttaatatatattttgatgaatagagttattgtttacgggtatttttgtgttaattttgttttttaaaagtatgtttttaaggatttataattatatatgtatttgtttttataggttttggtatttatgttttttttagtttaagtaagtttttgtttgttttttagtttgattattttgagtgttgaattttattaaatattttttttatttattgatatgatgattttttttttttaaattgttaatgtaataagttaatagttattttaatatttaattaattttgtagttttggaataaatttaatttgtttatgatatatttttatgtatattgttgtgtataatgtgtatttttatgtatattgttgtgtttggttaatattttatttagagttgttgtattaatatttttaatgagagagattgtagttttttttttttgtattgtttttttttttttttggtattatatttagtagatatgtaaaatgaatttagtatatttttgaatattttatttttagaagtagtttgtataaaacggggattatgtgttttttgaatgtttggtagaatttgtttattaaattatttgggtagtattttatatattttattatattaagttttaagttatgtagtttaagtttttgtattttttggtaggtttttttttcgtatttgaatgattagttatgatatatgtgaatttattagttttgttaaaatttttttttatgattatggatttgtttatttttttttataattttgttaatttttggtttatattttttgaaattatattattagataatttagagatatttttttgttaaagtatttttttgtattataatttaattatttttttttgtttaagtttattttttattgatattattattgttatgttagtttttttgaataatatttgtttggtgtgtttttttttttttttttaatttaaagtttttaatttttaatatttttattttatgttttatgtatagtttttgtaagtgatgtatagttggatttttaaaatatttttttttttttttttttttttttttttttttagggtttttttttgtcgtttaggttggaacgtagtggtgtgattatagtttattgtagtttttattttttaggtttaagtgatttttttgttttagttttttgagtagttgagattataggtgtatattattatattagattaatttttaaattttttgtgtagatgagggttttgttatgttgattaggttggttttaaatttttggttttaagtgatttttttattttggttttttaaagtattgggattttgaacgtgagtttcgattaaaatatttttatatgataaatagaaatatttgttttttaattggaaaatgtgttttattaatatttatggtaattattggtatattttgatttaattttagtaaataatattgtatttttaatttatttttttttgtgtttttttttttttttttattaattttttttttatagattaagtttttttttaaaaattttttttgtattttttattcggatgtttatgtttatttggtagttgtttttaaatttataataaatatttttgagtaaagtaaaattaattaatttttttttcgtttttttgaataatgaaatgattttagaattttattattgaatataaaagtagtatattttagattatttttttatatttgttttttagtttattaatattttttttagttttgtttaatttgttatttaatttatgttttgagtttttaaaatttttaattaatttttttttttaattttagaagttttatttggttttttaaaaaaaattatttagtttttttttttttgataatgttttattttttttttatatttttaatttttttttttagagttttagtagttttaaatatatttattttttagttttttggttgatattttaattaaatgtagtttttggggagaggtgtttaattttttttggtttttgttgatttttatttatagtggtttgtttttttatatgtttaaatattattgtgaatttttttttgtttttatagtggtagatagtatatatttgaattttaaatatatttgagggtaggtttaattttataaatttaaagggattttgtagagtttaaagagagatatgattgttttttatttttttgtgttagggtagagtgggattgtatttattgaaatatagtaggtaattttgtgagggttttggtttttatgaggattttttttttaattttttatttttggtttaagttttgtttttatatggttattaatatttggtggttatagaattaataatttttattttattttatttttatgttagaggggttttagtattagtttatgggattgttgtttttgtttttttttttatttttggtttcgggattttttttttattttaatgggagtttatttgtattttttaagtttttattaatattatgtgaatatagatttgtatatattgttagaagtagaaatttttaagtttatttttaaaatatgatttttgtttcgaaattttgtagaataatataatgtttatataatattaagttatgaaaagaaatatatttaaataattaaataagtatatttttttttttttttagttttttttttttattttaggtttatttagttgtattgtgttgtttgttataggtcgggtgaggtggtttacgtttgtaattttagtaatttgggaggcgaaggcgggtggatcgtttgaggttaggagttcgagattagtttggttaatatggtgaaattttgtttttattaaaaatataaaaattaattgggtgtggtggcgggtgtttgtaattttagttatttgggaagttgaggtaggagaatcgtttgaatttaggatgcggaggttgtagtgagtcgagattatattattgtattttagtttgggtaataagagcgaaatttagttttaaaaaaaaaaattatttataaaagtataggtgtaattttttaagtattaaagataagatagttcggattggatttgatttttagagttataattatttttaatatgttggtttattttggaattagattatttttagttttaatttgtaaaatagtgtataaaggaaatatggaaagttttttatatataaagggttgtgaaataataatagtttatagaaaatgttgaaatgatgatttgttttagtattttttgaaattttttttttattattttttttttatttttattgttattaatttaaattataatagttaatttttaggagaatagtagaagtttagtttttttttttttttttttttgatttttttttaattaatttgattgtagcgtaaatttttgcggtttaatattgtgtaatttttatatttttttcgtttttttatttagtttttttttttattaaatttaggggaattttcgttatcgtagtgttattagtattatttatttatttttatttaggttttttttagtatttattaaggattttttgttttagttttttatttttattttttttcgtttaaatttagtttatttgagagttttttttcgttagttgtggaaagaattttgcgtttttttagtaatgtatttttttgcgattttgttttgtgttttttggtttgtagtgttggtcgagaattcggatgattatgattttatgtatgtgaatttggataacgaaatagataatggattttattttattgaggatcgtaagtttattttaattgtttttttgttaattttgattatatatttattttttggtttaaataatatatatatattttgtggttagtgagataagttaaaaatttatagtttgttatgtaaaagtgagaagtatttgaagaaagatggaggttttaaagttatttttgtaacgtatataatgggttgaattatattaaatcgttaatatttgattgttttgagttatataatcggcgattttatagggtataatttaatttatatttgaatgaatgatttttgtcgtttttgagatatttatatgttgtttttcggaggtgtttttaaagggaaggggaatgttaggaacgggttgtaatttggtattatcgagggaggttagtttttataaagtatatttaaggtaggtttgggcgggttgttaacgtgtgtgtatttcgtattttagt

SEQ ID NO: 1540 - DNA, 5647 bp, Artificial Sequence
  chemically treated genomic DNA (Homo sapiens)
gttagagtacgggatatatatacgttagtagttcgtttaggtttgttttggatgtgttttgtaaaagttgatttttttcggtggtgttaagttgtagttcgtttttggtattttttttttttttaaggatattttcgaaaaatagtatgtaaatgttttagaaacgatagaaattatttatttaggtatagattaagttgtattttatgaaatcgtcggttatgtagtttaaaatagttaaatattgacgatttgatatgatttaatttattatgtacgttatagaaataattttgaaatttttatttttttttaagtgttttttatttttgtataataagttataaatttttaatttgttttattggttataaagtatatgtgtgttatttagattaagaggtggatatgtagttagggttagtagagaaatagttaaagtgaatttacggtttttagtgggatggagtttattgtttatttcgttgtttaaatttatatatatgagattataattattcgagttttcggttaatattgtagattagagagtataaaatagaatcgtaaggagatgtattgttggagagacgtaaagttttttttatagttggcgggaggagatttttaagtgagttgagtttgagcggaggagagtgagagtgagaggttggagtagagagtttttaataaatgttgaggaaagtttgaatggggatgaatgagtaatgttggtggtattgcggtaacgggagtttttttgaatttggtgggggagggggttgggtgggagagcgagggaaatgtggaagttgtataatattaaatcgtaaaggtttacgttgtagttagattaattggaggagggttagaggggaaagaggagagaaattgggtttttattgtttttttgagaattagttgttgtaatttgaattgatagtaatggggatgaaggaggggtggtaggggagaaattttagagggtattgaagtaaattattattttagtattttttgtgagttgttattattttataattttttatatatagaaaattttttatgttttttttgtatattgttttataggttgaaattgaaaatggtttgattttaagataaattaatatattaagaatagttatggttttgaaagttaagtttaattcgagttattttgtttttaatatttgaggagttgtatttatatttttatagataatttttttttttgagattgaatttcgtttttgttgtttaggttggagtgtaatggtgtgatttcggtttattgtaattttcgtattttgggtttaagcgatttttttattttagttttttaagtagttggaattataggtattcgttattatatttagttaatttttgtatttttagtagagatagggttttattatgttagttaggttggtttcgaatttttgattttaggcgatttattcgttttcgttttttaaattgttaggattatagacgtgagttattttattcggtttatgataaataatatagtataattgggtaaatttagaatggggaaaaaaagttgggggaaaaaaggaatatatttatttagttatttaggtatgtttttttttataatttggtattatgtggatattatattattttataaggtttcgaggtaaggattatgttttaaaagtaaatttagagatttttgtttttaataatatatataggtttgtgtttatatgatattaataaaaatttaaaaggtatagatgagtttttattaaagtaaggggaaaatttcggagttaaagatagagaggaaagtaaaaataataattttatgagttgatgttagggtttttttggtataggagtgaagtgagataggggttattagttttataattattaaatgttgatgattatgtggaagtaaagtttaggttaaaggtggagagttagaagggagatttttatgaaagttaggatttttatagggttatttattgtattttagtaggtataattttattttgttttagtataaagaggtaggaagtaattatgtttttttttgaattttataaggtttttttgagtttgtgaaattgggtttgtttttagatatgtttagaatttaaatatatattatttgttattgtgaaaataaaaaagaatttataatgatatttgaatatatgaggaagtaaattattataaatgagaattagtagaaattaaaaaggattagatatttttttttaagaattgtatttagttgaaatattagttaaaaaattagaaaataaatatgtttaaaattattgaagttttaaaagaaggaattggaaatatgagaaaagaataagatattgttaaaaagaaaaaggttaggtgattttttttaaagaattaaataaaatttttagaattaaaaaaaaaagttaattgaaaattttaaaagtttaaggtatggattaagtggtaaattaggtaaagttgaaaagaatattaatgaattggaagatagatataaggaaataatttaaaatgtgttgtttttatgtttagtaataggattttaaaattattttattgtttaggaggacgaaaaagaaattaattaattttgttttgtttaaaaatatttgttataagtttaaggataattattaaatggatataggtattcgaatagaaggtgtagggggaatttttaaagaaagatttgatttatgaaaaaaaaattaatgaaggaggaaagaaaagtatagagaaggataagttaaaagtataatattatttgttaaaattaaattaaaatatattaataattattataaatattaatgaaatatattttttagttaagagataaatatttttatttgttatatagaaatattttagtcggggtttacgtttagaattttagtattttgggaggttaaagtaggaggattatttgaagttaggagtttgagattagtttgattaatatagtaagatttttatttgtataaaaaatttaaaaattaatttggtgtggtgatatgtatttgtagttttagttatttaggaggttgaggtaggaggattatttgagtttgggaagtggaggttgtagtgagttgtgattatattattgcgttttagtttgggcgatagaaagagattttgaaaaaaagaaaaggagagagagagagaagaaatattttaaaaatttagttatatattatttataaaagttatgtataaaatataaagtagaaatgttaaaagttaaaagttttaaattggaggggaggaagagaatatattaagtaagtattatttaaaaaagttagtatagtagtagtaatattagtaaaaaatagatttaggtaaaagaggatagttaaattatgatataaagaaatattttaataggaagatatttttgaattatttagtaatatagttttaaaaaatataaattaaaggttgatagaattataaggagaaatgggtaaatttataattatggagggagattttaataaagttgataagtttatatatattataattgattatttaaatgcgaaaaaaaagtttgttaaaggatatagaaatttaaattatataatttaaagtttgatataatgaagtatatagagtattgtttagatggtttgatggataagttttattaaatatttaaggaatatataattttcgttttgtataaattgtttttgagaatagagtgtttaggaatgtgttaaatttattttatatgtttattaagtatgatattaaaaagagaaaaggataatataagaaaggaaaattgtaattttttttattaagaatgttgatgtaatagttttaaataaagtattagttaaatatagtaatatgtataaaaatatatattatgtatagtaatgtgtataaaaatatattataagtaagttgagtttattttaagattgtaagattgattaaatgttagaatagttgttaatttattatattaatagtttaaaggagaagaattattatattaatagatgagaagaatgtttgataaaatttagtatttaaaataattaaattagaaagtagataggaatttatttaaattgaaaaaaatataaatattaaaatttatagaaatagatatatatgtaattgtaaatttttggaaatatatttttgaaaagtaggattaatataaggatattcgtggatagtgattttatttattaaagtgtgtattggaagtttttgtttataaagtaggatataaggatataaggagaagaaatataaggattaggatggaaagaaatgaagttgttattatttattatgagtggattatttatataaagaaaaatttaagagatttaaaagatatattaataagaattgagtaatttttgttggatataagattaatatataaaaatttattgttttattaatattagtagataaattgaaaatgtttttgtaaataaagtttttatttatagtagtaaaaatagttatgggatatttaagtaataatttaatataagataaagttaattataatattttatttaaaaatataaaaagatttatatagatagaaagataaattatttttttaaatgagaagatttagttttacgaagatgttagttatgttaaattagttaatatgtttaatatgaaaaagaagttttagtttggttttttaaggatgttgatagattgatattaaaatttgtatagagtagttaagaagagtttgaagaagtaggaggttaggaagtaggttttatgggatataatgatttattataaaattattgtaattaagaaaatgtagatttgatgaagagatggataaatgtttagaaatagatttaaatatatatggaaaatttaatatatgaaagaggtgtggtaaattagaagagtaataattgattatttaatagaaaaaattatttgtatataaagaaaaatatataattaaattttttttttttatgtattaaagttatttttagatagattgaagataattataagaaagtaaaattataatgtttttaagagaaaatataggagaatatttttatgattttggaatatagaaaaatttttaataaaaaaatttaaattatgaagtaaaaaaatgaaaatagttgattatattaagaatataattttaaattaataaattaaaaatttatttagtagtttagaataattaaggaatttttaaaaattaataagaaaaaatggtaatattttaatagtatataggtaaagaatgtgaatggttaaattataagtgaggaaattatttataaatatatgaaaagggttgggtgtggtggtttacgtttgtaattttagtattttgagaggttgaggcgggtagattataaggttaggagtttgagattagtttggttaatatagtgaaattttatttttattaaaaatataaaaaaattagttgggtgtgttggtaggtatttgtaattttagttatttgggaggttgaggtaggagaattatttgaatttatgaagcggaggttgtagtgagttaagattacgttattgtattttagtttagataatagtgtgagattttattt

SEQ ID NO: 1541 - DNA, 8305 bp, Artificial Sequence
  chemically treated genomic DNA (Homo sapiens)
tatgacgttgatttattgtaatttttattttaagtgatttagttttttaagtagttgggattataggtgtgtacgattattatttagttaatttttgtgtttttagtatagatggggttttattatgttggttaggttggttttgaatttttgattttaaaagtgtgggggaaagaaagagagattagattgttattgtgtttatgtagaaaaaggaagatataagaaattttattttgatttgtattaagaaaaatttttttgttttgagatgttgttaatttgtaattttagttttaattttgtgttcgtagaaacgtgtgttgtattgatttaaggtttaatggatttagggttgtgtaggatgtgttttggtaaaaatgtgtttgtaggtagtatgtttggtaaaagttattgttattttttagttttaagtaattagggatattatatattgcggaaggtagtagggatttttgtttaagaaaatttgggtattgtttaagattttttttattgagatagtttgagagatggtttcgtgggaagggaaagatttgatcgttttttagttcgatatttataaaaggtttgtgttgaggaggattagtgaaagaggaaggtttttttgtagttgagataagaggagggtatttgtttgttgttcgtttttgggaatggaatatttcggtgtaaaattcgatcgtatattttatttattgagataggagaaaattgttttatggttggaggtgagatatattggtagtaatattgttttttattgtattgagatatttgtgtaaagttaaatataaatttggtttacgtgtatatttaggtatagtttttttttttaaatttatttatgatatcgagttttttgtttacgtttttttgttgattttttttttattattattttatagttttgttatattttttttatcgagatagtagggatagtgattaataaatattgagggaatttagagattagtgtcggtgtaggtttttatttgttgagtatcggttttttgggtttatttttttttttttatattttgtttttgtgttttatttttttttttagtttttcgtttttattttgtgagaaatatttagaggtgtggaggggtaggttttttttaaaatgatttatttattttagttttttaaagtgttgggattataggtatgagttattatgtttagttatatataatttatttttaaataatttatttaattaatattatatgattttatgattttttattttatggatgagaaaaaagaggtaagagaagcgatattagttgtttaggatttttagttattaattagtggaagtagaatttgaattaagggagtttttggagttttcgtttttaatttttttttttttttttttatgtttttttttttttttttgtttttaggttttttatattatatttttttggataaagttttatatttgatatttttttttttggggtggatagagttttattttgttatcgaggttggagggtcgtggcgtaattatggtttatggtagttttaaatttttgggtttgagggattttttagttttagttttttaagtagttgggattatgggtatgtgttattatatttggttaattttttaattttttgtagaaatatagggggtgggggtatatttgaaaattttaaattttttttgattgtcgtgagtatttttgggtagaagttattttacgattttattttgttggtatgagtgttggatagtaatttggtaatattttttagattataaatgtgtatggtttttggtttagtaaattagtttttgggaataaatatgatagatattgttatatatatgggaaatgttatggatatgatgatttagggaagtatagtttgtaagtataaaagggttggaaatatttaaaaagtttattttttgaagatagttttaaaaatgacggtgtatttatgtaatggaatagtatatatttgtgaatgaatgaatgaggtagtttaatatatttgtttatgggaaaattattaagatatgttgttaagtgaaaaatagaaagatatagaataatgttattattttattttttaatgggagagggaagaataaggaaatggatttatatttgtttaattatataagttttttgatgatttttttggatttagaagtttgaaaattatagtattaagaggatgtttattgggtatggtggtttacgtttgtaattttagtattttgggaggttgaggagggtggatcgtttaagtttaggagttcgagattagtttggttaatatggtgaaattttatttttattaaaaatataaaaaaattagttgggtatggtggtgtaggtttgtaattttagttatttgggaggttgaggcgtaagaattatttaagtttgggaggcggaggttgtcgtgagtcgagattacgttattgtattttagtttgggagatagagtaagattgttttaaaataaataaatatatataaaaaataagatgtttattggagatttttatttattattttattagatgatattttagtatttgagtgaagaaaatgtttataattggtttaaatatttaaggaatttagatttttgatagagaaatatatagaagtaagtagatatgtttcgaattaaatttgtttttttttttaagtttgttttttcggagtagtttttgattttttagggttttgagaggagtttttggagttataggagtttgggagtttagagaagtgggggaattttagatggtgatagtattatttagaggaggaatataacgatggttatagatttttaatttggaaataatttagtaaaataatattgatagaaaatttagagatttttaagagattagtttttttgtttttatttagaaatttatttatatatatttagggtgagagattttaagtattagatgtgttatatataagtattagatttaagttagagagggtattcggggatagaaatttttaagttagttaaaagttaaaggaaggattttatagaaagatataggaatgtggggttaggtatagtggtttatgtttgtaattttagtattttgggaggtcgaggtgggaggatcgtttgcggttaggaatttaaggttagtttgagtaatatagcgagattttatttttataataaatttaaaaattagttgggtgtgattatatatgtttgtggttttaattatttaggaggttgaggtaggagttgagtttaggaggtggaggttgtaatgagtaatgatggcgttattttattttagttttagtgaaatagtgagattttgtttaaaaataataataaaaataaaaaatatataaagatgttagagtatagggattagagttgttagtcggttttatggagattttggttaggatagttatttttggggattaggaagttttttagtttttgtttttgagggtttggttttttgagtttttttgttattttttattttttttttatttttttttgtttatgttgtgtttttattttttttaatttttttgtttttgttttttagtttttatttttgagtgtgtttgttttttttttattttttttttttttttttttttttttttttttttttttttttttttttttttttttttttttttttttttttttttttttttttattgtaggttggtttataatttttattttttttagatttgatggagttttggtattaatttgtttatggtttgtttttttttattagaatacggtttttattaaaggtagagatttttgtttgttttattttttgttgtatatttagtgtttgggatattggttggattaataaatatatgttgaatgaagaatgaatgaatgattatttttatgaatattattatttgatgttaattgtaaagtaataataataataattgttattgttattgttgttattgttggtatattagttttttatttagtataaattatattttcgaaattgagttaggtagttttttgtttaagttttatagattacgttgtgaggtaagtattgttagtatgtttttttttttttttttttgagatagagttttattttgtcgtttaggttggagtgtagaggttcgattttggtttattgtaatttttgtttttcgggtataagtgatttttttgttttagtttttttagtagttgggattataggtatgtgttattatgtcggttaatttttgtatttttagtaaagatgggtttttgttatgttggttaggttggttttgaatttttggatttttggtgatttttttgtttcggttttttaaagtgttgggattataggcgttagttattgcgtttgtttttttagtttttaaatttttttttttttttttgagataggtttggttttgttatttaagttgtagtgtagtggcgtaatggtagtttattgaagtttttaatttttgggtttatatagtttttttgttttagttttttaaaatgttggaatttaggtttgagttatcgcgttttattatgtttattttttagataaagaatttgagggttttcgaggagaaattatttgtttaatatgagttttggttttgtttgattttaaagtttatgggaagtttaggttgcgtggaaggatagtttggtgggtttaggatttgttttattacgagttggaattttagttttgttattcggtaatcgcgagtcgttagtaagttgttgaattttttcgtgtgttttcgtttttttatttggaatgtgggcgattttatataggaagtcgttttttttagtgggtatcgacggagcgagcgcgcgtttgtagcgggattgagcgtcgggagagatttgcgtaggcgtaggcgcgcgggaagggttagtttgggtggtttatttcgcgtttggcgggattggtcgttaattttttttcgttttagttatttgtttggagtttgaagaagtgggtatttttttttttattttaggtattggaggagcggtttttcggggattttaggatttgagtttcgggagttggattcgtagcgatcgcggtagagcgagcgggcgtcgggaagcgaggagacgttcgcgggaggtttagttgttcggagtaattggtatggttcgagttatggtcgtcgcgtggtcgttgttgttggtggcgttattggtgttgttttggttatttttaggaatcggtgagtgattttcgcgtagttcggtggtttttgtttggttttcgtttcgtatttaggtcgggtatttgtttttttgggttttcgaagatgacggtttcgtcgcggcgttatttattttttatttttgtttcggggttggaaggaatacggtgcgagggtgcgagggtaggattttttttttggttattcggagagcggtcggagttgggtatagaaatttttcgaaattggtagtaatacgggtcgggtataagatttttttttgggtttttcggaaaggggatggagttgggtgaggaaattttttaaaaaggtaagtgaatttcggaaaattagtagatggtgacgtatgtcggattattttatttaggtttttgtttagtatatttaggttataatttagtagcgtgttggtaggttgggtttggacggaggggatggttgatgttggggaggaggatagtgggtgatatttgatattattatttttttgatttttaatgtttgattttaggggtttggttatttatttatttttttattttttttttttttttttttgagatagttttattttatttatttaggttggagtgtagtgttttgttttcggtttattgtagtttttttttttcgagtttaagcgatttttttgttttagtttttcgagtagttcggattatagatatgtgttattatgtttggttaatatttttgtatttttagtagatataggattttattatgttggttaggttggttttaaatttttgataaatatatatattatatattattattatatattatatattatagtaatatataataaaaatatataatatatattatagtaatatataatatataataaaatatataatatatattatatattatagtaatatataatatataataaaatatataatatatattatagtaatatataatatattataatatattatatatattattataatatataatatgtatattatatattatatatattattataatatataatatgtattatgtattatataattgataatatataataatatattttttaataaatatatattaaatatattatatatttataatatatattatttatataataaataatatatattttattatatatttaaagagtaaatagataatatattttattatttatttatatattttgtgtatatatatatatatatatatatatatatatagtgcgtgtgtgcgtgtatgtgtgtgtgtgtatgagagagataaggttttgttttgttgtttaggttggagtgtagtggtataatttcggtttattgtaaattcgattttttaggtttaagcgatttttttattgtggtttttggagtagttgggattataggtgtttatttggttaattttttttgtatttttggtagagatagggtttcgttatgttgtttaggttggttgtagttaagtatagtggtttatgtttgtaattttaatattttgggaggttgtggtgggaggattatttgagtttaggaatttaaaattcgtttgggtaatatggtaagattttatttttataaaaataattaattaaataaaaatttaaaaataaaaaagaatgtataggattatgtttattagtgttaataagcgttgttatattttgaggatttattatgtgttagggtttttagtagaaagatttttatataggatttgggggattagaggttagtttttgatcgtttaagtttaaattttatttttgttattaaatttttgtatgatttggaggatattatattttgtgttagtttttttgtttgtaaaatgatgttaatagtagtgtttgttttaggggggttatttgaggattaaatgttaagatatatgtgaagtatttagaatagtttttgatttgtgttagtattttgtgagtgtttattgttttaagttttattttataaattaggaaaaagaattagagaggttaagtaatcggtttgaagttttatagtagaaaattgaagggatttaaaatttttgggttataattgtttttttttcgtgttttaattttttatatttttttaattaggatttatttagagtaataatgtagcgttttatggatttgaagatttaagattttttttcgttttttatattggggttattttaatttttaatggtaagttgtgttataaatgataatagttatggtatgtgaaatttacgatattggtgcgatgaaaaagttttgggttaggtgcggtggtttatatttgtaattttagtattttgggaggtcgtagtgggaggattatttgaggttaggagtttaagattagtttggttaatatggtgaaattttatttttgttaaaaataaaaataataaaaaattagttaggtgtggtggtgggagtttgttattttagttacgcggaaagttgaggtaggagaatcgtttgaattttagaggtagagtttgtagtgagtaaagatcgcgttattgtattttttttgggcgatagagagagatttcgttttaaaaaaaaaagagaagaaaagaaaaagttttggcgttatatagtagtaatgtttgtataatatcgtgaaatgtattatagtgttattgaattgtattttttaaatgatttaaatggtaaatttagttttttaattataatatttattataattttttaaattagtgatgttgagattttagggaaatacggtaataatagaagaaatacggtaataaatagttaaagtgaaggagtacggttaagttgtagattattttagacgtttttatttttttcgtttgttatggttttaattagtgttttagttttttttttttttatattttacggtttatcggggatttagggttttagcgtgtaagtcgcgttaggtgttcgggtttttggagtttttttttatttagtttaagaacgtttcgggtttgatatttttttttcggtttttcgtagg

SEQ ID NO: 1542 - DNA, 8305 bp, Artificial Sequence
  chemically treated genomic DNA (Homo sapiens)
tttgcggagaatcgaagagaaggtgttagattcggggcgtttttggattagatagggaggggttttaggagttcgggtatttggcgcgatttgtacgttggggttttggattttcggtggatcgtggggtgtggggggagggggaattggggtattagttggggttatggtaggcgaggagggtaagggcgtttgggatggtttgtaatttggtcgtgtttttttattttggttatttattatcgtattttttttattattatcgtatttttttgaaattttaatattattgatttaaaaaattgtggtaaatattgtggttaaaaaattaaatttattatttaagttatttaaaaaatatagtttagtggtattatagtatattttacgatattatataaatattattattatatagcgttagaatttttttttttttttttttttttttttgagacggagtttttttttgtcgtttagggggagtgtagtggcgcgatttttgtttattgtaagttttgtttttggggtttaagcggtttttttgttttagtttttcgcgtagttgggatgataggtttttattattatatttggttaattttttgttatttttgtttttagtagagatggggttttattatgttggttaggttggttttgaatttttgattttaagtgatttttttattacggttttttaaagtgttgggattataggtatgagttatcgtatttggtttagaatttttttatcgtattagtgtcgtaggttttatatattatgattgttgttatttatagtataatttgttattaggggttagaataattttaatgtagaaaacggggagaaattttgggtttttaaatttatgaaacgttgtattattattttgggtgggttttggttggaagaatgtgggggattgaggtacgagaggaaggtaattatagtttaggagttttgggtttttttagttttttgttgtggagttttaggtcggttatttaatttttttgatttttttttttagtttgtaaaatgagatttagaatagtggatatttatagggtgttgatatagattaggggttattttgggtgttttatatatattttggtatttaatttttaaatagtttttttgaggtaagtattattgttaatattattttatagatagggaaattgatatagagtatagtgttttttaagttatatagaggtttagtggtagaggtgggatttgaatttgggcggttagagattgatttttaattttttaggttttatataaaaatttttttgttaagggttttagtatatagtaggtttttaaaatgtgatagcgtttattgatattaataaatatggttttatgtatttttttttatttttaaatttttatttagttaattatttttgtagagatggggttttgttatattgtttaggcgggttttgaatttttaagtttaagtgatttttttattatagttttttaaagtgttgggattataggtatgagttattgtgtttggttgtaattagtttgggtagtatagcgaaattttgtttttattaaaaatataaaaaaaattagttaggtgagtatttataattttagttattttagaagttatagtgagaggatcgtttgagtttgggaagtcgagtttgtaatgagtcgggattgtattattgtattttagtttgggtaataaagtaagattttgttttttttatatatatatatatatatacgtatatacgtattatatatatatatatatatatatatatatatatataaaatatataaataaataataaaatatgttatttatttattttttaaatgtataataaaatatatattatttattatataaataatatatgttataaatatataatatatttaatatatatttattaagaaatatattattatatattattaattatataatatataatatatattatatattataataatatatataatatataatatatatattatatattataataatatatataatatattataatatattatatattattataatatatattatatattttattatatattatatattattataatatataatatatattatatattttattatatattatatattattataatatatattatatatttttattatatattattataatatgtaatatataataataatatataatatatatatttattaggagtttgagattagtttggttaatatggtgaaattttgtatttattaaaaatataaaaatattagttaggtatagtggtatatgtttgtaattcgagttattcgggaggttgaagtaggagaatcgtttgaattcgggaggaggaggttgtagtgagtcgagagtaggatattgtattttagtttgggtgaatggagtgagattgttttaaaaaaaaaaaaaaaaagaatgaaagaatgaatgaatggttaggtttttggagttagatattgggggttagaggggtaatggtgttaagtgttatttattgtttttttttttaatattaattatttttttcgtttagatttagtttgttagtacgttgttgggttatggtttgggtatgttgagtaggaatttgggtaaggtaattcggtatgcgttattatttgttgatttttcgggatttatttgtttttttgggaaatttttttatttaattttatttttttttcgaggggtttagaggagggttttgtgttcgattcgtgttgttgttaatttcgaggaatttttgtatttaatttcgatcgtttttcgggtggttaagaggagggttttgttttcgtattttcgtatcgtgttttttttaatttcggggtagagatggggggtgggtggcgtcgcggcggggtcgttattttcgggaatttaagggggtaagtattcggtttggatgcggagcgggagttagataggggttatcggattgcgcgggggttatttatcggtttttgggggtggttaggatagtattagtagcgttattagtagtagcggttacgcggcggttatggttcgggttatgttagttgtttcgagtagttgggtttttcgcgggcgttttttcgtttttcggcgttcgttcgttttgtcgcggtcgttgcgagtttagttttcggagtttaggttttggaattttcggggggtcgtttttttagtgtttggggtgggaaggggaatatttatttttttaagttttagataagtgattggagcggaggggagttggcggttagtttcgttaggcgcggggtgggttatttaggttggtttttttcgcgcgtttgcgtttgcgtaggtttttttcggcgtttagtttcgttgtagacgcgcgttcgtttcgtcggtgtttattagaagaggcggttttttgtgtgaggtcgtttatattttaggtgaggaaacggaggtatacggagagatttagtaatttattaacggttcgcggttgtcgagtggtagagttgaggttttaattcgtgatgggatagattttgagtttattaggttgtttttttacgtagtttaaattttttatgggttttggggttagataagattagggtttatgttgggtaagtggttttttttcgagggtttttagattttttatttgaaaaatgggtatagtagggcgcggtggtttaggtttgaattttagtattttgggaggttgaggtaggaggattgtgtgaatttaggagttagaggttttagtgagttattattgcgttattatattatagtttgggtggtagagttagatttgttttaaaaaaaaaaaaaaaagtttgggggttgggggagtaagcgtagtggttgacgtttgtaattttagtattttgggaggtcgaggtaggaggattattagaggtttaggagtttaagattagtttggttaatatggtaaaaatttatttttattaaaaatataaaaattagtcggtatggtggtatatgtttgtaattttagttattggggaggttaagataggaaaattatttgtattcgggaggtagaggttgtagtgagttaagatcgggtttttgtattttagtttgggcgatagagtgagattttgttttaaaaagaaagaaaaaagggtatattaatagtatttattttatagcgtggtttgtaaaatttaaataagaaattgtttagtttaatttcggggatatagtttgtattaaataaaaagttgatatattaataatagtagtagtggtagtgataattattattattgttgttttatagttggtattaaataataatgtttatgagaatggttatttatttattttttatttagtatatatttattgatttagttagtattttaggtattgggtatatagtagaaaataagatagataaaaatttttgtttttaatgaagatcgtgttttagtggagggaaatagattataaatagattaatattagaattttattaggtttggggaagataagggttatggattagtttgtagtagggagaggggaggagggaggggggagagagaaagagagagagagaaagagagagagagaaagagagagagagagagagagaaatgagagagaaatagatatatttagagataagggttgggagatagagatagagagattgaaagagatagagatatagtatagatagagggagatgagagagaaatgagaggtgatagagagatttagagagttaaatttttagagatagaaattgagagattttttggtttttagaggtggttgttttggttagggtttttatgaggtcgattaatagttttggtttttgtgttttgatatttttatatgttttttatttttattattatttttagatagggttttattattttattgaggttggagtgaagtggcgttattattgtttattgtagtttttattttttgggtttaatttttgttttagttttttgggtagttgggattataggtatatgtgattatatttagttagtttttaaatttgttgtagagataggatttcgttatgttgtttaggttggttttgaatttttggtcgtaagcgatttttttatttcggttttttaaagtgttaggattgtaggtatgagttattgtgtttggttttatatttttgtatttttttgtaaaattttttttttggtttttggttggtttggaggtttttgttttcgggtgttttttttaatttggatttgatgtttgtgtatgatatatttgatgtttggggttttttattttggatgtatgtaggtgaatttttaaatggaaatagggaggttagttttttggaaatttttgaattttttgttagtgttgttttgttgagttatttttaaattgggaatttgtggttatcgttatgttttttttttggatgatgttgttattatttgggatttttttatttttttgggtttttaagtttttgtggttttagggattttttttagggttttggagggttagaggttgtttcgaagaagtaggtttagaagaaaaagtaagtttggttcggggtatatttgtttgtttttgtgtgtttttttgttaagagtttaaattttttgagtgtttggattagttgtagatattttttttatttaagtgttgaaatattatttgataaaatagtgaatggagatttttaatgggtattttattttttgtgtgtgtttgtttgttttgagatagttttgttttgttttttaagttggagtgtaatggcgtgatttcggtttacggtagttttcgttttttaggtttaagtgatttttgcgttttagttttttaagtagttggaattataggtttgtattattatatttagttaatttttttgtgtttttagtagagatggggttttattatgttggttaggttggtttcgaatttttgaatttaggcgatttattttttttagttttttaaagtgttgggattataggcgtgagttattatgtttaatgggtatttttttgatgttgtggtttttaaatttttggatttaaaaggattattaggaagtttgtgtaattaagtaaatatgaatttatttttttattttttttttttttattaaaaaataaaatggtagtattattttgtatttttttgttttttatttagtaatatattttggtgatttttttataggtagatatattgagttattttatttatttatttataaatgtgtattattttattatatgaatgtatcgttatttttgaaattgtttttaggggatgggttttttgggtgtttttagtttttttgtatttgtaaattgtgtttttttgggttattatgtttatggtattttttatgtatgtaatagtatttgttatatttatttttagaagttgatttgttgggttaaaggttatgtatatttgtggtttagaggatgttgttaaattgttgtttagtatttatgttagtaaagtaaggtcgtggagtggtttttatttagaaatgtttacggtagttagggaaggtttaaaatttttagatatgtttttattttttgtatttttataaaaaattaaaaaattagttaggtgtggtggtatatgtttatagttttagttatttgggaggttgaggttggaggattttttaagtttaggagtttgaggttgttatgagttatgattgcgttacggttttttagtttcggtgatagagtaagattttgtttattttaaaaaagaaaatgttagatgtgaagttttgtttagaagggtgtgatgtaggaggtttgggagtagggggagaaagaaagatatggagaggaagaaaaggagattgggaacgagggttttagagatttttttggtttaaattttgtttttattaattggtagttgggaattttaagtaattggtatcgttttttttgtttttttttttttatttataaaatagggggttataaaattatgtggtgttagttaaataagttatttagaaataagttatatgtggttgggtatggtggtttatgtttgtaattttagtattttgggaggttgaggtgggtggattattttgaagggggtttgtttttttatatttttgagtattttttataaggtggagacgagagattgagaaaagaaataagatatagagataaagtatagaggaagaaaagtgggtttaggggatcggtgtttagtaagtgaggatttgtatcggtattggtttttgagtttttttagtatttattgattattatttttattatttcggtgagggggatgtggtaggattatagggtaatggtggggagagggttagtaggaaaacgtgagtaaaggattcggtgttatagataaatttaaggaaaggagttgtgtttggatgtgtacgtaggttagatttatgtttgattttatataaatattttagtgtagtaaagagtagtattgttgttagtgtgttttatttttagttataaggtagtttttttttattttagtaaatagaatgtacgatcgggttttatatcgagatattttatttttagggacgagtagtagatagatgttttttttttattttaattgtagagaggttttttttttttattaattttttttagtatagattttttatgggtgtcgggttgggggacggttaggtttttttttttttacgaggttattttttaggttgttttagtgggggaaattttggataatatttaggtttttttgggtagaggtttttgttgtttttcgtagtgtatggtgtttttggttatttgagattggagaatggtaatgatttttattaagtatattgtttgtaaatatatttttattaaagtatattttgtatagttttaaatttattaaattttgagttaatatagtatacgtttttgcgagtatagggttggggttagggttatagattaatagtattttaaggtagaagaattttttttagtatagattaaaatggagttttttatgtttttttttttttatatagatatagtaatagtttgattttttttttttttttttatatttttgaggttaggagtttaagattagtttggttaatatggtgaaattttatttgtattaaaaatataaaaattagttgggtggtagtcgtgtatatttgtaattttagttatttgggaggttgaattatttgaggtggaggttatagtgagttaacgttatg

SEQ ID NO: 1543 - DNA, 13792 bp, Artificial Sequence
  chemically treated genomic DNA (Homo sapiens)
agaggggtttgggggttaaaagggtaggaagagaaattgttttaagtgggtatgtggggagcgaagtgtgttatatttcgttgcgtgggaatttgtggtattggtttgcggatgagttttatggtaggtagggttttggggagtaggtttgttcgttataattgaggagtttttgtgttttgttgttgagtttaggcgtttgtaggtttgtgacgttttagggggtcggtttgaggttcgttatgttggtttagtatttttgggaagtgaggtagtttgaattgtttaatttgagatttagtggggaaattgaggtatttgagaataagttttaggggtatgggttttagattttggagtttatagggtggttagggagaatataggtagtgtttgagtttaggaaaaaaaaaaagattgatttttttgatatttgtgggatgtaagagtttttttgttgagggtataggttttatggatgtttttgttttttattttttatttttttagtttttattgtttagtatatagtagttttttgtaagtgtttatatatatatatatatatatatatatatattcgggatttttaaagtttttgtttttgatttattatttgatatttagttaggtgatttgtagatgtaatggttattttagtattgtagttggtgtttgtgttattttttataaggggtaatggaggtattgaggttatattttaggagggatattatttagaaagaggttttagggagttaggttgagttagagtttgtttttgtggtagggtgggaaagtattgggttgggtgttgttgttttgtgtttttgagtaggtgatttaatttttttagttattgtaaatgatggattgtatggtttattaagttttaatatgttattattttagtggttttagtttttatatttgggttagtttttgttttttatgtaagagggaatttgcgggaaaggagataggatgtgttttgtggattagttttgattgtttagggaattagagaaagttagtagggaattttttaagttttggattttgttagtggtaggcgtgatatggttaatttaatttaaggttaggtttgttttttttattttttgtaggggtttataattggttgggagataggttagatatatatgttaggaagtagaaaataaaagggtataggttagtgttatatgttattggggtattaatagaattgttagttgagtaggaagagatgatagttataagggcgttttggaagaggggcgtttagtagtattttttatagtgtttagtatggagtaggtgtttagtaaatatttgttgaatgaagttttagggagggaggtttgttgttttatagatgaaagatgatggtgatgatgatgatggaagttagtatttaatgagttttttatttgttttaagtgttgttttttgagttttttatggatttttttttttaatttttacgtagttttatagggtaggtattagttattataatttttattttatagatgtgtaatattggtgtaaattgagttatatttgtttttttttttttatatttttaaaacgtaaaataaattggaatgtttattgttttaatataggtggtattttttttatttttacgtatttttatgtttttgtataagttgttttttttatttaggagttttttttttgttttttttggtttaaatttgatttgttttttagggttttagttaaatgtttttttttttagtaattttttttgtttgtttaaagatgatgagtgaataattatattatattatttatttgtttttattttttttatttaattaatttttaggtagttatattttttttgttggtcgtattttttttggaagtttatttaagattagaggattaaagaagtttgatttaaagatggagagagtgtagtcgggtatagtggtttatgtttgtaattttagtattttgggatattaaggagggtaggttatttgaggttaggagttttagattagtttggttaatatggagaaatttcgtttttattaaaaatataaaaattagtcgggcgtggtggtatatatttgtaattttagttatttaggaggttgagataggagaaatatttgaatttgggagatagaggttgtagtgagttgagatggcgttattgtattttagtttgggtaatagagtaagattttgttttaataaaataaaataaaataaaataaaataaaataaaataaaataaaataaaataaaataaagatggagaggatgggagggtaagagtagggaataagaagatattggtatatttgggattgtttttttaaattatgtttttagtttttgtaatgtgtttggtatagagttaaaggttattataatgaatttaatttaattttggtttttaaagtatttagtagttagatgggagatttttagttgttataaattaaatttgatagcgtgttttttagtttaaaatttttttagtagttatcgggtatgatttacgaatttgtagattttttttttttttaagttttaggtttaggttaaattagttaattttttgtgggttttttatttatttgattattgtttatttttatttttttgttcgtgttgattttgtattttaaatttagttttttttatgtttttgttttttagtatttattttggtttgatagatgatttatcgagattttgtgttcgtttttttgaagtttttatattaattttatttcgggttaaattgggtattttttttgtgatttattaaatttatataattttatattaaatatttgtttatgatattcgtttttatgtttgtttttttttattttttaattagattgagtttttttaggataatgatgatgtttttgtatttttaagttaggtattgtgttttgatataaagaaagtttaggttatatttgttaaatgtaaaagattatatagtgagtgggtgagtgtttatgataatgttagatttgattattttcgcgagaaatcgagatattttagggtcggattttagatagtgggaatatggcgttgtttttgttttttttttagtgaggaattagaatttacgtgttattagaaatagttattttttttttgtttttgttcgtttagagggttgggtaaagggtagagggagtagtgttcggttagggtttggggagaattcggttttttttagtgggaaattttgtttgttttttttttttagggggaggggatggggataggaggattagagtaaggggaagagggaaggttcggagggcgtagtcgttttggtagaaattttattatattcggatgtagtgggtggtgaacgggatggggcggagagtttttgttttgttagggatattgattggacgatttattttcgcgggaattttataaattttttaaaattaaggttttggaaattggaggagagttcgtttttaggttatgtttgggtaagggcggggcgcggggtgttttaatttttggaaaaggaattttcgaagggagtagggattagaaaagaaattttattagaaattttagtgggttcgttttatttatttatgtttattattgatttttttggtagtttttcgtcgtttcgcgtatcgttgttttttcgtggaacgtttaagtggtgtagaggagagggattttcggagattgggttttgttgcgagttatattacgtttcgtttcgggcggaatttttttttgggtttttgttttttcgtttgtgaaatggggttagggtgggagtagagggtttgtagaagttttgttagtttttacgttgttagtcgggattttttatttcgtttttttttttatcgtcgttttcggttcggttttaattttatttttattcgtcgcgtttcggcgtcgtcggtcgttaggggttattgtttgtttttgttagcggaggaggagggtagttcgcgttttagtcggttttttagttggaaggcggtcgaggggtagttttcgagcgagggttttgagtcggatttcgtagttcgcgttcgcgattcgtttttgtttcggtcgggaaggcgcgtgcgttcgggtttcgatcgggtttcggcgggcgcgtatcgaggttaggagggggttaacgttaattttttttttttggttgatattacgggcgagcgggtgagaggttggagttcggcgagtgagagaaagagagcgagagtagcgagcgcggttttatattgttgcggatcgtcggtattcggtagagcggcggcggttgggacgcgcggcgttttcgattcgtttttttcgcgttcggtcgcgtagttagagttattcgggtcgtcgatcgtcgagtttcgcgttcgtcgtttgggtttcgagttttttgcgtcgttcgggtgcgtttcgttattttcggaggacggtcggttatggacgtttgtaagttggagtcgagcgggagggtgtgagcgggtcggggttaggagttcgcgtcgcgtaatcgggtagtcgggcgcgtcgggggtgggtttttttttttagtttcgttttgcgtggaagaagagggcggggatcggcgtcgggaggagagcggaggaggcgaaggggtatgattcgtgtaatttgcggcgggtatttgtcgagtttttgagtcggcggcggttcggggttcggattgcggtcgcgcggattttatttagtttatttcgtttcggtcgacggttgtagttgatttggatttttcgagcgttcgtcgatcgttagcgatttttttttatttttcgggttggtttttgttgcgcgaggagcgttgttttcgtcgtttttttcgtcggattttcggttttcgatggttcggatggggtttgcgggcgtcgttggacgttggtggggattcgttttcggtttgatcgtatttttttttttaggtaagagcgtttatttttgttgtttttatttttatttaatgttttttcggggttgggagtcggatggcgggtacgattggattgtggggagtgaaaggagttagaaaagttgggttacggtttgggtaaagggggtgggaggtggtacggcggagaaagaggttgagaagtcgaatcgtttgttttgtagggaagtagttagatgtacgtttttatgtagtatgaaagtatttttttcgtttagttttttataaaaaataataatatgtaatagcgttttgtttatttaataattagttttttgttcgggaagtagtttggaaatattgcgtgttatataaatgtaaaataattatcgtaattatcgttttggggtgggagataatagttttagggggagggcgttagtttcggagttgcgggtttggagtatggcgggggggtttcgtttttttgggcggtttttttgttagacggtttaggacgttcgggttttttttcgttttatatcgttttatagcgggcgcggagggtcggttgttgcggtagaggcggtttttcgtttatttgcggttttttttttggagggtgaggtcggggtagttttttttcggtttggcgcgggatcgggttttttttcggaattttgtttttagttttgggggttttttttggaggagatatcgcgggttttttgttatttaagtagttgtatgatttattttttcgagggtgtttcgcgtgttttttttcgaggtgcgggttgtcggtagtcgaggggttaatttcgcgttcgatttcggggtggttttggtggtttattttgacgggtggggtggggacggaggttgggattagtttaggtatattgtgttggggaatgaattggaaaatgcgtttaggaggtaaattcgatcgagttttttcgtttggatttaattttttgtgtttttggggaagttgtcgagttcgtcggttgattggatattaagcgtgggttaaggggtgtggggagtttttttagttttttgggtagaaattagagacgatttgtagttttagtaagatgggattttggggaggggggcggattttgattggagtacgtggttttcgttttggggtggtagaatagggggttagtgtatagagattattttttcgtggggtaggaatattagatttcgagtttttgtaatgtgttttgtcgtagaatggttaggtagtttgttatcgagggattagtttggttgtttagtttcggggttagggtgtatttttggaaggtagaagtttggttttatttttttttatgttttttttgttgttagttagtttattacgagggtttcgttaattttattaagtggtggatgtttgggaagtagtttgtgaaagttagtattggggtgtttttattcgtgaagtttggggtgttgttttgttcgatgtggggggtggggaaaatttagggtttataggtgttattgtttattttgtttttagagggtggttttggtgagagtgagaggtttttttatattggatggtttgggaagttagttagagatatagaagttcgggttttaggatttgtttggttatggggatttgagtttttaggaattttttaattatatatgtttatattcggaatttagagaaacgagagttttttagagttttggttggtttagtatattaggggttaacgtaattttgggatggataaagggtggtgggaagggttgggagaaggggaaggaatttattttattttttttttttttgttattttttttttttagttttgtgatttttttatggttaatttttttattgggggttagaggtttgttgtgttttatttatttaggaagtgggagtagggaggtgaatttatttggtttaaggtggatataatttttgttaaaaatttatatgaaagggtgggatgtagagaaaggaattagggttgagagaggtatttaataaatgtttttttattgattgtaattgattgatgggtagtatttatgtatcgaagttttcggatcgtttagtttttttgtttagtggttgggtttttggtgttttttttgtttgtttgttttagggtttacgggtgtagggaggtaggtggatatggttgtgtttagtttgatatttggatggaggttggttggtttagaagttgtaagtttatattttattttgtattatttgttggttttttttttattgttcgttatagcgtttttttagggatttgttagtttgatgttttttttagggtttttttgggttgtgatagggaatttgggtttgggggtttgaggagaggaagagggaggggtttggagtgtgtgtgattgtttttaattttaaaatatttttaatttggttattgaaatgtaaatatagaagtatgtttttaataatatagattttattaagtagtgtggtgaagttttaaaggtttttgttttttgagatgataatttatagtttttttttgttaatttagaggagagggttagtggggtaggtgggttatattttaaaaagagatagggggagttttaggaggaggtagaggatttgtttgagaagtaggtgtgtcgagttgttgttttatttatattatattttttttaattggtttttttatattttttgtttggaaagagaatatatattttaggtgttatgtatattttcggaagatttgtcgggttatagtatatttttttttgtagtttttttttgtagtttgtgtagagtttgttgttatgtggtttttgaaattttaagtgtcggggttattgggttatttttttttttttttttttattttttatatatagtggtgttttttagtttgttgggtaaggtattatggtaaaattaattttgttggtttggggtttgtagtatgtgtaaatgggaatttttttatttatttataaggtagtattgtggagtgttttggaattggattttaggttttcgtagttaaggttggaggggaagaggatatattgtagagtttgggtttagttgttttggttgagtggttcggaaggtattttttgaatttgaattttagagtatatgggataggtagtttttgttgtttgaggtttgttgaggttaagagtgttattggttttttttttagttatttatttttgtataatgaatttattttggttattgtttgattttcggattttgttgtatgtttttaggatggttgagtcggttagaattttagtgttgatgattgagtaagtggattaggtttggggggtagagggttagttttagttgttgtttatgatattgttattgtttagtagttgattaatgtttattgtttagtataaatagaaaatatttaagggaggtgtgaatgtatttttaattttttcgattgtatttttttttggttaatttggtgaattgaatgttttttattttagagagggatagatagagaggtgttagtatatttatttgttttgttgatttaaaaaaaataaaaaataaaaaaattttaaatattagttagtgtgttaggttaaaatggttatgagttagttgtggaatttaagttgtgatatttttgatagtttgtatagggttttatttttagtataaagtgtgtgtgtgtatataggtatatagggttttggtgtttgtgttggtgatttattatttattgtgtgtgtgtgtatttatggggattaggagtagaaggtgtatgtgtttgtgtttgtgggttattatgggattagggttataaatatataatatcgaatgtatagttatatgtaattgattgtttagagttttttgattaggatttgtgagtggtttagatttgagaatgtttattttatgtgttagagtgtcggtgagggtgattttgggagggtatttaggatttgtttttggttagtttttttaggatatattatcgggttttttgggggggtgggaagtttttatgatgttttttttttttgttttgtttttggttttagattgggtttttgtttgttcgtagggagatgttgaagattttgattatatcgggagagatattttttttttgttagttttttgttgtttttttggtaggtatagtagtattggaatttggtattatttggggtttggtttgttttacgagtttttatgatttatgaacggttgggaggggtaaagggaggtagttttttagtttttaatttggtatttttgttttttatatgggtatttaagaaaaagaattatggtgtgtgtggggaggggaggtagtatattttgggtaattaaaaagggtgtgagtatgagttttggttttttatgagggttttgtagagttgtgtgtgtttaggtggataatatacgtgtgtttggaagtattttgggtttacgtagtagaaagtaggagtttttttattggaaaaagaagtgggaataagggataaggagtggggaagagggtggttttgggagtttagtattttgtgtttaagtttaattagaaaacgtttttttatgatgtttatcgttgtttatagagattaggtttgtagagttagtagtagatgtgttggttggggtaggaggtaatttaagatttgagtatagattattttgtagagggaatgttttgagttggagataatattttttagtttagttaattttttaagttttggattttttcgtgttgttgggggttaggagatggagaaagggaagagatatgagaaaatatatggaatataatatttgtattttattttattttataaggagagatgaatttagtgtaataggagagattcgagatggatataaagatagattttttgatagtagattgtagaatttttagggtaatagattattttaggtttgttttgggtgggggttggggaggtaataggtatgtatttttaggcgggggtagttagtgggaggtttgttttttatagttttttaggagagagtagagtagtagtggttttaggtttggtggagggagagtagtagatagtttagtttttttttttataatttgatgattattttcgtttgttgtttgaagggtggtgacggaatagttttttagaaggtgggagacgttagtttagtttttaggttgttaaggttgtagtgtttggagaagtttggtaaggagaggggttgtgtagtttttaagtttttgtttttgttgtttgtttttggagtaggttgttttttattaattttggttttttttcgtggtttatttgttttaggatttttgtttttatttagtttttttttttttttcggtggtgatttttgtttttttgttgattttaatattttaattcgtttgttagagttatttggattttgttttcgtttgaaaattttttaatttaaagaatgagggtttttttttttaattttgagtttttggattaaggtaggtagtttttaatacgaggtttgggttttcggtttttaagtttggagtggagaagtggagtttttaggtttttttaattttttagtattttttaattttagaattttgggatttagtttttatttttaatgattttaagttttttgttttaagagtttttttatgtttattttatgggttattttttttggttttgttagtagttagatgtagtaaagaggtaaatattaaagtgagtttgtatttgttttttaaagattttttttgttttgttttattttgtttattattagggtaaaaatgtttaggacgaggggtatttatttggtgtttagtaagagagaggttgggaacgttttttatttttttattatgtggttgtttttgggagtgttatagtggatagaaaagagtaatttttattttaatatagacgtgggttgtttttgtttggtgagggattggtagatgtaagggggtttttggggtgttcggttattttgtagtattttttttattttatgtttggtcgttattagtcgtttttttttttggtattgatatagttttgagggtgaggttattattgaagatttagataatgaatgttagtttgtgttttagggattgtgttttgtttgtttttatatttttaggggatgagaggagataggattgtaggggtttagagggtcgtgtttcgttgtaggtttattatgtatggtattaatttatgtatggtattaattttaaaatggtttttggagtttatattttttttttgcgtttttatttggggtttaagtttttttaattggttttttttgtttttagttttgtgtggtgtaagttttttaattatgtttatattattttagttattgggtagtttttagtagtttgggggaggggtggggagtatttaattattttgttggagagggtttagggtttagttgtttgttaattagttcgttagtaagagtattgggtcgtttggtttattgattttattatggaattgtatttggagtggggttatagttgtattgggttgttatgagatagttaggattaggaggattattgggattcgggaggttagtttgttgttttatagaggaggaagttagggtttagaaaggggaggtgattggttacggttttattgtttgttaaaggtagaggtaggttatagtttagtttttttaattcgtggttggatattttttttatcgtatttttaatttatggggtttttgtttagggagtattagtttcgaagtattttataggttggtagagggaatagttggaggagtgagagtggggataggtttgatggattttgagggttgtgtggatgtgaattagtatagagaagggggaattttagggaaatttttagaatacggtagggtttggtttggtgaagttaaagatagatttatttagtaagtattttttgagtagttattttatgttgagtattagggatattgtagtgatttagagatttggtttgtggtttttcgagcggaagagaggggagtaatttattgtattgattatgggttttggggtttttagaggagtttgtgttgttataatattttcgttacgttgaggaggtgagtgagtataagttttaaatttttatttttggattttagatttttttggggggttatttagattttttttttgttttgggttagtataggttttggtgttattaatgttattgatgacgtttaataaagtgagtgaagtaaggatataaagatatgaagtatataaatgatagtaaggatacggtttgtggggagttgtaggatttaggagagagttggagtgtatagtttagtgttgaggataatcgttttacgttaagggagttgagttaagtttaggggtaaggaagtttaaaaaaaggatattttaaaggggataatataatttatgtggagattggagggaattttatttttttttttttgtaaatgtttgtttttttgatttttattgtaatttgtgtagtaataaatatttattagtatttgttatgtgttagatgttgtattgggtattggggatatagagatggaaaggatagattttgtttttggaggagtttatagtttggtggagaaattagatgtgtaattattattttttaaggtaggaaagaattaaggtagaggtggttaggttagttttggtggggaagattagggaagtttttaggaggaggtggttttagggggttatttataggtggagaaggggaagggttatttaggtggagggagttgtttgggtaagagtttaggagtgttgggtggataggttttgtgttttatggaggtcgggatttaattgttttttgatatgatttaaatgtttatattagtatattggaatatgttattcggtaaatcgtggttgaataaatgggggaatgtggtatgttttgaggatgggtttagtttggtatggtgggaaagtgtggttgatggagagatgtggataagaggtaggtgtaaggaggttttgttaagagaaggtatttatatttggttgtgaaggttatggggagttagcggaggtttggttttatgtagtgtttatttttttttgtttagttgggtaagaggggtttagttagtgtattttaggggatggggatttagttgcgagggagaagatagtaggggtggttatgatgatagttatcgtgggtttttaagtttatttagagttttttgtttttgacgtattttttcgtttattacgttatttgttttttttagtaatttcgtgaggtagagaggattggattttttattttatataatagaggaggaaattaaggtttaggaagataaagtagttagtgtatggtttttaggttggggttttgttcgaaaagtaattaaaaatgagggtgtagacgtatgtttattaatatagagtgatatttataatttatttttaagtaaaaaagtagtttatgggataatatgtatagtatgattttgattttttaaaatagatagatggttatgtggatatatatagatataaagtaaaaggagatagattttttaagattattttgagcggaaggattatgggatgttgttattttttttttatgattttttagtgttgtttagagtgtttttataataagtaattaatatttttataatcggaataaaaataataatgattgttataaaagataaggttagagtatagggaattgtgtgggtggggggaggttgtgtttgatattgattatttgttgttattt

SEQ ID NO: 1544 - DNA, 13792 bp, Artificial Sequence
  chemically treated genomic DNA (Homo sapiens)
ggatggtagtaagtggttagtgttaggtatagtttttttttatttatatagttttttgtgttttggttttgttttttatagtagttattattgtttttatttcgattgtaaaaatattaattatttgttataaaaatattttaggtaatattgaaaaattatgagaagaaagtgataatattttatgattttttcgtttaggataattttgaaggatttatttttttttattttatatttgtgtatatttatataattatttatttattttaaaaagttagaattatgttgtatatattattttataagttgtttttttatttagggatagattataaatattattttgtgttagtaaatatacgtttgtatttttatttttggttgtttttcgagtagagttttagtttaggagttatgtattggttgttttgtttttttgggttttggtttttttttttgttatatggggtggagaatttagttttttttattttacgaggttattgggggaaataaatggcgtgatggacgagaaggtgcgttagaggtaggaggttttggatgagtttgaaggtttacggtggttgttattatggttatttttgttgttttttttttcgtagttgagtttttattttttggggtgtattagttgggttttttttatttagttaggtagagggaagtgggtattgtataaggttaggttttcgttggttttttatggtttttatagttaaatgtaaatgtttttttttggtaagatttttttgtatttgttttttgtttatatttttttattagttatatttttttattatattagattgggtttatttttagaatatgttatatttttttatttatttagttacgatttgtcgagtgatatattttagtatgttagtgtgagtatttgggttatattaaggagtaattgagtttcggtttttatggagtatagagtttatttatttaatatttttagatttttatttaggtagttttttttatttagatggtttttttttttttttatttgtggatggttttttgaggttatttttttttgggagtttttttgattttttttattagagttaatttggttatttttattttggtttttttttgttttggaaggtggtggttatatatttgatttttttattagattgtgaatttttttaagggtagggtttgttttttttatttttgtatttttagtgtttagtgtagtatttggtatatagtagatgttagtaaatatttgttattatataaattgtaatggaagttaagagagtagatatttgtaagaaggagggagtgaaattttttttagtttttatatgggttgtgttattttttttagaatgttttttttttgggtttttttatttttgaatttggtttagtttttttaacgtggggcggttgtttttagtattaggttgtatattttagtttttttttgagttttgtaattttttataagtcgtgtttttgttgttatttgtatattttatgtttttgtatttttattttatttattttattgagcgttattaatagtattaataatattaggatttgtattgatttaaggtagggggaggatttaaatgattttttaagggagtttgggatttaagagtgggaatttggggtttatgtttatttatttttttagcgtgacggggatattgtagtaatataggtttttttgagggttttaaaatttatggttagtgtagtaagttgtttttttttttttcgttcgagaggttataggttaggtttttaggttattgtagtatttttggtgtttagtataaagtagttatttaagaaatgtttgttgaataagtttatttttggttttattaagttaggttttatcgtgttttgaaagtttttttgaggtttttttttttttgtgttgatttatatttatatagtttttaaggtttattaggtttatttttatttttatttttttagttgttttttttgttagtttgtggggtgtttcggagttgatgttttttgggtagaggttttatgggttgggaatacgatgggagaagtatttagttacgagttgggaaggttgggttgtagtttgtttttgtttttagtaggtagtgggatcgtggttagttattttttttttttgagttttagtttttttttttgtaaggtagtagattggtttttcgagttttagtggtttttttggttttaattgttttatgatagtttagtgtagttgtggttttattttagatatagttttatggtgaggttagtgggttagacggtttagtatttttgttgacgggttagttggtaagtagttaagttttaggttttttttagtaggataattgggtgttttttattttttttttaggttgttggaggttgtttagtggttgagataatgtgggtataattggggaatttgtattatataaagttaggaataggaaaagttagttgggagggtttgggttttaggtgagagcgtagggaaggggtgtgggttttaggagttattttgggattggtgttatgtatggattggtgttatgtatggtggatttgtaacgggatacggttttttgagtttttgtaattttgtttttttttattttttgaaggtgtggaggtaggtagggtatagtttttggggtataggttgatatttattgtttgagtttttagtggtgattttatttttagagttgtgttaatgttaggaggggagacggttgatagcggttaggtatggggtggggagggtgttgtaaggtggtcgggtattttagaggtttttttatatttattaattttttattaggtaggggtagtttacgtttatgttggggtggaggttgtttttttttgtttattgtggtatttttagaagtaattatatggtggggaagtgaaggacgtttttagttttttttttattgggtattaagtgggtgtttttcgttttggatatttttgttttggtgatgggtagggtggggtagggtagggaggatttttaaggagtaggtatagatttattttggtatttgtttttttgttatatttgattgttagtagggttaggggaggtgatttatggggtgagtataagggagtttttggagtaaggggtttagggttattgagggtggggattggattttagagttttggagttgggaggtgttggaagattggaaaggtttaaaaattttatttttttattttagatttagggatcgggaatttaagtttcgtattaggggttgtttgttttggtttaaggatttagggttggggagaaggatttttattttttagattgggaggtttttagacgggagtagagtttaggtgattttaataggcgggttagaatgttagagttaatagaggagtagggattattatcggaaagaaagaaagagttggatgggggtaagaattttggaataggtgggttacgagaagggattaggattgataaaaggtagtttgttttagggataggtagtagaaataggggtttaaagattgtatagtttttttttttgttaagtttttttagatattgtagttttgataatttgaaagttgagttagcgttttttattttttgaagggttgtttcgttattattttttaggtagtaggcgggggtgattattaggttgtagggagaggaattgagttgtttgttgttttttttttattaggtttgggattattgttgttttgtttttttttgggaggttgtgaaaggtagattttttattagttgttttcgtttgagaatatatatttattgtttttttagtttttatttagggtaaatttgggataatttattgttttgaagattttataatttgttgttagaaagtttgtttttgtgtttatttcgggttttttttgttatattgagtttatttttttttgtggaatggggtgaggtatagatattatgttttatgtgtttttttatattttttttttttttttattttttagtttttaatagtacgagagaatttagagtttaaagagttaattggattaaagggtgttatttttagtttagggtattttttttgtaaggtgatttgtgtttagattttaagttattttttgttttagttagtatatttgttgttggttttgtagatttggtttttgtggatagcggtgggtattatggggaaacgttttttagttgggtttgggtatagggtgttgggtttttaggattatttttttttttattttttgttttttatttttatttttttttttaataagggggtttttgttttttgttgcgtgaatttaggatgtttttaggtatacgtatgttgtttatttgggtatatatagttttgtagggtttttatggaggattaaagtttatgtttatattttttttaattgtttagagtatgttattttttttttttatatatattatgatttttttttttaaatatttatgtaggaagtaaagatgttaaattaggagttgaaaaattgtttttttttgttttttttagtcgtttatggattatgagaattcgtggggtaggttaggttttaggtaatgttaggttttagtgttgttatgtttgttagggagataatagaaggttgataagagaggaatatttttttcggtgtggttaaggtttttagtatttttttgcgagtaggtagaggtttagtttaaagttaagggtagaatagaaaaaggaagtattatagaggttttttatttttttaaaggattcggtagtgtgttttagaagagttaattaagggtaaattttgggtgtttttttaaagttatttttatcgatattttgatatataaaataggtatttttaagtttggattatttataggttttagttagaaaattttaagtagttagttatatgtgattatatattcgatgttatatatttatggttttagttttatagtgatttatagatataagtatatatattttttatttttagtttttatagatgtatatatatatagtgaatggtagattattaatataaatattaaagttttgtatatttgtgtgtatatatatattttatattaaaggtgagattttatgtagattgttagaaatgttatagtttaagttttatagttggtttatgattattttagtttggtatattggttaatgtttaaagtttttttgttttttgttttttttaaattagtaaaataggtgaatatgttgatatttttttgtttgtttttttttgaggtaggaggtatttaatttattaggttaattaggaagagatataatcggaaaaattgaagatatatttatattttttttgggtattttttgtttgtgttgaataatgaatattagttagttgttaaataatggtagtattatagatagtaattggaattgattttttgttttttaagtttggtttatttgtttagttattagtattagggttttggtcggtttaattattttgaaaatatatagtagagttcgggggttaaatagtagttaaggtggatttattgtataaaggtgagtggttgagaagggaattaataatatttttagttttagtaagttttaggtaataagggttatttgttttatatgttttgaagtttaggtttaagagatgtttttcgggttatttagttagggtaattgggtttaagttttgtagtatgttttttttttttttagttttgattacggaggtttagaatttaattttaaggtattttatagtgttgttttataaatgggtaaggagatttttatttatatatgttgtaaattttaggttagtagaattggttttgttataatgttttgtttagtaagttgaaggatattattgtatgtgagaaatagagagagaggaaggaaaataatttaatagtttcgatatttggaattttaaagattatatggtagtaagttttgtataagttgtagagagaggttgtagagaggggtgtgttgtgattcgataggtttttcgagggtgtgtatgatatttggggtgtgtgttttttttttagataaaaggtgtggggaagttaattagggagggtgtggtgtaggtgggataatagttcgatatatttgttttttaagtaggttttttgtttttttttagggttttttttatttttttttgggatgtaatttatttgttttattgatttttttttttaagttaataggaagaaattgtggattgttattttaggaaatagaggtttttggggttttattatattgtttagtaaagtttgtgttgttgaaaatatatttttgtgtttatattttaatagttagattgggagtgttttgaagttgggggtaattatatatattttaggtttttttttttttttttttttaaatttttagatttaggttttttgttatagtttaggaaaattttgaaaagagtattagattggtaagtttttagagagacgttatagcgggtaatggggaggaagttagtaggtgatgtaaagtagggtgtgggtttgtaatttttgggttaattagtttttatttaagtgttagattgggtataattatatttatttgtttttttgtattcgtggattttagagtaagtaagtagagaaggtattaggagtttagttattgggtagaggagttgggcggttcgggaatttcggtgtatggatgttatttattagttaattatagttaatggaagagtatttattaagtattttttttaattttggtttttttttttgtattttatttttttatgtagatttttggtaggggttgtatttattttgagttaggtgagtttatttttttgtttttattttttgagtgggtggagtatagtaggtttttagtttttaatgaaggaattaattatgaaggaattataaagttggggaaagagaataataaaaggaaggagaatagggtgagtttttttttttttttttaattttttttattattttttgtttattttaggattacgttaatttttagtgtgttggattaattagagttttgggaagttttcgtttttttgggtttcggatgtggatatatgtaattgaagggtttttggaagtttaaatttttatggttaggtaagttttagagttcgaatttttgtatttttggttggttttttaggttatttagtgtgagaagattttttatttttattaagattattttttgggggtagggtgggtagtgatatttgtgagttttggattttttttattttttatatcgagtagggtagtattttaggttttacgggtggaggtattttagtattggtttttataaattgttttttagatatttattatttagtgagattggcggggttttcgtagtgagttggttggtagtagaagaggtatagaagggaatgaggttaggtttttgttttttaggagtgtattttagtttcggaattaggtagttagattggtttttcgataataaattgtttggttattttgcggtaaagtatattgtaggaattcgggatttaatatttttgttttacgaggagatggtttttgtatattgattttttattttgttattttaaggcggggattacgtgttttagttaagattcgtttttttttttaaaattttattttgttagagttgtaggtcgtttttggtttttatttagagagttggaggaattttttatattttttgatttacgtttggtgtttagttagtcggcgagttcggtagtttttttagggatataaagggttaaatttaggcgaggggattcggtcggatttgttttttaaacgtattttttagtttattttttagtataatatgtttgggttggttttagttttcgtttttattttattcgttagaatgggttattagggttatttcggggtcgggcgcgaggttaatttttcggttgtcggtagttcgtatttcgaggaaggatacgcggggtattttcgggaaagtgggttatgtagttatttggatggtaggaagttcgcggtgttttttttagggagagtttttagagttgggagtagagtttcgagggggagttcggtttcgcgttaggtcgggaggaggttgtttcggttttattttttaggaaaggaatcgtaggtgagcgaggagtcgtttttgtcgtagtagtcgatttttcgcgttcgttgtggggcggtgtggggcgggagggggttcgagcgttttgagtcgtttggtaaaggggtcgtttaaagagacgaagttttttcgttatattttaaattcgtagtttcgagattgacgttttttttttggggttgttgttttttattttaagacggtgattacggtgattattttgtatttatgtaatacgtagtgtttttaaattgtttttcgagtagagagttggttattaaataaatagaacgttattatatattattattttttgtaaagaattgagcggagaaagtgtttttatgttatatagagacgtgtatttgattgtttttttgtagggtaggcggttcggttttttaattttttttttcgtcgtgttattttttattttttttatttaagtcgtgatttaatttttttggttttttttattttttataatttagtcgtgttcgttattcggtttttagtttcggggaggtattggatgggggtggggatagtagaggtgagcgtttttatttgggaggaagaatgcggttaagtcgagagcgagtttttattagcgtttagcggcgttcgtaagttttattcgagttatcgggggtcgggggttcggcgagaggggcggcgagggtagcgtttttcgcgtagtagaaattagttcggaagatgagggaagatcgttggcggtcggcgggcgttcgaaggatttaggttagttgtagtcgtcggtcggggcggggtgggttgggtgggattcgcgcggtcgtagttcgggtttcgggtcgtcgtcggtttagaggttcggtagatgttcgtcgtaagttgtacgagttatgttttttcgtttttttcgtttttttttcggcgtcggttttcgttttttttttttacgtagagcggggttggggagagggatttattttcggcgcgttcggttgttcggttgcgcggcgcgggtttttggtttcggttcgtttatattttttcgttcggttttaatttgtaggcgtttatggtcggtcgtttttcgagggtggcgggacgtattcgggcggcgtagaaggttcggggtttaggcggcgggcgcggggttcggcggtcggcggttcgggtggttttggttgcgcggtcgggcgcgaggagaacgggtcggaggcgtcgcgcgttttagtcgtcgtcgttttgtcgggtgtcggcgattcgtaataatgtggagtcgcgttcgttgttttcgtttttttttttttattcgtcgagttttagttttttattcgttcgttcgtgatgttagttagaggggaggggttagcgttaatttttttttggtttcgatgcgcgttcgtcggggttcggtcggagttcgagcgtacgcgttttttcgatcgaagtagaggcggatcgcgagcgcgggttgcggggttcggtttaggattttcgttcgggagttatttttcggtcgttttttagttggggagtcggttggagcgcgggttgtttttttttttcgttgataaaggtaggtagtgatttttagcggtcggcggcgtcgaggcgcggcgggtgggggtggagttaggatcgggtcgggggcggcggtggaggagagggcgggatggagaatttcggttagtagcgtgggagttggtaaggtttttgtaagttttttgtttttattttggttttattttatagacgaggaaataaaggtttaaagaagagtttcgttcgggacggaacgtggtatagttcgtaatagaatttagttttcggagattttttttttttgtattatttggacgttttacggagaggtagcggtgcgcggggcgacggggagttgttagagaagttagtggtgggtatgagtgggtgagacgggtttattgaggtttttggtagagttttttttttaatttttgtttttttcgggggttttttttttaaaaattgaagtatttcgcgtttcgtttttgtttaaatatagtttgaaaacgagtttttttttagtttttaggattttagttttgagagatttgtgggattttcgcgaaagtggatcgtttagttagtgtttttggtagggtagggatttttcgttttatttcgtttattatttattatattcgggtgtggtaggatttttgttaaggcgattgcgtttttcgggtttttttttttttttttattttggtttttttatttttattttttttttttgggggaggaagatagatagagttttttattaaggagagtcgaattttttttagattttggtcggatattgttttttttattttttgtttagttttttaggcgggtaggagtagaggggaagtggttgtttttgataatacgtaaattttggttttttattggagaaggggtaaagatagcgttatatttttattgtttggaattcggttttggagtgtttcggtttttcgcggaagtagttagatttggtattgttatgaatatttatttatttattgtatggttttttatatttaataaatgtaatttgggttttttttgtgttaaaatatagtgtttggtttggggatatagagatattattattgttttgaaggaatttaatttagttgaagggtgggggaagatagatatagaaacggatgttataaataaatatttaatatgggattgtgtgggtttggtgggttatagaaaaagtgtttagtttagttcggggtggggttggtgtaaaggttttagggaagcgaatatagggtttcggtgagttatttattagattaaggtaagtgttggagggtagagatataaaagagattggatttaaggtatagggttagtacgagtaaaggaatgaaggtaagtaatagttaggtgagtagggggtttataaagggttgattggtttagtttgagtttaagatttgaggaaaggagaggtttgtagattcgtgaattatgttcggtagttgttaggagggttttaaattggggaatacgttattagatttagtttgtggtagttgggaattttttatttggttgttgagtgttttaagggttagggttgaattgaatttattgtgatggtttttagttttgtgttaggtatattgtaggagttgaaggtatggtttgaaggggtaattttagatgtattaatgtttttttgttttttgtttttatttttttattttttttatttttattttattttattttattttattttattttattttattttattttattttattttattgagatagagttttgttttgttgtttaggttggagtgtagtggcgttattttagtttattgtaatttttgttttttaggtttaagtgttttttttgttttagttttttgagtagttggaattataggtgtgtgttattacgttcggttaatttttgtatttttagtagagacggggtttttttatgttggttaggttggtttggaatttttgattttaggtgatttgttttttttggtgttttaaagtgttgggattataggtatgagttattgtattcggttgtattttttttatttttaggttaggtttttttgattttttgattttaaatgagtttttaaagagggtgcggttagtagggaagatgtggttgtttggggattggttgggtggagaagatggaagtaagtaagtgatatagtatggttgtttatttattatttttaaataagtagggaaggttgttgggggaggggatatttaattgagattttgaaggatagattagatttggattaaaagaggtaggagagagatttttaagtggaaggaatagtttgtataagaatatggaggtgcgtggaggtgggagaggtgttatttgtgttaggatagtaggtattttagtttgttttgcgttttagagatgtaaagagaaagggataggtatagtttagtttgtattaatgttgtatatttgtaagatggggattataatagttaatatttgttttataaaattgcgtaaggattaaaagagggagtttatgggaaatttagaaagtagtatttaggataaatgaaaggtttattagatgttagtttttattattattattattattattttttatttatgaagtaataggtttttttttttggaattttatttaataaatatttgttgagtatttattttatattggatattgtagggagtgttattaggcgttttttttttaggacgtttttgtgattgttatttttttttatttagttgatagttttattaatattttaataatatgtaatattgatttgtatttttttattttttattttttggtatatgtgtttagtttgttttttaattaattgtaagtttttgtaggagatgaaaggagtaggtttggttttgggttgagttgattatgttacgtttgttattggtagggtttagggtttggggagttttttgttgattttttttgattttttaagtagttagggttggtttatagaatatattttgttttttttttcgtaggtttttttttatatgagaagtagaggttggtttagatgtgggaattgggattattaaaatggtagtatattggagtttgatggattatgtaatttattatttataatgattggagggattaggttatttgtttagggatatagaatagtagtatttagtttagtgtttttttattttgttataaaaatagattttggtttaatttaattttttggggtttttttttgggtggtgttttttttagaatataattttagtgtttttattgttttttgtgagaaatggtataaatattagttataatattggggtggttattgtatttgtaggttatttgattgggtgttaggtgataggttagaaataggggttttggggatttcgggtgtgtgtgtgtgtgtgtgtgtgtgtgtgtgggtatttgtaggaggttgttatgtgttgagtaataagagttagagaggtggggagtgaagggtagaggtatttatagaatttgtgtttttagtagaggggtttttgtattttatagatattaaaagaattagttttttttttttttttgaatttaagtattgtttatattttttttgattattttatgagttttaggatttgggatttatgtttttggggtttgtttttaagtgttttagtttttttattagattttaggttgggtagtttaggttgttttattttttagaagtgttgagttagtatgacgggttttaggtcggttttttgagacgttatagatttgtaaacgtttgagtttagtaataaaatataaagattttttagttgtggcggataaatttgttttttaaggttttgtttgttatggagtttattcgtaagttagtgttataggtttttacgtagcggggtgtggtatatttcgttttttatatatttatttaaagtagtttttttttttgtttttttaatttttagattttttt

SEQ ID NO: 1545 - DNA, 6135 bp, Artificial Sequence
  chemically treated genomic DNA (Homo sapiens)
  unsure 4934: n is a or g or c or t
tgttttttgggagagttgatgagtttttaaatgaatgatagaaatggggagttttttaaattggtggggagataaagagtttgttagtttgatgagggaggtaagaatttttttgtttgaagtgggagttagggtgttttcgtttgagattttaaggtgaggaaagagacgaagaatatatttattgtagtttagttagtttttttttgagtttgggagttaaatggttttaggatgtttggttagggagttaggattaaaagatagagacgatttgtttttttgatttaggggtagttttgtttagttttgggtttgatttatttttggtaaaaaaagatttggttggtggtgtacgggtattatttagcggttgttatggtacgttttttattcggagtttggggagagtagttttttggaagattagagaagggttttttggattttttttttgggatttgggtttaagtattaaattatttttgaaattggattttgtgtattattttatttattttgtatgtggtagttgggggagttttttggaagtataagtttatttttgtttgttttttgtttataattttgtagtggttttttggtgttttgggaggaagtttatattcggttataaggttggttttttttgaataattttatgttttagttgaataataagtagttttttaaaggtgttatatgtaaaatttatttttaggtttttgtataggttgttttttttgttaggaatatttttttttgttttttttttagtattttttttattttttttttaggttttggagtagatgttttcgttttcgtgagttttttggttagggttatggtttggtggggttgtcgtggttattgttgtgtttttttggggtttgatattgataatgtattttagggaatgtttatggaatgaatgagtgaatgaatgaatgaatgaatgaatgttaagttaaagagtttgttagggtagttgtaggagagtttaattagggttaggatacgatcggatttagaagtttttaggttttttttagttttttttttttttgagagagagggatggaatttgatttcgtcgttagtgtagtggcgtgattttggtttattgtaatttttattttttaagtttaggtaattttcgtgttttagtttgttaggtagttaggattatgggtgtacgttattacgtttggttaatttttgtattttaatagagatagggttttattatgttggttaggttggttttgaatttttgattttagatgattcgttcgtttcggttttttagagtgttgggaatataggtatgagttattgcgttttgttggagtttttaggtttttttttaattttaggtttttgtatatatttttttttttttttgtattatttatatttagtaatttttatttattttttaggtattagatgagttgtttttttttttaggaagttttttttgattttaggttgggttaggtatgcgttttgagtttttgtagttttttgggtttttttattttaggttgtgaatattgttgggttattattatttggggataagtttgtttttttattggatttgggagggtaggttgggttttgtttattttttttgtttttttttttgagttaataatatttgttaggatttgggtttaaatttagatgtttttatttttggagttttttaggtgagtgtgggttttttttggagtttttgttttttcgtgtgaaatgtggggagaatgagaagcgtgtatggaaaattttttagggttgtggtgggtgtagtgaagagacgagattttgaagtttcgagttgattatgagtcgggtgattacgggtgatttatttttttttttggggtttatttggttggatgaacggtagtagtagtttttttttgtcgggatattttgggaggttcgttcggggtttttcgaggtgggagggttagggataggttgagggaagaggtgtttgttgggttaggggaaaattagttttttttattatgaaacggatgatgggggggaaataaataaagttggttttattacggcgtgaggggaagttgggggagaggatgagggggttttatgaggtgggtgaaaattatagtttataatttgtcgttaatttttcgtttggagtttgtgtgtttcgggtgaggttttttttttattggttttaaataagatttatttttattttaatttttaatttagttttgtttgtagttttttggttttagaaatggtagttttatttttgtagtggtttaggtttaaagtttggagatttttaattttttttgtttttcgttttataattttgtttttaatagtttttttttattttatggttagagggattttgttagaatttgaattagggtcgggtatgatggtttatatttgtaattttagtattttgggaggttgaggtaggtggattatttgaggttaggagtttaagattagtttggttaatatggtaaaatttcgtttttattaaaaatataaaaattagtttggcgtggtagtgtatgtttgtaattttagttatttaggaggttgaggtaggagaattatttgaatttcggaggtagaggttatagtgagttgagtgggtattattgtattttagtttgggagataagagtgaaattttgttttaaaaaataaaataaaataaaataataataaaattagttgggtgagttggtatatgtttataattttagttattgggaaggttgaggtaggagaattatttgaatttaggaggcgggggttgtagtgagttgagattgcgttattgtattgtagtttgggcgatagagtaagtttttatttaaaaaaaaaaaagaaattgaattagaatttatttagtttttgtggtttttattttatttggggtgatggttaaaattttcgttatggtttttaaagttgaatttttgtttttttttttttttttttttttttttttttttttgagagggaatttttttttgttgttttaggttgcgagtttaggtgtttttttgttaggtaggagtttttaagtattgttttttagttgagtattcgcgtttttgttttgacgaatttggtttagattggcgtttttttgtattttttttttcgattttttttcgcgtttttatttcgtttttcgggcggttttattagttttttttgggtagtttaaagaatgcgaagaggtaggtgggggtagggaggagggcgagtcgttgggagagataaagggttcgagtttgagcgagagatataaagacgcgaggaggttggggagataggggaagtgggataaggacgcggggagtgattaggttcggaggtcggattggagtttagttttatttagttcggtcgggttagcgtagcgcgggggtcggtttttgttgttttttggcgggtggttgcggtgagaaggcggcgcggagtaggtgttgggaggggaggattagggcgcgtagggaggtagggagggaaggaagtagagaatagagtagggatagagagatagcgagagagattcgtacgtagagataagagacgtcgagagggagatatagagaaagagatagggatagagagatatagatagagatagagagagatatacggagagatagagatagagaagtatagagatagagaggtatagagatagagatagagaaatatagagatagagaggtatatagagatagagaggtatagagataggtcgatagagatagagatatatagaaatagagatagagatagagaggtatatagatagagatagagagatatagagatagagttaaaggatggaaagagatatggggattaagtgatttagaaatagtgatagataggtcgggtttggtggtttacgtttgtaattttagtattttgggaggtcgagtcgggaggatcgtttgaggttagttttagtaatatagtgagatttcgtcgttttttcgtttcgttttttttattgaaataaagaaatagtgattgataaaggaagattagaaatagagcgatatcgaagtatgaggacggaaagatttagagaggtagaaatatagggatagagaggaagatttaaagagagtgagagagatataaagatacgtaagagagatagagaaatttagaaagaaacgagtgtagcgatatttagagttcggggtagagattagaaacgtacgagggtacgagaattaggtttagggcgatgggttcgatttgcggggaggtcgtataatcgggacgtgttgggggtagaatcgtaaagttttacgtttttaggtaattgtgatgagaggattcgggtaggtaggaaagggtaggattcgaattgtgggtgggatagaggttaggacggattgagttaagagatcgagagaatttcggttagggcgaggggcggggttggtggaggcggggttggtgggggcggagatggtcggaagggtcgaaaggggcgtggtaagattttggcgaggcggtcggtaggtagggggcggggcgtgggaattattcgggagtagagggggcgtggttagattttagggggcgtggtttaacgtcgggagcgaaggagatagaattttttggtaggggcgattttagaattttggggaggagcgagaatggaatttcggggaggaataggggtggaattcggggggcggggttagaacgttaggagggggcggggtcggagttagggtcggtttgattcgggggagtagcgggtggattttgtgacgttagcgggttcgaatcgtcggagttgagcgagaggtcgggggtgtcgagtcgggcggggagagttgggtcgggagagtagaatagggaggttagagcgtagcgggtanacgttcggagtcggagtcggagttttataggtatttattaaatcgtttagtcgatcggtttttatagagttgttcgcggttttcggtcgggtttagttttttttcgggttttttatggtagggtcgttgtttttttgtcgtcgagatcgtcgtcgacgtcgttgttgtggtcgttgttgttgttgttgtttttggaaatcggtgagacgagcggacggttttttgttttcgcgcggattttttttaattttatttttcgagttggggaagtcgagtatttttttcgtttattttcggtttttcgagttttttttcgcgtgttttttttttggttggttttatagatttcgattttttatacgttcgattttttcgaggagattttgattttttttttttgtattttttttattattatttttattttttttaatttaattgtttattttacgtttgtttgtttgtttttttttttatttttcggattttcgcgtcgaaagggttaaattttaggaaggtttggtgttttttttttatttcgcgtcgagtagtttattcggatttgggtttttgttttttttattttttttaggaatgtggggaatgttttttttatttatcgtagtaaggtttcgaggaagaggcgagattattttttttttttattttttttttttttcggtttgggcgtttgaggttcggagagaattgaggataagcggatttgattcgggttttttggagggttaaggataagagttttggcgatttagggggaagggtttgagttcggagttttaatttcgaattttagggagttgggggttttgatttcgtggattttagaaaaattaggggtcgggggtttcgtttttagggtttttggtagaatggaggttaggcgttaagtttaattgggatttaggtaaaattgggggcgagagaggattaaatttgtagtttttggatttaattgtgggtagggggtttcgtttttagggttttcggtagaatcgggggataggagattcgatttcgtgggttttagatttaattgtaggtagaggaacgttttttgagatttaaatagaagtgcgagtagcgggtttcgttttttgggttttagatatgattaagggtcgaaggttttgttttgaggttggagttttagtcgtttgagttttagatagaacgggaggtt

SEQ ID NO: 1546 - DNA, 6135 bp, Artificial Sequence
  chemically treated genomic DNA (Homo sapiens)
  unsure 1202: n is a or g or c or t
ggtttttcgttttatttgggatttaggcgattgagattttagttttaagatagagttttcgatttttgattatatttggagtttaagagacggggttcgttgttcgtatttttgtttggattttagaagacgtttttttgtttataattaagtttgaagtttacgagatcgagttttttgtttttcggttttgtcgggaattttgaaaacgaagttttttgtttataattaaatttagaagttataagtttgattttttttcgtttttagttttatttagattttagttagatttagcgtttagtttttattttattagggattttgaagacggagttttcggtttttaatttttttggagtttacggagttagaatttttaattttttgaggttcggggttggagtttcgagtttaggtttttttttttaagtcgttagaatttttatttttagttttttaagggattcgaattaggttcgtttgtttttagtttttttcgggttttagacgtttaagtcgggaagaaggaaaaataggggagggaggtggtttcgtttttttttcgagattttattgcggtaggtggggggaatattttttatatttttgagaggggtagaggagatagagatttagattcgggtgaattattcggcgcggggtggggagggggtattaggtttttttgggatttaattttttcggcgcgggaattcgagaaatggggagggggatagataagtaggcgtaggatgggtaattggattaagaaggatgggggtggtggtgagagagatgtagaaaggaggggttagagttttttcgagagaatcggacgtgtagggggtcggagtttgtggggttagttaggaagggggtacgcgagagggggttcggggagtcgggggtgggcggggaaggtgttcggtttttttagttcggaaggtaaggttggagggggttcgcgcgagggtagggggtcgttcgttcgttttatcggtttttaggagtagtagtagtagtagcggttatagtagcggcgtcggcggcgatttcgacggtaggagggtagcggttttgttatggagggttcgggaggggattgggttcggtcggaagtcgcgggtaattttgtgggggtcgatcggttgggcggtttagtaggtgtttgtggggtttcggtttcggtttcgggcgtntattcgttgcgttttagtttttttgttttgttttttcggtttagtttttttcgttcggttcggtattttcggtttttcgtttagtttcggcggttcgaattcgttgacgttataggatttattcgttgttttttcgagttaagtcgattttggtttcggtttcgtttttttttggcgttttgatttcgtttttcggattttatttttgttttttttcgggattttattttcgtttttttttaggattttaaggtcgtttttgttaaagaattttgtttttttcgttttcggcgttaagttacgttttttaaggtttagttacgttttttttgttttcgagtagtttttacgtttcgttttttgtttatcggtcgtttcgttaaggttttgttacgtttttttcggttttttcggttattttcgtttttattagtttcgtttttattagtttcgtttttcgttttagtcggagttttttcggttttttagtttagttcgttttggtttttgttttatttatagttcgaattttgtttttttttgtttgttcgggtttttttattatagttgtttgaggacgtggggttttacggttttgtttttagtacgtttcggttgtgcgattttttcgtaggtcgagtttatcgttttgagtttgattttcgtattttcgtgcgtttttaatttttgtttcgaattttaggtgtcgttgtattcgtttttttttggatttttttgttttttttacgtgtttttgtgttttttttattttttttgggtttttttttttgtttttgtatttttgtttttttgggttttttcgtttttatgtttcggtgtcgttttgtttttggtttttttttgttagttattgtttttttattttaataaaagagacggggcgggggggcggcggggttttattatgttgttgaggttggttttaagcgattttttcggttcggttttttaagatgttgggattataggcgtgagttattaagttcggtttgtttgttattgtttttgggttatttggtttttatgtttttttttattttttgattttgtttttgtgtttttttgtttttatttgtgtgtttttttgtttttgtttttatttttgtgtatttttgtttttatcggtttgtttttgtgtttttttgtttttgtgtgtttttttgtttttgtgtttttttgtttttatttttgtgtttttttatttttgtgtttttttgtttttgttttttcgtgtgtttttttttgtttttatttatgtttttttgtttttgtttttttttttgtgtttttttttcggcgttttttgtttttgcgtgcgagtttttttcgttgtttttttgtttttgttttgttttttgtttttttttttttttatttttttgcgcgttttggttttttttttttaatatttgtttcgcgtcgtttttttatcgtagttattcgttagggggtagtagagatcggttttcgcgttgcgttggttcggtcgggttgggtggggttgggttttagttcggttttcggatttggttatttttcgcgtttttgttttattttttttatttttttagttttttcgcgtttttgtgtttttcgtttagattcgggttttttgttttttttagcggttcgtttttttttttatttttatttattttttcgtattttttgggttgtttagggggagttggtgaggtcgttcggggggcgggatgagggcgcgaaggaaggtcgggggagggggtgtaaggaagcgttagtttgggttaaattcgttagggtaggagcgcggatgtttagttgggggatagtgtttgggggtttttgtttagtaagaggatatttaggttcgtagtttgaagtaatagagagaggtttttttttaaaaaaaaaaaaaagaaagaaagaaaaaaaaggagtagggatttagttttgagggttatggcgaggattttggttattattttaagtgaagtaggagttatagaggttggatgggttttgatttagttttttttttttttttagatggagatttgttttgtcgtttaggttgtagtgtagtggcgtaattttagtttattataattttcgttttttgggtttaagtgatttttttgttttagtttttttagtagttgggattataggtatgtgttaatttatttagttaattttgttgttgttttgttttgttttgttttttgagatagagttttatttttgttttttaggttgaagtgtaatggtgtttatttagtttattgtaatttttgttttcggggtttaagtgatttttttattttagttttttgagtagttgggattataggtatgtattattacgttaagttaatttttgtatttttagtagagacggggttttgttatgttggttaggttggttttgaatttttgattttaggtgatttatttgttttagttttttaaagtgttaggattgtaggtgtgagttattatgttcggttttgatttaggttttaataggatttttttggttatgaggtggaaagagattgttgggggtagaattgtaaagcgagggataagaagagttaggggtttttaagttttgagtttgagttattgtaaggatgaagttgttatttttgaggttagaaggttgtaggtagggttgggttggagattggaatgaagataggttttgtttgaggttaatgaggagggagttttattcgaggtatataggttttaggcgggaagttggcgataagttgtggattgtggtttttatttattttatggggtttttttatttttttttttaatttttttttacgtcgtggtggagttagttttgtttgttttttttttattattcgttttatgatggggaagattggtttttttttaatttaatagatatttttttttttagtttgtttttgatttttttatttcgggaagtttcgagcgggttttttagaatgtttcggtaggaaggggttgttgttatcgtttatttagttagatgaattttaaaaggggaagtgggttattcgtagttattcggtttatggttagttcgggattttaggatttcgtttttttattgtatttattatagttttgggaggttttttatgtacgttttttattttttttatattttatacgagaaaataggggttttaagagaggtttatatttatttaaggagttttaaagataggggtatttggatttgaatttaggttttagtagatgttgttagtttagaggagaaggtagagagggtgaatagaatttagtttgtttttttagatttagtgggaaggtagatttgtttttaggtaataatagtttagtagtgtttatagtttgggatggaggagtttaggaggttgtaggagtttagagcgtatgtttgatttagtttggggttaaggagggttttttggaggaagggatagtttatttgatatttagaggatgagtgggagttattaggtgtaaatagtgtagggagagggaagagtatgtgtaaaagtttagggttgagaggaaatttaggggttttagtaaggcgtagtggtttatgtttgtatttttagtattttgggaggtcgaggcgggcggattatttgaggttaggagtttaagattagtttggttaatatggtgaaattttgtttttattaaaatataaaaattagttaggcgtggtggcgtgtatttataattttagttatttggtaggttgaggtacgagaattgtttgaatttgggaggtagagattgtagtgagttaagattacgttattgtattggcgacgaagttagattttattttttttttttaaaaaaaaaaaaagttggggggagtttaggggtttttaaattcgatcgtgttttggttttgattaaatttttttatagttgttttggtaaattttttagtttggtatttatttatttatttatttatttatttatttattttataaatattttttggagtgtattgttagtgttaggttttaggggaatatagtagtgattacgatagttttattagattatgattttgattagggggtttacgagggcggagatatttattttaagatttgaaggaggagtaggagagatgttggggaagaggtagggaagggtgtttttggtagagggaatagtttgtgtaaaggtttgaaggtaagttttgtatatgatatttttgagaaattatttattgtttaattgaagtatagggttgtttagaagaagttagttttgtggtcgggtgtggatttttttttagggtattagggagttattgtagagttgtgagtaagggatagatagaggtaggtttgtatttttaagagatttttttagttgttatatgtagggtgaatggaatgatgtatagaatttagttttaggggtagtttggtatttggatttaggttttagggagagagtttaaggagtttttttttggttttttaaggagttgttttttttaagtttcggatggaaggcgtgttatggtaatcgttaggtggtgttcgtatattattagttaggtttttttttgttaaaagtagattaggtttagagttgggtagaattgtttttgggttaggagagtaaatcgtttttgttttttggttttggttttttggttaggtattttggggttatttgatttttaggtttaggaaggagttggttgagttgtagtgagtatgtttttcgtttttttttttattttggaattttagacgggagtattttggtttttattttagataggaagatttttattttttttattagattagtaggttttttgtttttttattagtttgaggggttttttatttttattatttatttggaagtttattagtttttttagaaggta

SEQ ID NO: 1547 - DNA, 6627 bp, Artificial Sequence
  chemically treated genomic DNA (Homo sapiens)
ggagagtaatatttgttttagatattataaataatattatagggtgtaaatttatcgtgatattgggagtaatatttttttcggatattatgaataatattttagggtttataaatatggtgtatatttattatgatattaggagtaatatttttttaaaatattattaataatattatagggtgtatatatagggtgtatatttattgtgatattaaaagtaatatatttgtaaaatatgagtatatttattatgatattaggagtagtatttttttaaaatattataaataatatttttttagtatataatagataatattatagggtgtatatttattgtgatattagttataataatatttttttgggatataaggaataatattatagggtgtatatttattgtgatattaggggtaataatatttatttagtatataacgaataatatgagagggtgtatatttattgtgatattagaggaagtaatatttttttagggtgtatatttattgtgatattagtagtaatatttttttaaaatattataaataatattatagagtgtatatatagggtgtatatttattgtgatattaagggtaataatatttttagaaaatttgatatattttgtgatattagtagtaataatattttattaggatataataaataatattatagggtgtatatttatagtgatattagatgtaataatatttttttatgatgtaatggataatatgatagggcgtatatttattgtgatattaggggtaataatatttttttaggatataacgaataatattatagggtgtatattaattgtgatattaggggtaataatattttttatgaatatagcgaagaatattatagggtgtataattattgtgataataggaataatatgtttttaggataaaataaataatattatagggtgtatttttattgtgatattagtagtaatgtttttttcggatattgtaaataatattatagggtgtatatttattgtgatattgagagtaatatttttttcgaatattatgaataatattatagggtgtaaatttattgtgatattgggagtaatatttttttcggatattatgaatcgtattatacggtgtatagggtgtatatttattgtgatattggtagtaatattttttttagatattatgaataatattatagtgtttataaatatgttgtatatttataacgatattaggagtaatatttttttaaaatattataaataatattatagggtgtataaatatggtatatattgattgtgatattaggagtaatatttttttaaaatattatgaataatattatagggtgtaaatatagggatatagttattgtgaaattaagagtaatatcgttttaagatataattaatattgttatagtgggtatatatattgtgatattatgggtaataatatttttagaaaatttgatgaataatattatagggtatatatttattgtgatattaggggtagtaatattttttaaggatataacgaataatatgatagggtgtatatttattgtgatattatgggtaataatatttttttaggatgtaacgaataatattatagggtgtatatttattgtgataagaggaataataatattttttaaggatataataaataatatgatagggtgtatatttattgtgatattatgggtaatattatttttttattatataatgaataatattatagagtgtatattattgtgatattaggggtaataatattttttttaaatataacgaatattattatagggtgtttatttattgtgatatgagatataataatatttttttaggatataataaataatattatagggtgtatatttattgtgatattagaggaaataatatttttttaggatataatgaataatattatagggtgtatatttattgtgatattagagggattaatatttttttaggatataatgaataatattatagggtgtatatttattgtgatattagaggaattaatatttttttaaaatataatgaataatattatagaatgtttatttattgtgatattaggaataataatatttttttaggatataattaataatattatagggtgtatatttattgtgttattaggagtaataatatttttttaggatattataaataatattataggatgtatatttattgtgataatatgggtaatattttttaggatattatgaataatattatagggtatatatttattgtgatattaggagtaataatatttttttaggatataatgaatagtattataaggcgtatagttattgtgatattaggagtaatatagtagtatttttttaggatataataaataatattataaggtgtatatgtattgtgatattaaaggaaataatatttttttaggatataatgaataatattataaagtatatatttattgtgatattaggggtaatattatatttttaagatatagtgaataatattatagggggtatatttatagtatattaggggtaatagtatatttttagaatataacgaataatattatagggtgtatatttatcgtgataatatggataatattttttaggatgttacgaatagtattaaagagtatatatttattgtgatattaggggtaatatttttatagaatattataaataatattaaaagatgtatacgtattgtgatattaggggtaatattatttaaaaatattataaataatattatagtatgtatataatggtgtacgtttattgtgatattatgatatttatagggtattataaataatagtatagggtgtatttttattgtgatattaggagttatatttttttgggaggttatagcgtgtatacgtatggtgtaaatttattgggatattaggagtaatatcgttttagaatatttcgaattatattatagggtgtatatttattgtgatattaaaaggaatatttttttagaatattataaatagtattataaggtgtatatttattatgagattaggagtaatatttttttagaatattatgaataatattatagtgtgtataggtattgtgattttaggagtattatttttttaagatattatgaataatattatagggtatatatttattgtgaaattaaaagtaatagttttttacgatattacgaataatattacgtagtgtatatttaaggtgatattaggagtagtatttttttaggaaattacgaatattattatagagtgtatatttattgtgatattgaaagtattatttttttaggatattatgaataatattatagggtgtattttttttgtgatattaggagttatatttttttaggatattataaattatattatagggtgtatatttattgtggtattaggtgtagtatttttttaggatataataaataatattatagggtatatatttacggttatattaggagttatatttttatagaatattatgaataatattatagggtgtatattttttgtgatattaaaagtaatatttttttaggatagtatgaataatattatagggtgtatttttattgtgatattagcggtaataattttttaggatattacgaattttatgatagagtgtatatttattatgagatttggagtaatatatttttagtatattatgaataatattataggttgtatatttattgtgatattaggagtaaaatttttttcggatattataaataatattatagtgtgtatttttattgtgatattaggagtaaaattttttttagatattacgaataatattataggatgtatatttattgtgatattaggagtaatattttttttggatatttttaataatattatagcgtttatatatatggtgtttatttattgggatgttaggataatattttttttggatattattaatcgtattagaggttgtatatacgtggtgtttatttagcgtgatattaggaataatatttttttcggatattaggaatagtttttttttgggatttagtagaacgtagttttttagtgttaaataagcgattatagtaagaggtagaggcgtagggattgaaatgaagataaatatttgataagtttaaaatacgtatttaaaatagaatttataaaatgtttaatttgtcgatttaggagttcgcggtgtagggtggggtgggagttggtaggtgatcgttatattagtagagtaagattgtagggttgcggtttttttttttatgtttttttgtttagatattcgaggggtttatgtgtatttttgggattatacgattagaaaataggattttagaggttttttgagtttttgtttattagggcggttgggtatagttttgttagtttattgtataattttttaagttttttttattattttttattttagtagcgaggtgtttgtgacgcggtttttattttttcggtttcgattcggtggttttcgcgattggacgtttaggcggttattaggtttttttgttattaacgtgtgtatattttttagtttttttattaggatgaatttttggaaattgttgggtttaaagtgtttaggaagtttggagtgatttttgttgtagggggaagagggaattatggaggtgttattgaatttttaggggtttcgggattttttaattcggtgttcgttttagtttttcgagcgtttttttttttttattttttatttcgtttgtttttatttttcgtggttttattttcgtcgcgtagttggattttgttcggggtttttcgatttcggagttcgaattttagtcggattagtttagttcgattagtttagtttcgtttttttttcggtaggatcgcggtcgagtagtttgtttagagatttagcgatagatagacgttgggatttacgacgatagaaggcgtcgatggtcgcgtttgttgagttttgcgcggggtagggggtgagtgttttttatcgcgttttattttttttttttaggtttggtttggttgtagatttttcgggttgcgatattggggagaggagagatttttaaatttttggattcgggaagcgaggagatttatttcggtttttttattgtagcgggttggattttttttattaagttagtagtcgagagtttagttttatttaaggggttattagattttttagttattaggggttttgatttttttttgtataaagttagtgggttttttaagtttttttattttcggagagtttttatttttttggtttttttttttattgtttttagtaaaggattttagggagtggagtttatggagtgggggtgggggttgtaaattgttagtatttcgagggttagggagttgaagtaataaattggtaatgaattgagggttttttttgtgtttagttttgtgtttaattttgtgttatgttgttatgaattttgttgttattaatttatttaatataatttatagaggtagagtttcgtttttttttttttatagggaaggaaattgagatatagagaggttaaagtttgtatagtcggtgagttgtgaaattaggaggagtaaaaagatagcggagagagaattgaagaggttacgtttattaaattttaaattttttttagggttagataggattagtagatttgttgagatgaaaataatagattaagttgggtcggtggtttttgtttgtaattttagtatttaggaggttgaggtaggaggattgtttgagattaggagttcgagattagtatagagagatttttatttttataaaatataaaaaaaaaaaattagttaggtttggtgaggttgtttatgtttgtaattttagtattttgggaggtcgaggtgggaggattgtttgagtttaggaaattcgaagttttgttgagttttgattgtgttattttagtttgggtaatagagtgagattttgtttttaaaatataaattaattaataataaaaaataaaaataaattatatattaagattattagtcgaacgaggtttggggttagataagtttgggttagagttagttttgttattttttatttgtgtgtttttgggggaggtagtttttcgattggtgttttagtttgttggtttttgaaatggagatagtattgtttgcgttttggagttgttataaggattaattgatagtttatgtttagtaatgattatggagtttaggttttttagattatatggtttagttttttgggtttaaattttagtttttttattttttagttgggtaaagttagtaaagttatttaatttttttggtttttagtttttttatttgtaaattaatataattgtaattatttagggttaatgttaggatgaaaggaattgagaattagtaggtattttaaagagtatttggtatatttttgtgtaaatgttaaagatttaaaaagttgtttggttttttgggtaggtgagttggggatttttgttttgtattattttaagggttttttttgtgtttttttagg

SEQ ID NO: 1548 - DNA, 6627 bp, Artificial Sequence
  chemically treated genomic DNA (Homo sapiens)
tttgagggaatataaagaggatttttaggatggtataaggtaggggtttttagtttatttgtttagggggttaggtaattttttggatttttaatatttatataaaaatgtattaagtattttttggaatatttattaatttttaattttttttattttgatattaattttaggtagttgtaattatattgatttgtagatgaagaagttgaggattagagaggttgagtaattttgttgattttatttagttgaggagtggaagggttgggatttgaatttagggaattgggttatgtggtttaggagatttgggttttataattattgttaggtatggattgttagttaatttttataataattttaggacgtagatagtattgtttttattttagaaattagtagattgaggtattagtcggggaattgttttttttagggatatataaatgggaagtggtaaagttgattttgatttaggtttatttgattttaaatttcgttcgattggtggttttgatgtatgatttgtttttattttttattattaattaatttatgttttagagatagggttttattttgttgtttaggttgaagtggtataattaaagtttaataaagtttcgaattttttgggtttaagtaatttttttatttcggttttttagagtgttgggattataggtataagtagttttattaggtttggttaattttttttttttatgttttgtagagatgggggtttttttatgttggtttcgaatttttggttttaagtaatttttttgttttagttttttaggtattgggattataggtaagagttatcggtttagtttgatttgttatttttattttagtaggtttgttggttttatttaattttagaagaaatttgaagtttagtggacgtggtttttttaatttttttttcgttgtttttttattttttttggttttataatttatcggttgtgtaaattttaatttttttgtattttagtttttttttttgtaaaagggggaaaacgagattttatttttatgagttgtattaaatggattaatagtagtaaagtttatagtagtatggtataaggttgggtataaggttaggtatagagaaagtttttagtttattgttagtttattgttttaattttttggttttcgaaatgttggtagtttgtaatttttatttttattttatgaattttattttttggagttttttgttaagagtaatggaaaaagaaattagagaggtaagggtttttcgggggtaggagggtttgggggatttattagttttatgtaaagaagagttaaagtttttagtagttgggaggtttggtggttttttaaatagagttgggttttcggttgttggtttggtgaaagaaatttaattcgttgtagtgagggggtcggagtaagttttttcgtttttcgggtttaggaatttgggggttttttttttttttagtatcgtagttcgagagatttgtagttaaattaagtttggaaaaggagagtggggcgcgatggggggtatttattttttgtttcgcgtagggtttagtaggcgcggttatcggcgttttttgtcgtcgtgggttttagcgtttgtttgtcgttaagtttttgggtagattgttcggtcgcgattttgtcggagaagaggcggggttgggttggtcgggttgggttggttcggttgggattcgagtttcgggatcgggaggtttcgggtaaggtttagttgcgcggcgggagtgaggttacgggaggtgaaaataggcgaggtgggggatgggggaagagaggcgttcggggagttgggacgggtatcgggttggggggtttcggaatttttgaaagtttagtgatatttttatagtttttttttttttttgtaataagaattattttagattttttaaatattttggatttagtaatttttaggagtttattttgatgagagaattgaaaggtgtgtatacgttagtaataaggaggtttggtgatcgtttaagcgtttaatcgcggggattatcgggtcgaggtcgagaggatggagatcgcgttataggtatttcgttgttggaatggagggtggtggggagaatttagaagattatgtaatgggttggtagggttatatttagtcgttttggtaagtagaaatttaagaaatttttagggttttgttttttggtcgtatgattttaggagtgtatatgggtttttcgggtgtttgaatagaagggtataggagggagggtcgtagttttgtagttttattttgttggtgtagcggttatttgttaatttttattttattttgtatcgcgggtttttgagtcggtagattaagtattttataaattttattttaaatacgtgttttaaatttgttagatatttgtttttattttagtttttgcgtttttattttttgttgtggtcgtttatttaatattggggggttacgttttgttaagttttagggagagattgtttttaatattcgagggagatattatttttaatattacgttgggtgaatattacgtgtgtatagtttttgatacgattggtaatatttaagggagatattattttaatattttagtgggtgaatattatgtgtgtaaacgttgtggtattattagaaatatttaagggagatattatttttaatattatagtgggtgtatattttgtgatattattcgtaatatttgaaggagattttatttttaatattatagtgggagtatatattgtgatattatttgtaatattcgagggagattttatttttaatattatagtaggtgtataatttgtgatattatttataatatgttagagatatattattttaaattttatggtgggtgtatattttgttatagaattcgtgatattttagggagttattatcgttaatattatagtgagagtatattttgtgatattatttatattattttagaaagatattatttttaatattatagagggtgtatattttgtgatattatttataatattttatgaagatataatttttgatataatcgtaggtgtatattttgtgatattatttgttatattttagggagatattatatttaatattatagtgggtgtatattttgtgatatgatttgtaatattttagggagatataatttttaatattatagagggagtatattttgtaatattatttataatattttagaaagataatatttttaatattatagtgggtgtatattttgtgataatattcgtaattttttagggagatattatttttaatattattttgagtgtatattgcgtgatattattcgtaatatcgtagggagttattgtttttaattttatagtgggtgtatattttatgatattatttataatattttaagaaggtagtatttttaaaattatagtgtttgtatatattgtgatattatttataatattttagggagatgttatttttaattttatagtgggtgtatattttgtgatattatttgtaatgttttagaaagatattttttttaatattatagtgggtgtatattttgtgatatgattcgaaatattttagggcgatattatttttaatattttagtgaatttatattatgcgtgtatacgttgtgattttttagaaagatatgatttttaatattatagtgggggtatattttgtgttattatttgtaatattttatggatattataatattataatgaacgtatattattgtgtatatgttgtgatattatttgtaatatttttgggtgatattatttttaatgttatagtgcgtgtatattttttgatattatttgtaatattttgtggagatattgtttttaatattatagtgggtgtatattttttgatattattcgtaatattttggaagatattatttatattgttacggtgggtgtatattttgtgatattattcgttatattttggggatatattattatttttaatatattgtgggtgtattttttgtgatattatttattatattttggagatataatattatttttaatattatagtgggtgtatattttgtgatattatttattatattttgaagagatattattttttttaatattatagtgtatgtatattttgtgatattatttgttatattttggggagatattattatattatttttagtattatagtggttgtacgttttgtgatattatttattatattttggggagatattattatttttaatattatagtaagtgtatattttgtgatattatttataatattttgggagatattatttatattgttatagtgggtgtatattttgtaatattatttgtaatattttggggagatattattatttttaatagtatagtgggtgtatattttgtgatattattggttatattttggggaggtattattatttttaatattatagtgggtgaatattttgtaatattatttattatattttggggagatattaatttttttaatattatagtgggtgtatattttgtgatattatttattatattttgggaagatattaatttttttaatattatagtgggtgtatattttgtaatattatttattatattttgggaagatattattttttttaatattatagtgggtgtatattttgtgatattatttgttgtattttggggagatattattatgttttatattataatgggtgaatattttgtgatagtattcgttatatttggggaagatgttattatttttaatattatagtggtgtatattttgtgatattatttattatgtagtggggagatagtattatttataatattatagtggatgtatattttgttatattatttgttatatttttgagaaatattattattttttttattatagtgggtgtatattttgtgatattattcgttatattttagggagatattgttatttataatattatagtggatgtatattttgttatattattcgttatatttttgagagatgttattatttttaatattatagtgggtgtatattttgtgatattatttattaaattttttggagatattattatttataatattatagtgtgtgtatttattgtgatagtattgattatattttggggcgatattatttttaattttatagtggttgtatttttgtgtttatattttgtgatgttatttataatattttagggagatattatttttaatattatagttagtgtatattatgtttgtatattttatgatattatttgtaatattttagggagatattatttttaatatcgttgtgggtgtatagtatgtttgtaaatattgtgatattatttataatatttgagagagatattattgttaatattatagtgggtgtatattttgtatatcgtgtgatacgatttataatattcgagggagatattatttttagtattatagtgggtttatattttgtggtattatttataatattcgagggagatattatttttaatattatagtggatgtatattttgtgatattatttgtaatattcgagggaaatattattgttaatattatagtgggagtatattttgtgatattatttgttttattttggagatatattatttttattattatagtggttgtatattttgtgatatttttcgttatatttatggaagatgttattatttttaatattatagttggtgtatattttgtgatattattcgttatattttggggagatattgttatttttagtattatagtgggtgtacgttttgttatattatttattatattatgggaagatattattatatttaatattattgtgggtgtatattttgtgatattatttattatattttggtgagatgttattattgttaatattatagggtgtgttaaattttttggagatattattatttttaatattatagtgggtgtgtattttgtgtgtatattttgtaatattatttgtaatattttagggagatattattattaatattatagtgggtgtatattttgaggagatattattttttttgatattatagtgggtgtatatttttttatattattcgttatgtgttaagtagatattattatttttaatattatagtgggtgtatattttgtgatgttattttttatattttaagaagatattattataattaatattatagtgggtgtatattttatgatattatttgttatatattggggggatattatttgtaatattttagggagatattatttttaatattatagtgggtgtatttatattttatagatatattatttttaatattatagtgggtgtatattttgtgtgtatattttgtaatattattagtaatattttagggagatattatttttaatattatagtgggtgtatattatgtttgtaaattttaggatattatttataatattcgagggagatattatttttaatattacggtgggtttatattttatgatattatttgtaatatttgaggtaggtattatttttt

SEQ ID NO: 1549 - DNA, 5925 bp, Artificial Sequence
  chemically treated genomic DNA (Homo sapiens)
tgggattttgatttagtgagataggattatttgagtttattagaaagtttagtagtggtgaattttaaaaaggaagaggttgagattttaatttttttttttttaggaggtttttttatgtaaatttttttaatgttagtttgggttaattagggttatttgaagaaatagttttgttaggatgttttttttttggtgtagttgggtatttattttttttttatttttaattggtaagaggggttttttaagtgatttttttttgagtaaagatgatttgtttttagtgatttgaggtgtttattttttttagagaatgattggtaggtttttaaaaaaatttaagatttgtttttttagatattttattatatattaatagaattatatatgaaatagtagtagtataaagaagataataattaatttggtaatggggtgaaggggttaggggggattggttatagatgattgtttagagtaggagattatgaacgtttcgttttaaaggataaattgagttgaacgtgaggatgttagggtaggaagggatttaggtagaaggaataggatatttaagggaagattatagaagtgaatagtaggtatttattttttggggtaggggtagaatatatttgtaggaggggagaagtgttaagataggagttagagaggtaggtagagtttatattattattgggtttgtgtgagatgttaaggttattgtagtttattttggtgatgagaaattagtaaggaatttgtttgtattttattattttttttgatgagtatgtattatttttgtgttttcgattttgggtaaatagtattatttttttagatatttagtaaggtaatattagaattaatgtaaaaattttttttttatgaattaattattttatttatttttattttatgtgaatttataaagttattttttttttatttgatttgtgttgttttgatttatatggttattattttttatttagattattttatgtgtttaaattggtttttttgtttgatggttttttttttagtttattttatatattgttattagtatgattttttttaaataaattttgaggttattattttttttttagatttgtaatatatttttttatatgtagaataaaaattttattcggttggattggtgttttagattttttataaattgattttagttaaatattgtaaattttttttttattttatatgttttttttagtttttatttatattagatttaattattttttttaatttgtttcggtttttgtatttttgtttttgttgtatttttttcggaatttttttttttttatttgttttttaaggttatagtgtttgtataataaattatttttaaatttagtgatttaatataataaatatattattttttatagtttttacgagttaggaatttagtagtattttggttgagttgtttggtttgagattatttatgaggttgtagttatttgaaggtttgattgaggatggaggatttgtttttaagatggtttatttttatggttagtaagttggtttggtttttggtgggaggttttagtttttttttagggtattttgagtgttttttgtggtagttggtttttttaagagtaagtaatttaagatattaaggtagaagttatagtgttttttataatttggtttttgaagttatatagtattatttttattatatttttttggttataaaatttagttttgatgtgagggaaattttatgagggtataaatattaggatattatgattattagggataattttggagtttggttaatataatattttttttagaggttttttagatttattaattttttatgttttgtttatttgtttttagtagtttaaattttttaaaaattagagtttttggagattttttttataaaattatattttttgtttttttttattatttaatattatgaagtgtgaatttgtaaaattgtattgttaattattaaaggatatagtgttgaggaattttgttttttaaaattttagattgttagaaagtttgttgttttgagattttattagtgagaatagaatattttttttttgtttggtagatttgaattttttgagttatttagagttatagaagtagtttttatttttagtgtagaagtttagataagggatttttagatataatattttatattaattttaaatgtatgtttttaagaattagaattttgaatttgttttttagtttaggtttgatattatatatagatttgatttgttttaggtttattaagtattgttttatttagattttatttaaatttttttttttttttaaatattataatgattttttattttttttttttttttgagatatggttataatttttttgttgtatagtattttttgttgtagtaaattaataaatttaatgggttttagatttggttttggtgatttttgttagatgggttttattaatagttaaaattatttgagttcgaataattagtgtaattttttagaattttttatgttttttgaataagggtaatttttagaatgttttgttaatagattatttttattttttttttgattgttttgaaatttattttttagattgtttttgattaattttgtttgtattttttttattgttataaattttaagatgatatcgttatttttttataaggtttttaatttttttttagtattttattattgaattagtaattttttgttttgtttttttgagtgatttttgcggttttttagaatttagttatagaattatttttgttaagttttaagtttttattgaaagtattagataaaattaaatatttttatgtttgtgtttttatagtattttgtttatatttttaatatagtatttattatatttatatttgattttttttatacgttttttttttttaatagtttttggagaatatgatttttatgatttgtttatttttgtgttatttgtgttaggtatatttaattacgtaaattatgtgaggtcgttggggtttataatataatattttaaaatgaaggttttagtagtaaaagttttttgttttattttggtttttttgttttttagtttcgtatttttttaggttagttatagatattaggatttttattttttaagataagatgtagaaattagaatttttattttttaaagttagttataaaagtttaaatatattttgttagttttttttttttttttttttgtaaaatttggttataaagaaattatttgatttgttttgtttgattgtaggttgttaagagttttattttatttttgttttatatttagaaggaaggaatggtgtttagaaggttaagaagaatttagataggttttgttgggtgtttttatttagtttgttagtattagattatattatttttgtttaattatatttttatatagttgtttatattttgttgaatttaaatataaaaatggataattttttaagtatttttgggtttttattttgaacgtttttatgtatatatattaaatttgtatgtttttttttttattaatttttttttttattaatttgttttatgttagcggtttttagttaatttttagagggttaaaattttttgtttttttaggtaatgaaaatgtttatatgataaatagtgaattagtaggagttttagttttgtataatttagaatttattgttgagtatttttatacgtatgttattattgtatttcgtttttgtgatttttataatttgtattaggtaatagtttatttatattgagaaaatatttagggtatagtattattattttgtaggttattttaatatgtatgtgtattatgcgaggttttatgagtttattttttgatatatttgtttttttttagtttttttagttgaaaatagcgatttattgttattgtatatatgttaggtttaatgttggcgataataatttttgtaatatagggttagataggagaagaatgttgtaatttgtaaagtttttttgattttgggagtgaggttagtattaatataacgtacgattgttatttttgaatgtttttttgtaaagaatagtgttttttaaatttttttttgattagatttgtatatattttatatcgtcgttggcgatatatacgtgtaaaatattgaaatcgaaatttttttaaataatttttttattacgtgatgtattgtgaaatttttttattttgttttatttttaattttattaaaaacggagggtgatgatttcgatttattaaattaattttataatgcgttagagattataattcgcggtttggaaaatattggtttggaaaaagttttttgatttgtgttattttttttatatttttttatatttttgcggagtttcgattgtttggtttcgttttgataattattgtgttgtgttttttttatacgttttgtgacggggtcgttcgttttttttttgggtttttttaagagggtggtaacggtatattatcgcgggagtggagaggtagggtttattaggtcgtcgttgtaggttaggttcgtttatttagttattgtgaaagtcggggtgtgcgcgcgaagagtgggagggtaggggtgaggtaggggtagtattgacgtttcgtagggttgagtagtaatagttttttcgcgtcgcgttttcggagattttgaaggagttcgcgcgtgcgtagagcgcgtttcgggaattgtttcgtttacggaggttgtcgagcgcgttttcgtcgggttaaagtataaagtgggttttagagcgcgggcggcgcggcggcgcgagttagggggcggttttgcgcggtcggtttcgttttttgttttttttttagtttttttcgcgttgcgtgtagtaaggtagtcgtcgtcgtcgtcgtcgtcgcgttttttcgtcggttcgttggtatcggtagtgttaggcggttttagtaagtttattggggagtttttttttttgtggttgaattgtattgttgagtttatatttatagaagttgtttttgattatgtaatataggatcgttgaataatttttttatgatttgaattggattgtgtgaggttgagaggtgatgagagttagtaagaaaattatttttgaagatttaggagattaatatggttgttggagggtggggattgtattttgttaagtttcgaatataaggatgggaaatatagaggaaggtagttgggttatggtaagaggttagaaattaggttttagttttttaaaagagtgtttagaatatgttgggtaatggggatatatggtgatataaataagatataggtaggagttttagtttttaagaattttgagtagatttatagttaggtaaaagaaggttttgtgaaggttttgttaagtgagttattgtgatggtagtggagtaatttatttaattttatttttttttgttttttttgttgttttgggtttttataatgtaaatgaaatattttttaaatatgtttttaagttgtgtagttagtggggatggatgtgtgaagtttggatattttttaaggtgtagtttttgaggagtttttagttttggtgagttttgggggaaattattattagttttattatttgtatttaatatatttttgggtggaagttattagttttttttagggttttttttgaagtggggagaattttgggagttatttggaattagatgaaaagtagatagggatgttggttgttttaagtttattattttttatttattagttttattaaggttatggaaggttttaaattggacggaagtgtttttttttttattttgttagttagttgttttag

SEQ ID NO: 1550 - DNA, 5925 bp, Artificial Sequence
  chemically treated genomic DNA (Homo sapiens)
ttgaaatagttgattgataggatagaaaaaggagtattttcgtttaatttagaattttttatggttttgatgaagttgataaatagaaagtgatgaatttgaaataattaatatttttatttgttttttatttaattttaagtgatttttaggattttttttattttaagaagaattttggagaaagttgatgatttttatttagaaatgtgttaaatgtaaatagtaagattagtaatgattttttttagggtttattagaattaagagttttttaaaaattgtattttaaaagatgtttagattttatatatttatttttattggttatatagtttagaggtatgtttaaagagtattttatttatattgtggaagtttaaaataataaaaaagataaagagaggtagagttaaatgagttattttattgttattatagtagtttatttaataaagtttttataaagtttttttttatttggttatgagtttgtttaagatttttgaaagttagaatttttgtttatattttgtttatattattatatgtttttattatttaatatattttggatatttttttggagaattggggtttgatttttaattttttattatagtttaattatttttttttgtattttttatttttatgttcggagtttggtaaaatatagtttttattttttaatagttatattaattttttaagtttttaggaatgatttttttattaatttttattattttttaattttatataatttagtttaggttatgagaagattgtttagcggttttatattatatggttagaggtagtttttataggtataaatttagtagtgtaatttaattatagaaaagagggttttttagtaaatttgttgaagtcgtttggtattgtcggtattagcgagtcggcgaggggacgcggcggcggcggcggcggcggttattttattgtacgtagcgcgggggagattgggaggagagtagagggcggggtcggtcgcgtaggatcgttttttggttcgcgtcgtcgcgtcgttcgcgttttggagtttattttgtattttggttcggcgggagcgcgttcggtagttttcgtgggcggaatagttttcgggacgcgttttgcgtacgcgcggatttttttagggttttcggaaacgcggcgcggaggagttgttgttatttagttttgcgaggcgttagtgttgtttttgttttatttttatttttttatttttcgcgcgtatatttcggtttttataataattggatgagcgggtttggtttgtagcgacgatttagtgggttttgtttttttattttcgcggtgatgtatcgttattatttttttaaaggagtttaggaaggaggcggacggtttcgttatagagcgtgtagggaaaatatagtatagtgattattaggacgaaattaaataatcggaatttcgtagaggtgtagggagatgtgaggagaatgatatagattaaagagttttttttaagttagtattttttaaatcgcgggttataatttttagcgtattgtgaaattggtttggtagatcgggattattatttttcgtttttaataaaattgagaatagaataaaatagaaaagttttatagtatattacgtagtaaaggagttgtttagagaaatttcgattttagtgttttgtacgtatgtatcgttagcggcgatgtaaaatgtatgtagatttggttagaaaaaagtttgagaaatattgttttttgtaaagggatatttagaagtaataatcgtgcgttgtattaatgttggttttatttttagaattagaagggttttgtagattataatattttttttttgtttgattttatgttgtaggaattgttatcgttagtattgagtttagtatatatatagtaatagtgaatcgttgtttttagttgaggaaattggagaaaagtaagtgtgttagaaaataagtttataaaatttcgtataatgtatatatatattaaagtagtttataaagtagtggtgttgtgttttaggtgtttttttaatataaatgagttgttgtttaatataggttatgaggattataaagacgaggtataataatggtatgcgtatagaggtgtttaatagtgaattttaaattatgtagaattgaagtttttattaatttattatttgttatgtggatatttttattatttggagggataaaaggttttggttttttgaaagttaattgaaaatcgttgatataaggtagattaatagaagaaaaaattaataggagaaaaggtatataaatttaatgtgtatatatgggagcgtttagaatggagatttaaagatatttggaaaattgtttatttttgtgtttaggtttaataaagtatggatagttatgtagaaatgtgattggataaaaatggtataatttaatgttaatagattgagtggggatatttagtaaggtttgtttagattttttttggttttttgagtattattttttttttttgggtatagggtaggaatggaatggagtttttaatagtttatagttaaataaggtaggttagataatttttttatggttagattttatagaaaaagggggagggaaaattagtaaaatatgtttaggtttttatggttggttttaggggatagaggttttggtttttatattttgttttgaggaatagggattttaatatttatggttagtttagggaaatacgggattgagagataggagggttagagtagggtagagaatttttgttattgagatttttattttggagtattgtgttgtgagttttaacgattttatataatttacgtaattaagtatgtttggtatagataatataaggatgaatagattatggagattatattttttagaggttgttagagaagaaaaacgtgtaaaaaaaattaagtataaatgtggtaagtattatattagagatatgaataaggtgttatgagaatataaatatgaaaatatttagttttgtttaatgtttttaataaaggtttaaggtttgataaaggtgattttgtagttaaattttaaaggatcgtaggagttatttaggaggataaaataggaaattattaatttagtaataaagtgttagaaaagagttgggaattttgtgagaaagtaacggtattattttagagtttgtaatagtgaaggaagtataagtaagattagttaaaaatagtttagaaaatagattttaaaatagttagaggaaagatagaaatgatttattgataaaatattttaaaagttatttttgtttaagaagtatgggagattttaaaaaattatattagttattcgagtttaaataattttagttattgataaagtttatttgataaaaattattaggattaaatttggaatttattaagtttattaatttgttatagtaaaagatattatatagtagaggaattgtggttatgttttaaaaaaaaggaagaaataaggagttattatagtatttagagaaagagaggagtttaggtaaaatttaaataaagtagtgtttgataggtttaaagtaaattagatttgtatgtaatattaaatttgggttgagaagtagatttaagattttagtttttagaaatatatatttaagattaatgtagaatattgtgtttgaaaattttttatttgaatttttgtattggaaatggagattgtttttgtaattttaagtgatttaaagagtttaaatttgttaggtaagaaagggatgttttgtttttattgatagaattttagaataataaattttttaatagtttaggattttagagaataaaattttttagtattatgttttttgataattaataatgtaattttgtaagtttatattttataatattaaataataaagaaaaatagaaaatgtgattttatgggggagatttttaagagttttgatttttaaagaatttgagttattgagaataggtaggtagggtataggaagttagtgaatttagaaagtttttggaagaaatgttgtgttagttagattttaagattgtttttggtgattatggtgttttaatatttatgtttttatggaattttttttatattagagttgagttttgtgattaaaagagtataatgaaggtgatgttatgtgattttaaaggttagattataaaaggtattgtggtttttgttttggtgttttggattgtttgtttttggggaagttagttgttatagagagtatttaaagtgttttggagaggaattgaggttttttattaggagttagattagtttgttagttatgggagtgggttattttggaagtagattttttatttttagttaagtttttaggtgattgtaattttatgagtaattttaaattagatagtttagttaagatgttgttaaatttttgattcgtagaaattgtggaaggtaatgtgtttattgtattaagttattaaatttgggggtaatttattatgtagatattgtgattttgaaaaatagatggaaaaaagaggatttcgaagaagatataataggagtaaagatgtagagatcgaagtagattgaggaaggtgattaagtttgatgtggatggaggttgagggaggtatgtgaaatgagagaaaagtttgtaatgtttaattgaagttaatttgtggagggtttgaaatattaatttaatcgggtaggatttttattttgtatgtagaaaggtgtattgtaggtttggggaaagagtagtgattttaggatttatttaagaaagattatgttagtggtagtgtgtagagtgggttgaaggaggaattattaagtagagggattagtttgaatatatgaaatagtttaggtaaaaggtagtgattatgtgagttagggtagtatagattaaataggaagaaaatgattttgtggatttatataaaatggaaataggtgaaataattaatttataggaagaaaatttttatattgattttgatattgttttgttgagtgtttaagagggtgatattatttatttaaggtcggagatatagaagtggtatatgtttattaggaaaggtaatgagatgtaaataaattttttattagttttttattattaagataaattgtaatagttttagtattttatataaatttagtgatgatataagttttgtttatttttttaatttttattttggtatttttttttttttatagatatattttatttttattttaggagatagatgtttgttatttatttttgtagtttttttttgaatattttattttttttatttgaatttttttttattttaatatttttacgtttaatttagtttattttttaaaacgaagcgtttatggttttttattttgaatagttatttgtgattagttttttttaatttttttattttattgttaagttaattattattttttttgtattattattgttttatatataattttattaatatgtagtagggtgtttggggaggtagattttaaatttttttagagatttgttaattattttttggaaaaggtaaatattttaagttattgagaataaattatttttgtttagaaaagagttatttgaaaagttttttttattaattagaaatggaaggagaataggtatttaattgtattaaggaaaggatattttgataaggttgtttttttaaatagttttagttagtttaagttggtattggggaagtttgtataggagagttttttgggaggaaagagattgagattttaatttttttttttttgaggtttattattattagattttttgatggatttagatagttttgttttattagattagggtttta

SEQ ID NO: 1551 - DNA, 6090 bp, Artificial Sequence
  chemically treated genomic DNA (Homo sapiens)
agtgtagtggtgggattttagtttattgtaatttttgattttttggtttaagtgagttttttgttttagtttttcgagtagttgggattataggtacgtgttattagttaatttttgtatttttagtagagatggggttttattatggttaggatggttttgattttttgattttgtgattttttcgttttggttttttaaagtgttgggattataggtgtgagttattatgtttagttaatattgaggatatattgaattaaataaaatatattattaatattaattttatttattttatttatttattttgagatggagttttattttgttttttaggttggagtgtagtggtgtgattttggtttattgtaaattttattttttaggtttaagcgatttttttgttttagtttttggagtagttgagattataggtgtttattattatgttcggttaatttttgtgtttttagtagattaggttgttagttaggttggttttgaatttttgattttaggttgtttgtttatttcggttttttaaagtgttgggattataggtatgagtcgtcgtgttcggttatatatttttttattttttattttttgagatggagttttgtttttgtaagttaggttggattttggtttattgtaattttcgtttttcgggtttaagcgatttttttgatttagttttttaagtagttgggattataggtatgtgttattatatttagttaattttgtatatttagtagagatggggttttattatgttggttaggttggttttaaatttttgatttgaggtaatttatttattttggttttttaaagtgttgggattataggtatgagttatcgtgtttggtttgttttttttatttttttaaagatattttttagagaggaggttttgttagttttttagtttggatttaaatttttaaatttaagtaatttttttgttttagtattttatgtaggtgggattataggtatatgttattgtatttggttaaaaaagttttgattgggtcgggcgcggcggtttatatatgtaattttagtattttgggaggtgaggtaggtgggattatttgaggttaggagtttaagattagtttggtttatatggtgaaattttatttttatttaaagaaatgtaaaaattggttaggcgcggtggtttacgtttgtaattttagtattttgagaggtcgagatgggcggattacgaggttaggagatcgagattattttagttaatacggtgaaatttcgtttttattaaaaatagaaaaaattagttgggcgtggtggcgggcgtttgtagttttagttatttgggaggttgaggtaggagaatggtatgaatttgggaggtagagcgtgtagtgagtcgagatcgcgttatcgtattttagtttgggcgatagagtaagatttcgttttaaaaaaaaaaaaaaaaataaaaataaaaattagtcgggtgtgatagcgggtgtttgtaattttagttatttaggaggttgaggtaggagaattatttgaattcgggaggtagaggttgtagtgagttgagattatgtcgttgtattttattttgggcgatagagtgagattttgttttaaaaaaaagaaagaaaaaaaagaaaagttttgattgtatattcggtttgtattttgttttttttttttttttttttttttttttttttttttttttatttttttttttttttttttttttttttttttttttttttttttttgtttttttttttgatagagttttattttgtcgcgtaggtaggagtgtagtggtatagtttcgatttattgtaattttcgttttttgggtttaggtgatttttttgttttagttttttgagtagttggaattatcggtgtatattattatgtttagttaatttatatatttttagtagagatggtgtttcgttatgtcggttaggttggtttcgaatttttgattttaagtgattcgttcgttttggttttttaaagtgttgggattataggtgtgagtttggtcgagttttgtttttattgttgagtgaagagtgttattttgtggtgataaggattattttaagtattaggtgtgtcgttttttatttagttttatgaggattttgagaggtagttattattaatttttttataggggaagaaattgaggtatagagtaaattgtttaagatgaattattagtaagaagttagtagggttgtttatttgttttgttaatgtcgtttaatttttaggaagaatgaaaaaatttgattgattttattaaatgtaagggattgaatgtttatatttttgaaaatttatatgttgaaatttaattttaattcgatagtgttaggaggtgaggtttgataggtgattaggttatgagggtagggtttttatgaaagagattagttagtgtttttattaaagggattttttttgagtcgtgtgagggtataaaaagttaatagtttgtaatttagaagagggtttttattagaatttgattgtgttggtattttgattttgaatttttagtttttaaaattgtgaaaaaataatttttgttgtttataagttattcggtttatagtattttgttgtagtagtttgaattagatattaagtttaattgttgtggggtgagagtttaagggaagaaggaagttagggaggaaatgggggtttaggaatgatttatatgaggaaatttttggtagggatttgagtgttcgagtgtattagtatttaattttgaagttttagttttttttagaattttgtatagtaatgggaaatttgtttatttaatgggtgtttcgtatttttagattatatagttttgaaaaagaaaggttttagatttttggagaagtggataagcgtatgttttggggttggtttaagttgttagtagttttatttagtcgttttataattaggttttggtataagtttttttaggtttaaattttagtttttttatttattagttgtatgatttggagtaatttaatttttgatttttaatttttttagttgtaaaaggggttaataatgtttattttttaggtttgtggttagtattaaatgttttgtttatagatttttgtatatgttgttttatatagttgggagtggggcgaggttatttattttttatgttaattattttgtttttttgcgtgtatttttagatttaagaaggtagatattatgttagttttatttattattttagtttacgtaataaagtaagattgtgttttaaaaatataaaaataggttgggcgtggtggtttatatttgtaattttagtattttgggaggttgaggggggcggattatttgaagttaggagtttaagattagtttggttaatatggtgaaattttgtttttattaaaaatataaaaattagttaggtatggtagtatacgtttgtaattttattaggaggtaggagattatttgagattaggagtttaagattagtttggttaatatggtgaaattttatttttattaaaaatataaaaattagttaggtatggtggtatgcgtttgtaattttagtaggaggtaggagaattatttgaatttgggaggcggaggttgtagtgagttgagattgtattattgtattttaatttgggcgatagattgggattttattttaaataaaaataaaaatataaaaattaaaataaaatagaggtatgtgtaagatgttggaaaattacgtaatagagtgtttgaggaatagtttttggttttgaatttattataggagaatgtggtagttatagaagttgtttggatttgtttttataaaatgattgaatatggtgggagtattggaattcggatatttttgtttaaggagattttttattttttttgttttggaattttttgatgggttgatttgtttgttagatttgagtttttttgtttaattttgtttatttttttttttttgttacgggtattatttttagttttattttagtattttatttgttttttggaggatttgatttgatttagaaggtttggatttttgagggataaggggaattcgaagttgtatttgtagagtagttttatataaaatttataaattgttattatttattttaacgggtagggaagtatttttaggaggattaatttagagaatagttatatagtgtttgtttatttagatatttaataaatggtagttgttattattatttaattttcgagtgtgtgggagtattgggtgtgatttttttgtagttttttttttaatgtttaatttggggatttttttgttttatgtagttttggaaaagtgtttagggagggtggttgtgtggaagtaatattaagagagatggaattatataggtattgggtttgggttagaaagggtgaattgcgagttgtattgttattgatttagaggacgattttaggaaaggttagttacgggtttcgggttttgtttggtattgatttatggtttttttgggtggtgatttataggtgatagacggataggtgggtaaaattgattgtttagtggataggtatgtgatgatttagtggttgacgaatgtatagatatatggttgattgtggacggatttgttattcgtagggttaggtaagtgattttgagagggatagaaagatggatgggagtggttggaggtttgggagtcgtttatttgttcgtttagtcgcgagggggcgttatcgtttcgtttagcgacgtttattgttcgggtttttggcgggggcgggattagcgtgcgtagggggcggggttagtaagttcgcgggggtgttcgggggcggggcgcgcgtgtatagggggcggtcgggggcggggcgcgcggcgggcgcgggcgcgggcgcgcgcggcggcggcgcgtttcgtttcgggtcgaggttcgcggcggaaaagttgcggggtatagacgagcggtttcgggacgggtagttagcgcgattttgagtcggcgttcgtggttcggttatggacgatttcggtgagtgagcgggaggtcgagggaggaggaggcgagaggcgcgtagtttggggttaggagggcgttagcgagcggtaggggtcgcgggattttattttcggcggtttcggttttagtttttgtttttgtcggtcggggtttcgcggggttgggatttttaatcgggttttagtttcgggttaggtcggtttcggtatcgatcgtatagtagcgatttttcgtttgggacggttttatttttggattttcgatttcggggatttattattattttttagaagggttttagggattagttcgttttttagggatttatttcgttcgttgtagggacgagattttttgcggtagattatttcgttagttacgggatttttatttcgtagatttttttttatttttattttatagatcgatcgtttaattcggggagtagttgttcgattttatgggttgtttttttattttttcgatttgtttttcgtttttttagggtcgttttttattttatagattagtatttttttttagggataatttttcggagtttattttttttattttataagttagatgtaaaagttagagatgagcgtgtgatgattatatttttattttaaagataagttttttagtttgtttgtttttttgattttttattttaaatttggttatttcgttttaaggatttattatttatttttttttattgattttttcgttttgtggattagttttttaatttatagattagttcgtttattatggtatttaagtttagaacggtaatttgggagttttgattttttttttatttttagattttggtgaaatgttaggggaatgaggtggaaggtgggttttaaggtatgattatttttgaacgtgttttggttagtagagttttttttattttttttgcgttaggttttgttggaagttacgtaggtgaaagaggataggatgtttagaatagagttttattgtttttttgttattg

SEQ ID NO: 1552 - DNA, 6090 bp, Artificial Sequence
  chemically treated genomic DNA (Homo sapiens)
taataataggaaaatagtaaaattttgttttgggtattttgtttttttttatttgcgtggtttttagtagggtttgacgtagagagggtggaggggattttgttagttaggatacgtttagggatggttatattttggggtttattttttattttatttttttggtattttattagaatttaggggtggggagagaattaggatttttaaattatcgttttagatttagatattatggtagacggattggtttgtgaattgaggggttggtttatagagcggggaggttagtgagagaaaatgagtgatgggtttttgaaacggggtgattagatttgaagtggggggttagaagagtaggtagattgggaaatttgtttttgaaatgggggtgtggttattatacgtttatttttagtttttgtatttgatttgtgaaatgaaaggggtgggtttcgaggggttatttttgaaggggggtgttagtttgtgaagtggggggcggttttggagggacggggagtaggtcgaggaaatgagggagtagtttatgagatcgggtagttgtttttcgagttgggcggtcgatttgtgaggtgggggtggggagaggtttgcgaggtgagggtttcgtagttgacgaggtggtttgtcgtaggaagtttcgtttttgtagcggacggggtgggtttttgaggggcgggttggtttttggggtttttttgggagatggtgatgggttttcgaggtcgggggtttagaggtgaagtcgttttagacggggggtcgttgttgtgcggtcggtgtcggggtcggtttggttcgagattaaggttcggttagggattttagtttcgcggagtttcggtcggtagggataggagttgaggtcggggtcgtcgagggtgggatttcgcggtttttgtcgttcgttggcgtttttttggttttaagttgcgcgtttttcgtttttttttttttcggtttttcgtttatttatcgaggtcgtttatggtcggattacgggcgtcggtttagggtcgcgttagttgttcgtttcggggtcgttcgtttatgtttcgtaattttttcgtcgcgagtttcggttcggaacggaacgcgtcgtcgtcgcgcgcgttcgcgttcgcgttcgtcgcgcgtttcgttttcggtcgttttttgtgtacgcgcgtttcgttttcggatattttcgcgagtttgttggtttcgttttttgcgtacgttggtttcgttttcgttaagagttcgggtagtgggcgtcgttgggcggggcggtggcgttttttcgcggttaagcgggtaggtgggcggtttttaggtttttagttatttttatttatttttttgttttttttaaagttatttgtttgattttgcggatgataaattcgtttatagttagttatgtgtttgtgtattcgttagttattgggttattatatgtttgtttattggatagttagttttgtttatttgttcgtttgttatttgtaggttattatttaggaggattataaattagtattaggtaaggttcggagttcgtggttgattttttttggggtcgttttttggattaatggtagtgtagttcgtagtttattttttttggtttaaatttaatatttgtgtggttttattttttttaatattatttttatatagttattttttttagatatttttttaaaattgtatggggtagaggggtttttagattagatattaaagggaaaattataggaaagttatatttagtgtttttatatattcggaaattgggtaataataataattattatttattgagtgtttgaatagatagatattatatagttattttttaaattaatttttttagaggtatttttttattcgttgggatgggtgatggtagtttgtggattttatataaaattgttttgtaagtatagtttcgagttttttttgttttttaagaatttaggttttttgggttagattaggttttttagaaagtagatgagatgttgagataaagttaggggtaatgttcgtgatagagaaggggaaataagtagggttgggtaaggagatttagatttgataaataggttaatttattagggaattttaggataaaaaaaatgagaagtttttttgggtagaagtattcgggttttaatgtttttattatgtttagttattttataaaggtagatttaagtagtttttgtggttgttatatttttttataataaatttaagattaaagattgttttttaaatattttattgcgtggttttttagtattttgtatatatttttattttgttttagtttttgtgtttttgtttttgtttgagatggagttttaatttgtcgtttaggttggagtgtagtggtgtaattttagtttattgtaattttcgttttttaggtttaagtgatttttttgttttttgttgggattataggcgtatattattatgtttggttaatttttgtatttttagtagagatggggttttattatgttggttaggttggttttgaatttttgattttaggtgattttttgttttttggtgggattataggcgtgtattattatgtttggttaatttttgtatttttagtagagatagggttttattatgttggttaggttggttttgaatttttgattttaggtgattcgttttttttagttttttaaagtgttgggattataggtgtgagttattacgtttagtttgtttttgtgtttttaagatatagttttgttttgttgcgtaggttgggatgatgaataagattaatatgatgtttatttttttgaatttaaaggtgtacgtaaaagagtaaagtggttagtatgaaggatgagtagtttcgttttatttttagttgtgtggaatagtatgtgtaaaggtttgtagataagatatttaatattgattataagtttaggagatgagtattgttagttttttttatagttggaagagttgagagttagaggttgaattattttaggttatatagttaataagtaaggaaattgagatttgaatttggggaggtttatgttaaggtttggttatgaaacggttaagtgaaattgttaataatttagattaattttagggtatacgtttgtttatttttttaaaggtttaaaattttttttttttaaagttgtgtggtttggaaatgcgaggtatttattgaatgggtaagttttttattgttatgtagagttttaaagagaattgaagttttagagttgagtgttggtgtattcgaatatttaggtttttgttagggatttttttatgtaaattatttttaaatttttattttttttttggtttttttttttttttggatttttattttatagtaattaaatttggtgtttagtttaggttgttataataaaatattgtagatcgagtgatttataaataatagaaattatttttttatagttttggaggttgaaagtttaagattagggtgttagtatagttaggttttggtgagggtttttttttgggttgtagattgttgattttttgtatttttatacggtttaaagagggtttttttaataaaggtattaattaattttttttatgagggttttgtttttatgatttaattatttgttaggttttattttttaatattatcgaattgagattagattttaatatatgaatttttaaggatatgaatatttagttttttgtatttgataaaattaattaggtttttttattttttttaaagattaaacgatattgatagagtagatggataattttgttgattttttgttagtggtttattttgggtaatttattttgtgttttagtttttttttttatagaaaggttaatagtagttattttttagagtttttataggattaaataagaaacgatatatttagtatttagaatggtttttgttattataaaataatattttttatttagtaatagaaatagaattcgattaggtttatatttgtaattttagtattttggaaggttaaggcgggcggattatttgaggttaggagttcgagattagtttggtcgatatggcgaaatattatttttattaaaaatatataaattagttgggtatagtggtgtgtatcggtaattttagttgtttaggaggttgaggtaggagaattatttgaatttaggagacggaggttgtagtgagtcgagattgtgttattgtatttttgtttgcgcgatagagtgagattttgttaaaaaaaaaaataaagaaagaaagaaggaaggaaggaagaaaggaaggaaggaaggatggaaggaaggaaggaaggaaagaaagagagagaaaagaaatagaatgtaagtcggatatgtaattaaaatttttttttttttttttttttttttttgagatagagttttattttgtcgtttagggtggagtgtagcggtatgattttagtttattgtaatttttgtttttcgggtttaagtgatttttttgttttagttttttgagtagttaggattataggtattcgttattatattcgattaatttttgtttttgtttttttttttttttttgagacggagttttgttttgtcgtttaggttggagtgcggtggcgcgatttcggtttattgtacgttttgttttttaggtttatgttatttttttgttttagttttttaagtagttgggattataggcgttcgttattacgtttagttaattttttttatttttagtagagacggggttttatcgtgttagttaggatggtttcgattttttgatttcgtgattcgtttatttcggttttttaaagtgttgggattataggcgtgagttatcgcgtttggttaatttttgtatttttttaagtagagatggggttttattatgtgggttaggttggttttgaatttttgattttaggtgattttatttgttttattttttaaagtgttgggattgtatgtgtgagtcgtcgcgttcggtttaattaaaatttttttagttaagtgtaatggtatatgtttgtagttttatttatatgggatattgaggtaggaggattgtttgagtttaggagtttgagtttaaattgggaaattagtaagattttttttttaaaaaatatttttaaaaaaataaaagaaataggttaggtacggtggtttatgtttgtaattttagtattttgggaggttaagatgggtggattattttaggttaagagtttgagattagtttgattaatatggtgaaattttatttttattaaatatataaaattagttaggtgtggtggtatatgtttgtaattttagttatttgggaggttgagttaggagaatcgtttgaattcgggaggcggaagttgtagtgggttaagatttagtttggtttataagagtagaattttattttaaaaaataaaaaataaaaaaatatatggtcgggtacggcggtttatgtttgtaattttagtattttaggaggtcgaggtgagtaaataatttgaggttaggagtttaagattagtttggttaatagtttggtttattaaaaatataaaaattagtcgggtatggtggtgggtatttataattttagttattttagaggttgaggtaggagaatcgtttgaatttgggaggtggagtttgtagtgagttaagattatattattgtattttagtttgggggatagagtgagattttattttaaaataaataaataaaatagataaaattaatgttaataatatattttatttaatttaatatatttttagtgttggttgggtatggtggtttatatttgtaattttagtattttgggaggttaaggcgggaggattataaggttaggagattaagattattttggttatggtgaaattttatttttattaaaaatataaaaattagttggtggtacgtgtttgtaattttagttattcgggaggttgaggtaggagatttatttgaattagggagttagaggttgtagtgagttgagattttattattgtatt

SEQ ID NO: 1553 - DNA, 5633 bp, Artificial Sequence
  chemically treated genomic DNA (Homo sapiens)
tatttgttattatcgtagaggattgaggggttttggtttagtagggattttagggttttgggggattgtgtgagttggaaacgtggttggttagatgggtagtattatggagttttttgggggtgcgtatttgtatttgggcgtcgtgatattttttgtgtgtatagttcgcgtgttgtagttggtttttggttgtattatttttagtttggtggtttatcggggtggttttgcgggcgtttagggtattttttgtatggacgtttggggtttttgtttcgtcgtttttgcgttggtggtggtttgtgagtttatacggttttacggttgtttgcggtttttttggggtaattttatcgtcgttttcgttatgttggttattttgttatgcgcgacggttgcggttttgtattcgttgtattttgttcggcgggagtgttttttcgagttcgtcggttgtgttgttagggattttcgtttggtagttagtgttttcgtcgggtttttttttttggtttacgttgtggaggtggttttgacgcgggttcggttcggttaggtgagtagttatatggttacggtgtcggggttttttaagatcgtttaggttttcgtggtttgtattattttcggggcgttggtttatgatagtcgttacgggcgttacgtggttatttagtggtgcgtggtcgtttatagtttgtgttttttggttatagtggtcgtggtggttttgagtgtgatgggttatatagggggtttgggttgtttttttgatcggttggtggtggtgtatatttttttggttgtgtttttgtattttagcgtcgtcgtgatttggttagttttttgtttcgattttaagtacggtgagtttaaacggttttttaattgtgttcggggtagttgtttttgggatattagttggtggtggttatttttatttacgttaatttgtttttgtacgtcgttgatttcgtttatttttagaggattcgtttcgtgtttagtttgtagtttatagtggtagtttatttatttttgttttttggttattagttttaggttttgcgagggaaatttaggtgaattaaagtgttaagtagcgagtaggagggaagtcgcgggtttaggggagatgaagtataacgggagaggttatttttcgatttttagattgggtttagagggataagggtaggatagtagggtagaggttttgagtagacgtaggggagagttttatttaggttaatttttaatttatttttttttattattttttagcgtttttggggtttagtgttggttattggaatattataagggaaaattttaaagtagttgttgttgtgatttattttgtagttggggatatggaggttagaagtatttgcgaggtatttagtatttttattagtgtttggagattatagttaggttgggtaaggtaagttgaaagaggaatgatttttagaggagacgaatttaggagagtagttgggttaggtaaggggagggaggggcgtggggagtcggaattatttttggtttagagaggtagtttttagaattttgggaagagagttttgtttggggagtgtgttagtttatagagaaggagttagaaatttggattagttttttttatttacgttcgggaagtttttgggttggtagttatagtgtttggaagtaggtttttttcggagttttcgtaggttggaggtggcgcgggtggtttggaagagtttgtagagttcggcggtatcgagtgtatagtggacggggaggatttggtttcgttatagttacggagttttatttggatatttattattggttgtgacgaagtagttttagtagtgttcggcgggtatttgtgtattgtgggtatttgtggtattgggagggagttcggttgagggcggtcgttggatatagaatttgggtattgtttgtttttgtttaagggtttagttgtcgaaatttttgacgtcggggttattattttttaggttttagttagttttttttgtatagaagtttagtttggtttagttaggagttgatttattggttatttttgagtttaagtcgggtgggtagtggtataatagttttttagtttattgattgggttttattgacgtttttgagtaggaaataaatgttgatatttatacgtattttgtttttggattagtagttttttttgaggggattgtgggtatttgttttttttggcggttttttttagcgtgttttgggggaaggttgaggaaggaagtggtttgggattatagttagggtaggttgggtttttgagggtttgagtagttttttggggaaggggtaggtagcgttttttgttttataggggtgataggttagtttggtttcgacgggtttgtggttatgttcgttttttttagaggttcgtagtatttatttttttttttacgtttatttgggggtttcgagaggttttggatatagcgatggatagacgtattgttgttttttttagacggcggtttttatagttaggtttgtgttgttgttatgaagaatgtgaggaaggggttttattggtcgttgaggaggggtttcgtttacgttagttaataaatagggttcggtcgatattttttatttagagggggtgggtgttttggggttaatggtagattttagatgagggtagttagttgtttagggtttgtcgttggttgagggcgatatagagggggtatagggattatttgttttttgatttaggggagatttgggtattagttttggagaggatttagtttttttttttttttttttttatgtggttagaattttgaaacgagttaattgttattaattttttaattttttttttgttcggtggttttttgttattttcgtaaaggttttgagggatagaaaggaaggggaggggatttagggttgggagattttttttagagttagtttttttgatagtgtatttttggtttagaggattgtttattttgggtttttgggtttttaggtaaaagtgttatttgttgttattatttggggaaaagtgattttgtaatagtttggggagtttggtttttaaagcgtttaggcgatgttagttttcgtgttttaggtttgagttgtttatttggataagttttttttatggttattatagagtagttttttagtgttggtggtggttattacgtgtttacggtggggggattaggtagatagatagttagaacgcgtggttttgtcgttgtggtagaagtattttaggttttttgaaatgatgtgttagaatagtttgttattatttaagatatagtatagaaaaaataaggtagttttttttattttttggtaggggaatgggttgttagtgattttttttgatttcgtttttaattttggttatcgatagggattttgattatttagagttttagatgtaggttcgaattagatgaattttgagtatgtttttagggggaagtgattggagttttattttttttaaaatttaggtaggcgagaggtttgggtattggaggatgtttcgggttgcgtgggagtgggggtatgatggggtgggtttttttcgtttgtttagtggagtatcgttgcgtgtttagttagaggaatatttgtggtcgtattgttatgttttttttttttttttttttttttttttttttttttttttttttttttttttttagatggagtttcgtttttgttgtttaggttggagtgtagtggcgtaatttcggtttattgtaatttttatttttagggtttaagcgatttttttgttttagtttttcgagtagttggaattataggtatttgttattacgttcggttaattttttgtatttttagtagagacgggggttttattatgttggttaggttggtttcgaatttttgattttaggtgattcgttcgtttcggttttttaaagtgttgggattataggcgtgagttatcgcgttcggtttaaatggtgatatatttaaaatgtttttatttggtaaattatttttaattttgtttttaagggaaaaaaaaaaaggaaagaaaacgttgtatagtcgggtttttttaaattcgatgatagtagaagggattgatttttagagagagtcggtcgcgcgtttagggacgttagttggacgcgttcgtgttcgggtggtttaagataaagttttgcgtggagggttttttataggttttaatcgggtcgtttttttcgttcgcgttttcggattttacgtgtaggtttcgggaagcgcgattaggaggagcgcgggttaggggatcgcgtgtcggagagggtgtttattcgggggtcgggggatttcggggcgcgagagaggcgagggtcggcggtcggcgtgggaggggcgcgtagatgatgtaatcgttttggcgtcgtcgcgcgttttgattggttagcgttggcggtcgcgttcggatgttggcgcgacgggggcggggtttgggtgcgggttgcgtggcggcgtagcgttgaggggtgggtacgattcgcgtacggtagttgggttggggtcgggtttcgggaatggtgggcgcggtcgtcgggtggggcgcgacggtagtttagttttgggcggggtgggaatttagacgggggatttttaggcgtcgggtttttttttttttcgtatttttttttttttttagttattttttttgcggaatttttatttttttagtgggtgcgggattttaggtagtaggttaggtatcgtcgttttgattgggggtttcgaagtagttaacgggtcggatagtaaagtggaaagttagattagttgggattaggggaggtgggtattcggttgcgggaggagcggttaggttggtattgtttttttaatttgttttcgattttgtcggtttcgtttcgtagagtcggtgttatttgtgggggttttgggttaggggttttcggatagtatgagcgtgggttttatcggcgttggttagttggtttttgttttggttaaggtttttatagtagtaggtaggtttttaggtgggggacggtgaggtttagtgggagagattggtttttttttatttttgtagggttgggggttgaaggtgggtgttgggttataaggtttgagttttgcgggaattggtaatttttgtgtgtttggggttttatttgtgttgttttatttttttttttgggaatggggagggagggaagttaaagttagttatgaagaggaattgttttcggtcgggcgcggtggtttacgtttgtaattttagtattttgggaggtcgaggcgggcggattacgaggttaggagatcgagattattttggttaatatagtgaaatttcgtttttattaaaaatattaaaaattagtcgggtgtggtggcgggcgtttgtagttttagttattcgggaggttgaggtaggagtatggcgtgaattcgggaggtggagtttgtagtgagtcgagattgcgttattgtattttagtttgggtaatatagcgagatttcgttttaaaaaaaaaaaaataataaagaattgaagaggaattgtttttttttttagg

SEQ ID NO: 1554 - DNA, 5633 bp, Artificial Sequence
  chemically treated genomic DNA (Homo sapiens)
tttgaggggagaaatagtttttttttagttttttattatttttttttttttgagacggagtttcgttgtgttgtttaggttggagtgtagtggcgtaatttcggtttattgtaagttttatttttcgggtttacgttatgtttttgttttagtttttcgagtagttgggattataggcgttcgttattatattcggttaatttttggtatttttagtagagacggggttttattgtgttagttaggatggtttcgattttttgatttcgtgattcgttcgtttcggttttttaaagtgttgggattataggcgtgagttatcgcgttcggtcggaaatagtttttttttatggttagttttggtttttttttttttttatttttaggaagaagagtgagatagtataggtaaagttttaaatatatagaagttgttagttttcgtaggatttaggttttgtgatttagtatttatttttagtttttagttttgtagaagtggaaagaggttagttttttttattgggttttatcgttttttatttgggggtttatttgttgttgtgaaagttttggttagggtaaaagttagttggttagcgtcgatgaagtttacgtttatgttgttcggagatttttggtttaaagtttttatagatggtatcggttttgcgggacgagatcggtaggatcgagagtaagttaggggggtagtgttagtttggtcgtttttttcgtagtcgggtgtttattttttttggttttagttggtttaattttttattttgttgttcggttcgttaattgtttcggggtttttagttagagcggcggtgtttggtttgttgtttagggtttcgtatttattggaggggtggaggtttcgtagaagaaatgattgggaagggggaaaagtacggggagagggagggttcggcgtttaggggtttttcgtttgggtttttatttcgtttagaattgggttatcgtcgcgttttattcggcgatcgcgtttattattttcggagttcgattttaatttagttatcgtgcgcgggtcgtatttattttttagcgttgcgtcgttacgtagttcgtatttaggtttcgttttcgtcgcgttagtattcgggcgcggtcgttagcgttggttaattagagcgcgcggcggcgttagagcggttgtattatttgcgcgttttttttacgtcgatcgtcggttttcgtttttttcgcgtttcgggatttttcggttttcggatagatatttttttcggtacgcggttttttgattcgcgttttttttggtcgcgtttttcgggatttatacgtggggttcgaggacgcgggcggagggggcggttcgattggggtttgtgaggggttttttacgtagggttttgttttgggttattcggatacggacgcgtttagttggcgtttttgggcgcgcggtcggttttttttgggaattagttttttttattgttatcgagtttggagaagttcggttgtatagcgttttttttttttttttttttttttttgggggtagagttgaaaataatttgttaagtggaagtattttaaatatattattatttgggtcgggcgcggtggtttacgtttgtaattttagtattttgggaggtcgaggcgggcggattatttgaggttaggagttcgagattagtttgattaatatggtgaaattttcgtttttattaaaaatataaaaaattaatcgggcgtggtgataggtgtttgtaattttagttattcgagaagttgaggtaggagaatcgtttgaattttggaggtggaggttgtagtgagtcgggattgcgttattgtattttagtttgggtaataagagcgagattttatttgaaaaaaagagagagagaaagaaaggaagaaaagaagaaaagaaaagaaagaggtatgatagtgcggttataggtgtttttttaattgggtacgtagcggtgttttattaagtaaacgaaggaagtttattttattatgtttttatttttacgtagttcggagtattttttaatatttaaatttttcgtttgtttgggttttagggggagtgaagttttagttatttttttttgaggatatgtttagagtttatttgattcgggtttgtatttggggttttggatagttagggtttttgtcggtggttaagattaagggcgaagttagaagggattattggtagtttatttttttgttaaggggtgagaggagttgttttattttttttgtgttgtattttagatgatgataggttattttagtatattattttagaaggtttgggatgtttttgttatagcggtagggttacgcgttttggttatttgtttatttggtttttttatcgtgaatacgtaatgattattattaatattgggaggttgttttgtggtggttatgggaagagtttgtttagatggatagtttaaatttggggtacggaggttagtatcgtttaggcgttttgagagttaagttttttaggttgttataaaattatttttttttaagtgataatagtaagtaatatttttatttaaaaatttaaaaatttaaaatggatagttttttgggttagggatatattgttaaaaggattgattttgaaggaagttttttagttttgggtttttttttttttttttttgttttttaggatttttgcgaaggtggtagaggattatcggatagggaggaaattgggaagttggtgataattaattcgttttagaattttggttatatgaaaaaaaggagagaaggaggttgagttttttttaagattggtgtttaggttttttttgagttaggaagtaggtgatttttatgttttttttgtatcgtttttagttagcggtaggttttgaatagttgattgtttttatttgggatttgttattgattttaaaatatttattttttttgagtaaaggatgtcggtcggattttgtttgttggttaacgtgagcgagatttttttttagcggttagtgaggttttttttttatattttttatggtagtagtataggtttggttgtggggatcgtcgtttaaaaggagtaatagtgcgtttgtttatcgttgtgtttagggtttttcgagatttttagatgggcgtgggggaggaggtgagtgttgcgggtttttgggagggacgggtatgattataggttcgtcggagttaggttggtttgttatttttgtgaggtagaagacgttgtttgttttttttttaggaggttgtttagatttttaggagtttagtttgttttgattgtgattttaggttatttttttttttagtttttttttagagtacgttaggaggggtcgttaggaggggtaagtgtttatagtttttttagaagagattgttggtttagaggtagggtacgtataaatgttagtatttattttttgtttaaggacgttaatggggtttagttaatgggttgaggggttgttgtgttattgtttattcggtttggatttaggggtggttagtgggttagtttttggttggattaggttgggtttttgtgtaggagaagttggttggagtttggaggatgatggtttcggcgttaggagtttcggtaattggatttttgagtagaggtaagtagtatttagattttgtgtttagcggtcgtttttagtcgggtttttttttagtgttatagatgtttatagtgtatagatgttcgtcgggtattgttgaagttgtttcgttatagttaatggtgagtgtttaggtggggtttcgtggttatggcggaattaggtttttttcgtttattgtgtattcggtgtcgtcgggttttgtaggtttttttaggttattcgcgttatttttagtttgcggagatttcggaggaagtttgtttttaaatattgtggttattagtttagaggtttttcggacgtgggtgggagaggttggtttagatttttggttttttttttgtgagttggtatattttttaggtagggttttttttttagggttttgggagttgtttttttgaattaggagtggtttcggttttttacgtttttttttttttttgtttggtttagttatttttttgggttcgttttttttggaagttattttttttttagtttgttttatttagtttgattgtggtttttagatattaatggaggtattgggtgtttcgtaaatgtttttagtttttatgtttttagttgtaaaatgggttataatagtagttgttttaaagtttttttttatgatgttttagtgattagtattgagttttaggagcgttgggaaatggtgagagagagtgagttggggattggtttaggtgaggtttttttttgcgtttgtttagggtttttgttttattgttttgtttttgtttttttgagtttagtttggaagtcggggagtgatttttttcgttgtattttattttttttgagttcgcggttttttttttgttcgttatttgatattttggtttatttgagtttttttcgtagagtttggagttggtggttagagagtagaggtgggtgggttgttattgtgggttataggttgggtacgaagcgaattttttgggagtaggcgaggttaacgacgtataggagtaggttgacgtaggtgaagatggttattattagttggtgttttagggatagttgtttcgagtatagttggggggtcgtttgggtttatcgtatttgggatcgaaatagaagattggttagattacggcggcgttgaggtataggagtatagttaggaaggtgtatattattattagtcggttaaaggggtagtttaggttttttgtgtggtttattatatttagggttattacggttattgtggttaggaagtataggttgtagacggttacgtattattgggtggttacgtagcgttcgtagcggttgttatggattagcgtttcgaagatgatgtaggttacgaaggtttggacgattttgaggagtttcgatatcgtggttatatagttgtttatttggtcgggtcgggttcgcgttagggttatttttatagcgtaggttaggaagaggagttcggcgaagatattggttgttaggcggaagtttttggtagtatagtcggcgggttcgggggaatattttcgtcgggtaaagtatagcggatataggatcgtagtcgtcgcgtatagtagggtggttagtatggcgaaggcggcggtgaagttgttttaggagagtcgtaggtagtcgtggagtcgtgtgaatttataggttattattagcgtagagacggcgaagtagaagttttaggcgtttatgtagaaggtgttttggacgttcgtaaagttatttcggtgggttattaggttgaaggtagtgtagttaaaggttagttgtagtacgcgggttgtgtatataggggatgttacggcgtttaggtgtaggtacgtatttttagggggttttatggtgttgtttatttggttagttacgtttttagtttatatagttttttaaggttttggggtttttgttgggttaaggttttttagttttttgcggtagtggtaggtg

SEQ ID NO: 1555 - DNA, 7087 bp, Artificial Sequence
  chemically treated genomic DNA (Homo sapiens)
tgattgtgtgtgtacgtatgtgtgtgtgtgtacgtattgggttgggttaagcgattgaggattcgtttgggaacgggtaggtggtagtaggggcgttagtttgggtttttttggcgtttcgtagtatcgagtgttttttttgttttttttttttttttatttaattttttttgtttttttttaaatcgggtcgttaggattttttttcgcggcggcgatggttcgagttatgagagtgaggatttttcgcgtttattggtgatttttttaggtagatagttttagtaacgtttttggtggataggatggttcggtaaagtagtttgagttatttttgtggacggaatcggaatacgttggttttatatcgtgaaatttttattaattttttttttttttttttgttatttttttatttttttttttttttagatttcgtttaaggagatgtttttttcggttttttgttgtaatttagattttttttttttttttttagtttttttttttttattaaggagaggggagtaaatggttttgggtaagggttttggttatttatgttaagttggttgtgggttttttaaggtgttatagttatttttaaatatgtttgtttaaagcgtggggttttttaatttttgttatttttgttaagggagttttgtaaagttgtcgagggtaggtttatttttaggtttcgggatttttattcgttttggcgattttgttagtagtgggtgggtagtttgagttttttcgggttcgtttgttagtttggagttttttttgtgttttttgattatttgagttgttttagattttatttggtttttttttttttggaaggtttttttttatgttttgttttaattttaaatgtttgaatgttttgtagtgtgtaggggtttgagttttttgtttattttttttttttttttttttcgtttttttttttatgaagtgattttgttgataataatgtatattgcgcgttttttttattggtttatttgtagaaatttttttgggtttttttcggtgttagatttaatattgcgttaaagcggggatgttttattgaataaaagagtagtgtggttttttgggtttgtttttttattttttttttaatgtttgtttcgttcggtttttttttttatataaattttttttattattagtagtagtagtagtattaaaggtgttttaattttcgtttagtattaggttcgggggggtgagattgtgggtggttaattagggaagtttattatttgttttttgtgtgtggttttggtggtgggagtttagtgtgtgggtggttttatagttttttttttggtgattagttaatatcgttgagaattaattttgtttttttttgtttattgtttatttttttagtttttgttttttgaaggtttttttttggggtttagacgtttacgtttgatgagttttagtggtgatttgtgtttggaagttgttatttaaggttttgggtttggggaggtattaatattaaaggttaagttaattaattttgtttgttaggtatagagtagttaaaattaaaatcgttaagtggtttttttttttttttgttggtgatttgtagtttgttagcgttgtaggttttggcgggggtcggggggataggataaagtgttttattttgtgttttgtaagtattttttaaagggttttttgttttttttttatgttttgggcggcgagtgggtagttattgttagggttttagaaaaatttatgtggagtttttattaggtagtgaggtttttttttgggtagaggtgttttagagttgttttggttttatttgttttttttttttttagggcggttgagggatagtaggtttttttagtatttggttgttggggttagtaattggtttgggttgttttttagttgtgagttagggttggttattgttgtttattggggtgtttggtttttcgtttaggaggtttgtgttttgttatgggtttgttaggtttgaggagtttttagaagtaaggtaggtttagtgcgtttttttagttaagttttaaatttcggtttattaaaaggaggatattttttttgtttttgtttttaagtggtagaatgggggtagggtttggggtttggttattttttttgattttggttttattttattgttttttttataagtttggtttttttggtgggtttattgggtggttaattagttttttgaagttttggaagcggtaaagtggcgttatgtgggttttagaaataaaattaataaatgatttaattatagtttagttatttttttcgttttttttttttaggttagttttatttttgtgttttttttttttttgttttttgtcgttagtttttgttaaggttttggagaggaagtggttgattaaggtattagtttttaaggtgttagaggttttgaaatggaagagatagtaggaaggtttggttttttgaatcgtggtaagtatttgtttttggtagaattagagagagaaaggtttgtttatttgttttaagatatttggggtgggaaagtaagttatttattttattatattgtgatagggttgtgtttgttttattttttttttttacgtttatttttgttgttgtagtagtattgttttcgttttttaaggtttggtaaggtttggtaagaggaatgttagtggggaaaggttagttttagggttttgttattgaggtttagttaagggttttggagaaatttaggattggtttaaggaaggaggtcgggtttttagttagaaatttagatataaataatttcgagtgagtttaggttgtaaaagtgttttagggtttattaaatttgtatatataatattaaggaggggcggaggaagtagggaaatagatgagatcgtgttgtttaggtgtgattatgttgggttggggtatgtagtgttatttcgggataaagtttggaaatagtggggagtgatggtatgataaagacggaaagaagttatagaaaaggtagttggagaaagttaaaaattttttagtaaaaatgtttttgagagtaagcgttttgggtgtaagaggggagagtagttgggaaaggatggaatgaatttggttttttttgtttgtaagatgtggatggtttatggggatcgggtttttagtggtaggaatataaagttttgtaggaaataggggttaatgtaaagaaggtgtgtgtggttaaagtaggttgttacgattgggttgtgaggtgacggtatggttaataagttattgtttgtttggtagtggattgttaagaagttttagttttatttatagtaattttttaagggataagtgcgggttgtgaagaattttggatgttaggttaagttggagtttaagttgtgtttagtggaggatggggatgaggtttaggagttgaggttggggtgtaaattgtgaaaggggaagagattagatagttgttagtattgtttttttgtttgtttttgagatagagtttcgttgtgtcgtttaggttggtgtgtagtggcgtgatttcggtttattgtaatttttgtttttcgggtttaagtgatttttttgttttagtttttcgagtagttaggattataggtatgtgttattatgtttggttaatatttgtatttttagtagagacggggtttcgttatgttgattaggttggtttcgaatttttgattttaggtgatttatttatttcggttttaaagtgttaggattataggcgtgagttatcgcgttcggttagtattgttttttaatggtttatgaaatattttttaagagaaattggaaattaatagaaaaatgtaaggaaaagttgtttgtattttcgtgtttgtggaggtgtattttggtgtttttttttcgattttttttttttatttggaaatgtggtaggtattatagaagatagtgtgttcgtgttttttgggggtaggggtagagtagggtttgggagtttggagatttttgtaggatttgaagtttggtttatatattaagtcggtgattttagggttgggtttgttatggtttagaaagtgatcggaggtcgggcgttgtggtttatgtttgtaattttagtattttgggaggttaaggtgggcggattattttaggttaggagttttagattagtttggtttaatatggtgaaatttcgtttttattaaaaatataaaatttagttgggtatggtggtgggtgtttgtaattttagttatttaggaggttgaggtagaattgtttgagtttaggaggcggaggttgtagtgagttgagattatgttattgtattttagtttgggcgataagaatgaaattttattttaaaaaaaaaaaaaaaaaagtttttagaaatagtttggtttttttcgaattaggtttttaatagtattttgtagttgtttaggtttttgatttgtttttttggtttttagaatagaatatttagttttttttttttatcggtttattattcgggaggtttaaatagtttttgaattagtataaggttttggttttttttttttaaagaatagtaggattcgaagtttgtttttataagatgaggaggtagtagttgagaggtagggattttttttttttttattggagagtttaaatttggtgaaggaatttaaagtttagaaaggtaaagtaattagtttgaggttatatagtaagttagtgttggggttagaatatagtagtgaatgggaggatagttaaagtttttagggaagggtttaaagttgtggggttatgtatataaatggggtgaggttttcgaggtatagattaggtatttattttataggttaggttatagagttggtttataaaattttgtttagagtgtggttttaggtggtaggaagaagtgaaagaaggtttttaattattttttaagtagtggaattatagggagaatttattgttattaaattagtatgatgatggagtggggaatgttttagttttttttatcgtcgagggtttataggattatagtttttagggtttcgtgttgtaggttagcggtttttcgttaatgttggttagtaatttgagtatttttttttaaaaggttattttagggttttttgagggatagtaatagggggagtttagagttgtttagtttcggtgggggtggagtgagggttgtggttttgttttatataattttttttatattatttttgtaatgtagggtcgtgggttttttttttaaagatatttagtggtttttgttagttgtatttttttcgttaggggatattgatttggtttttgtattatagtttgtagggggttttggttttttttgttataatatatggttttttattttggtttagttattgatagatagttttttaatttagtattttgtttgtttttttttgtatttaattttttaaaaggtagggataagggatagaagattatgtgtaaggtttggaggaagtgggttagtataggtttgtgaataagttaggttagttttggcggtttaagtggagtttattttttttttttttttttttttttttttttgtttttaaaatagttttttgagttgttaggttaagatttttttattgtaggggaggcggggcgtgttgtttagagttaggttttaaatttttttgaggttggggagttttattttttggttggaggtagtgttgaggtcgtcgttttttttattattagtttagttcggttcgtttttttgtagttatgtttcggtttttgttagattaagagaaaagaaagtaaattagtgtgcgtggtttggtcggcgtggagaacgtgattgagttgaaaaagaattttaatcggtatttgtattttatattcgtaaaggatcgtaatgtggttattttacgagattattattttgttttggtttatatcgtgcgcgattatttcgtggggcgttggattcgtacgtagtagtattattatgagaaggattttaaggtgttgttggggagtttggggtgggggtatgggttgaaggcgttgttagggagttggcgattttgatttaagtggttgtttttcgttattttaggtttttgggggtggagaatttaggggtgttaggtataaggggtgttgggataatttgagggagaaatttggggtaggagtgggggttagggagtttagagtaggtgggttggttgtaaagggttagtgtttattcggagaaggttggagtgggtgttggtgggtaggacggcgtttgtggtttggttgggtttaggtggaaggatatattagttgttgtatgtatgcgcggtgtgtttgtgtagtaggcggggttggggtagttggggcggtagagattaagtgttcggtggggttattggtaaatgttagtaatttgatacgtttcggtggggagtgggggaggggcgggtagacggtttacgaggggatttaggaaattgggagattaggtattggtagtattttagtttttggtgtttttgggtttttttgggattgaggtttgagggttaaggggaattggatagtgtaaggatgggaggtgatagtttttagtttagtttttagttattgtgtgattttgagtaaatgatttttttttttgggttttggttttgtttttttggggagtttttggaggcgtttttatatgttttggtattttgttgggttgtgcgggggggtgtgtgtagggggaaggggtgtttattttttcgagtattttagtttttgaagtgggtatggttagcgttattttttagatgaggagattgaggttaaagagagtgatttgtttaaagttagaggaatgttgggattagaattttaatcgttgggttttaaagtttgagatagggagaaataaattggggatagggatgggattgttgagtagggtaggcgggttagaggtttaggcgtggttgggtttggttgagtgttggtgtgtggttttgattttattttttgtttattcgtttttttgggtaga

SEQ ID NO: 1556 - DNA, 7087 bp, Artificial Sequence
  chemically treated genomic DNA (Homo sapiens)
tttgtttagagagacggatgggtagggaatggggttagggttatatattaatatttagttaggtttagttacgtttggatttttggttcgtttgttttgtttagtagttttatttttgtttttaatttgtttttttttgttttaggttttggggtttagcggttaaggttttggttttagtatttttttgattttggataaattattttttttggttttagtttttttatttgggaaatagcgttggttatatttattttagggattgaggtattcgggagaatgggtattttttttttttgtatatattttttcgtatagtttagtaggatgttaggatatgtggaagcgtttttaagagttttttaggagggtaaggttaaggtttagagaaaaaagttatttgtttaaggttatatagtggttagagattgggttagagattgttattttttatttttgtattgtttagttttttttggtttttaagttttaattttaaggagatttagaggtattagaaattaggatgttgttagtgtttggttttttagttttttgggttttttcgtgggtcgtttgttcgttttttttttattttttatcgaggcgtgttaggttgttgatatttattagtgattttatcggatatttgatttttgtcgttttagttgttttagtttcgtttgttgtataggtatatcgcgtatatatgtagtaattgatgtgtttttttatttgggtttagttaggttataggcgtcgttttgtttattagtatttattttaatttttttcgagtgggtattgattttttgtagttagtttatttgttttgagttttttgatttttatttttgttttaggttttttttttagattgttttagtattttttgtgtttggtatttttggattttttatttttaagaatttagagtgacgaggggtagttatttaagttaagatcgttagttttttggtagcgtttttagtttatatttttattttaggttttttagtagtattttggggttttttttatagtagtgttgttgcgtgcggatttagcgttttacgaggtggtcgcgtacggtatgggttagagtaaagtagtagtttcgtggggtggttatattgcggttttttacgagtgtgaaatgtaggtgtcggttgaagtttttttttagtttagttacgttttttacgtcggttaggttacgtatattgatttgttttttttttttttggtttgataggggtcgggatatggttgtaggagggcgggtcggattggattgatggtagaggggacggcggttttagtattgtttttagttaaggagtggagttttttagttttaaggggatttaaagtttggttttgggtagtacgtttcgttttttttgtaatgggagggttttggtttggtagtttagggagttattttgagggtaaggggaggagaggagaggggagggagaggtgagttttatttgggtcgttaagattggtttggtttgtttataggtttgtgttgatttattttttttaggttttgtatatggttttttgttttttgtttttgttttttggagggttggatataagaaggagtaggtagagtgttggattggggagttgtttgttagtggttgaattaggatgggaggttatgtgttgtggtaaaaggaattaggattttttgtaggttgtggtgtaggagttaagttagtgttttttgacggaagaggtgtaattagtagaggttattggatgtttttgagaaaggggtttacgattttgtattgtaggggtggtgtgagggaggttgtgtgaggtagggttatagtttttattttatttttatcgaagttgagtagttttaggttttttttgttgttgttttttaaggagttttgaagtgattttttggagagggatgtttaggttattggttagtattggcgggaggtcgttagtttgtagtacggggttttgggaattgtagttttataggttttcggcggtgggagaaattgaggtattttttattttattattatattggtttaatgatagtaagttttttttgtgattttattgtttaggaagtgattagaggtttttttttatttttttttgttatttggggttatattttgagtaggattttgtaaattagttttgtgatttggtttataaaatgggtgtttaatttgtatttcgaggattttattttatttgtgtgtatagttttatagttttgagtttttttttggaggttttggttatttttttatttattgttgtgttttggttttagtattgatttgttgtgtgattttaagttggttgttttatttttttgagttttggatttttttattaaatttagattttttaatgagaaaaaaaaaaatttttgttttttagttgttgtttttttattttgtgagggtaggtttcggattttgttgttttttaagagaaaggaattaggattttgtgttagtttaaaggttgtttgggtttttcgggtggtgggtcggtggaggggaagagttgggtgttttgttttgaaggttaaggaagtaggttaaaagtttggatagttgtaggatattattgagagtttggttcggagaaagttaagttgtttttgagaatttttttttttttttttttgaggtagagttttatttttgtcgtttaggttagagtgtaatggtatgattttagtttattgtaattttcgttttttgggtttaagtaattttgttttagttttttgagtagttgggattataggtatttattattatgtttagttaagttttgtatttttagtagagacggggttttattatgttggattaggttggtttggaatttttgatttgaggtgattcgtttattttggttttttaaaatgttgggattataggtatgagttatagcgttcggttttcgattattttttgagttatggtagatttagttttggaattatcggtttagtatgtgggttaaattttaagttttatagaggtttttaggtttttaagttttgttttatttttgtttttaaaaggtacgggtatattgttttttgtggtgtttgttatatttttaagtagagaaaaaagatcgggaaaaaaatattaaaatatatttttatagatacggggatgtaaataatttttttttatatttttttgttaatttttaattttttttaagaagtgttttataaattattaaaaaataatgttggtcgggcgcggtggtttacgtttgtaattttagtattttgaggtcgaggtgggtggattatttgaggttaggagttcgagattagtttgattaatatggcgaaatttcgtttttattaaaaatataaatattagttaagtatggtggtatatgtttgtaattttagttattcgggaggttgaggtaggagaattatttgagttcgggaggtagaggttgtagtgagtcgagattacgttattgtatattagtttgggcgatatagcgagattttgttttaaaaataaataaaaaaataatgttggtagttgtttggttttttttttttttatagtttgtattttagttttagtttttgggttttatttttattttttattaagtatagtttggattttagtttggtttggtatttaaggttttttatagttcgtatttgttttttggagggttgttgtgagtagagttgagattttttggtagtttattgttaggtaggtagtagtttgttaattatgtcgttattttatagtttaatcgtggtagtttgttttggttatatatattttttttgtattgatttttattttttgtaagattttatgtttttgttattgaggattcgatttttatagattatttatattttataggtagggaaggttaagtttattttatttttttttagttattttttttttttgtatttagggcgtttgtttttaggaatatttttattgggaaatttttaattttttttaattattttttttgtggttttttttcgtttttgttatgttattattttttattgtttttaggttttgtttcggggtgatattgtatgttttagtttagtatgattatatttgggtagtacgattttatttgtttttttgtttttttcgtttttttttggtgttgtgtatgtaggtttaatgaattttgaagtatttttataatttgaatttattcgaggttatttatgtttaagtttttaattagaaattcggtttttttttttggattaattttgggtttttttagagtttttagttgaattttagtaatagagttttgaggttgatttttttttattggtattttttttgttaggttttgttaggttttgagggacggggatagtgttgttatagtagtagaaatgaacgtgaggagagggggtggggtaagtatagttttgttataatgtgatggagtaaatggtttgtttttttattttaggtgttttaagataggtgggtaggtttttttttttttgattttgttagaggtaagtgtttgttacggtttagagggttaagtttttttgttgttttttttattttagggtttttagtattttggagattgatgttttagttagttattttttttttaaaattttaataaaagttgacggtagggagtagaaagggagggagtataggaatggagttggtttgggggagagaagcggaggagatagttaagttgtggttaagttatttattgattttatttttaaaatttatatagcgttattttgtcgtttttagagttttaaagagttaattaattatttaatgagtttattagggaaattaagtttgtgggagaagtaatgaggtgaagttaaggttaaagagggtagttaggttttaggttttgtttttattttgttatttaaggataaaggtaaaaaagatgttttttttttggtgagtcgaagtttagggtttggttggggaaacgtattgagtttgttttgtttttgagggttttttaagtttggtagatttatagtaaagtataggttttttggacgggggattagatattttagtaaatagtagtagttagttttagtttatagttggaaagtagtttaggttagttgttggttttagtagttagatgttgggggagtttattgttttttagtcgttttgaaggaaggagaggtaggtggaattagggtagttttaaggtatttttgtttaggagaggattttattatttggtggagattttatatggatttttttggaattttaatagtaattatttattcgtcgtttaagatatggaaaaaaagtagaagattttttgaaaagtgtttgtaaagtataagatggggtattttattttgttttttcgattttcgttaaagtttatagcgttggtaggttgtaagttattagtagagaaggaaaaaagttatttggcggttttaattttagttgttttgtgtttgataggtaggattagttggtttgatttttagtgttgatgtttttttaggtttagggttttaggtggtagtttttaggtataaattattattggagtttattaaacgtggacgtttgagttttaggaaaaagtttttaaaggatagagattagaaaaatgagtagtgaataaggaggggtaaaattggtttttagcgatgttaattagttattaaaggggagattgtggagttatttatatattgagtttttattattaaagttatatataggaggtaggtggtgggtttttttaattaattatttatagttttattttttcggatttggtgttgaacgaaagttaaggtatttttggtgttgttgttgttgttggtggtagaggaagtttatgtgaaaagaaaaatcgggcggggtaggtattaaaaagaaaataaagaagtagatttagaaaattatattgtttttttatttaatggaatattttcgttttagcgtagtgttgaatttaatatcgaaaaaagtttagagaaatttttgtagataaattagtgaagagaacgcgtagtatatattattgttaatagaattattttatggagagggaagcgggaggaaaaaggaaggagaatgaataaggggtttaaatttttatatattgtaaaatatttagatatttgggattaaaataaaatataaaaggaagttttttaggaaggagaggattaaatggaatttgaggtagtttaggtgattaaggagtataggaagaattttaggttggtaggcgagttcgagggagtttaggttgtttatttattgttggtaggatcgttaggacggatgggaatttcgaaatttggagatgaatttattttcggtaattttataagatttttttgataagggtggtagagattaaaaaattttacgttttaaataaatatatttgggggtggttatggtattttgaaaaatttataattagtttgatatgaatggttaaagtttttgtttaaaattatttgtttttttttttttggtaagggaaggagaattggagagaagggaaaggaatttaaattgtagtagaagatcggggagagtatttttttggacggagtttgaagaaaggaaaagataaagaagtaataaaggaaaaagaaaaaaattaataaaaattttacgatatggagttagcgtgtttcgatttcgtttataaaaataatttaggttgttttgtcgaattattttgtttattaggggcgttgttgaggttgtttgtttggaagggttattaatgggcgcggaaagtttttatttttatggttcgggttatcgtcgtcgcggggagggattttggcggttcggtttggggagaggtaaagggagttgggtgaggagagaaagaagataaagaagatattcgatgttacggggcgttaggagagtttaagttggcgtttttattattatttgttcgtttttaagcgaatttttagtcgtttggtttagtttagtgcgtgtatatatatatatgcgtgtatatataatta

SEQ ID NO: 1557 - DNA, 7491 bp, Artificial Sequence
  chemically treated genomic DNA (Homo sapiens)
gttatttataaattttggttcgggagatgtaggttgtagtgagttatgattgtattttagtttgggtaatagagtgagattttgttttaaaaaaggaaaaacgaaataaatatgagtaggtttttatatattttggatagaatttagggtgtggcgatatattgattgtttttagtttttgtgtgatatgtatttaatgttattatttgtatgaattggataaataatattttaatatatttatatattggaatatttattagaaaaataattaaattggaattttaagttgaatattttttagtatattgttgggtgggattgtgttttttaaattcgaaggtttgtggtgaggaggagggagttgattgattttgagtggttttagaataagaggtagtatttttatgaggataatttaagggaaggatttgggttgaaaatgaggaagggttttttaataggttaggttagttaggagtgaaagagattgttttttaagggaatgagttttttgttattgaaggtatgtaagtagggattgggtagttgtattatgggtagtgagttaagtattgtttattaatggtataagggtgggttgaatatagatggttttaggttttttttaagtatgtttagaggtttcgtggttttgtgatttagtgagtttgtaaagtgtagttaaaagaggatgggattaaatgaataattaaatgtgatatatttttgcggtgggatattatttattaataaaagggatagatatattatgatatatgtaataataagatgaatttcgaaaatatgttgtgtgaaagggttttggatgagatgttatatcgtgtgatgtcgtttatgtgaaattttagaaaacgtaaagtaatttatagaggtaaaaagtagatcggagtttgtgtgtgtgagttgggcggtggttgggggcgtggggagggagaaatagggagaggtgggttgtaggggggtgtaaggaagttttttaaagtgatggaagtgttttgtgatgttttgtattttgggaggttttatgggtgtatatatttgttaaaatgaatggaattatatgttttaaatggattatttattgtatttaaattatatttttatatagatatttttttttttttgagacggagtttcgttcggtcgttaggttggagtgtagtggtgcgattttagtttattgtaatttttgtttttcgggtttaagttatttttttgttttagttttttgagtagttgggattataggtgtacgttattatgtttagttaatttttgtatttttagtagagatagggttttattacgttgattagaacggtttttattttttgatcgcgtgatttgttcgtttcggtttcgaaagtgtatatggatatttttaaaaaaagaattaaaaggcgaggagggttggagtagaggttagtgtcgttgtattatggatttggttacgtagatttgggtttgattgttgtcgtttaagtggttttatttttttatttggttattttgttaattttggtttgtttatataattttaggattatttgtagatgggggatatttttagagagtggttttagggtttttgtgttattttcggtgtgggttagagtgttttagggatagttttttgtttttttatgttttgtatttattatagtattaagtttagagttgggtatttaggtggtgtattattgatgtatgtagaatgaaggagagaattaatggtttaagttaaggagaatttttgtttgggttgttttggagaagtggtttttttgggagggagggtagttgtaattttaggatcgttatggttatgtatagttgagtgggttgtgtattgtaaaaaaaaaaaaaaaaaaaaaaaaaaggtcgggcgcggtggtttatgtttgtaattttagtattttgggaggttaaggcgggtggattacgaggttaggagattaagattattttggttaatatggtgaaattttgtttttattaaaaatataaaaaaattagttgggtgcggtggtacgcgtttgtagttttagttattcgggaggttgaggtaggagaattgtttgaattcgggaggcggaggttgtagtgagtcgagattacgttattgtattttagatcggcgatagagcgagattttgttttaaaataaataaataaataaataaataaaataaaataaaaaataataatttttgttttagtaggtgaacgaaggataaaatttagtatttatattgttttttaagttaggtggttgtatttattggttgtgtatttttaaagaagcgtattatttttttttttttttttttttaaataaaaaaatgttttattttggaagaattttagatgtataggaaaggtgtaaagatagtaggagtgtttatatatatttttatttagtttttttttatgttaatattatttgtgtaattacggtatatttgttaaaattaagaaattattatttttaataatattattaaaaattttagatttgatttggattttattattttttttattgatgtttttatttttattttattttattttattttatttttttgagacggagttttatttttgttgtttaggttggagtgtaatggtgcgatttcggtttattgtaatttttgtttttcgggtttaagtaattttttgttttagtattttgagtagttgggattataggtgttcgttattacgtttcgttaattttttgtatttttagtagtgacggggttttattatattggttaggttggttttaaatttttgattttaggcgatttattagtttcggttttttaaagtgttggtattataggcgtgagttattatattcggtttgatgtttttttttttttaaagttaatttaatcgtttaaattgttttaagaagttgtatttatagatgaaatatttgtttttttttttttttttaagaattagaaatgaatttttttaaaaaatgtattaaaaatttttaatttgtaattgatatataataatcgtatatatttatggggtataatgtgatgttttaatgtatgtatatatcgtataatgattaattaaatttaggtaatttttatatttattatttttaatatttattatttttttgttgcgatatttgaaatttttttttttagttgttttgaaatatgtacgagattgagatttgttgtagttattttattgtgtaataggatattagaatttattttttttgttttattgaagttttataaatgttttttttttgttttaggttttaatttggggtatcgtattgtatttaatatattattattattatttaaattaatatagaggttgtttcgtggattagtagtggatggaaaaagaaaggggtatagagaagtatttagaataaagtttttaggtggtttgtgagggaggaagttttagggtggttacggggtatatttggtttttttgatttatagttttagtatagcgtatgtaaagtgtagaggaaagatatcggtttgttggtagttttaatagttgatttgtttagcgtttgaggaagttgtatttttttttttgtaaaagttaatgttgtgaatttagtaatttgtgtgaattgttttgaaaaggtttagttttcgggtgtttggtgggaattttgcgttttgttagttagtaggttttggttttttgtatttttttttggagtttttggtttgtttcgagtgacgagtttagggtgggtgattagtggtttttttttttttcgttttttcgtttttttttttcggagttggaaaggtgtgtgggtggggagtgatagtaatgaatagtgaatttggtgttaattggggtggtcgaatatttattcgagtttacgtggagagttttcgtggcgaagggagcgttttgtaagttgtagaatttaggttttgtttttttaaatagtagtcggagttaatagttgtagtttggagaagagtttggagttatttgagtttagggttggttttaggttaggtggttaaatgattttttagatttttagttttcgtattagggaaatgggttatagttttagttttagggtgtttggttttttagggcggttttagaataggtttggtttttgtggggtattgttcgttatttttttttaatgtgtttttttttattagcggattttattttttttttttgttttatcgttttatatttttttatttagggatttttatataggtttttgtttgggggagtttttgggttttggtttaagtaatttttttttatttggagttttttttttagggcgtacgttttaagagttagttttaatgttagtttgtaggtttttagttttttatttcggtaattttgaggttttttttgtagattttttcgttgttttaattattttttgtttttgttatgattttttatgatgaagttatgtttttttttttgtaaagggtataaattttagggattagttgttttttgtattttgggattattagtatttggtattgtgtttggtatatagtaggtatttattaaatgttttgtttagaattgaagtgtattgaatttttggaatttttaagtttttggagaatagtttttgggttcgtttcgtggataggaagtgagttttttagtatagagggtttttaggttttttgttggagtttttacgtagggggtttgtggggatggttagggtttagtttagtatttgagcgttttttttattagttgttttgttagatcgtatgtttcgttttttgtaaacgatcgtggggagagtagtttgagtaagtttttttttcgtttttttttgttttattatcgttgttttttagtaggcgttttattagtttttatattttttgcgttcgtagaaacgcgtttggttttgagttgttattatcgatattttttaggtttcggatacgatgtaggttattaagtgtgtggtggtgggagatgggtaggtatttggttggatttttttatagtttttaattgggatgttttgagattttttcgttttggtgtttttggggaagtttttggttttgtagaattaggcgtttttggaaggtagtttggaggggacgttttttttttcgagggtttatagggagtattcgggggtgggttgaggggagttttattttttttagttttattttattttagaagttatttcggtggagggtgtaggattatgggtgagagtgtttagggttttttatttgtattttaaaagttgggggtaggttttttacggaggtaagttttagtttttattttgtggatgtaggagggaagtgggaaatttgaaatttagtttttgtttttaggttgatttgggttgtcgttattggtttggtgtcgttgtgtggttttgggtaagttatagtatttttttgaattttagtttatttatttgggaggaggtttatgttttggggatgttgtggggtcgtttgagataagttgagtggttgttttgtttgtagtatgtgttttttagtattttttttatttttttttttttttttttagtttatcgggttggggaggatgtgtgggggatgtgggtgaggagtagaagaggtaaggggatattgagagatagagagggaaggaggaggttaaaggatgggagggtgattgtggggtcggtaggggaggggtaggttgggttgagattttttttagttgttagattttagtgattttaggttgttttgttttttgggggttttagtttttttatttgtaaaatgataggtttaggttaggtgtagtggtttatgtttgtagttttagtattttgagaggttaagatgggaggattgtttgaggttaggagtttgagattagtttaagtattatagcgagaatttatgtttataaaaaaatttttttaagttaggagtggtggtatatgcgtttgtagttttagttattggggaggttgaggtgggagaatcgtttgagttcgggagtttgaggttgtagtgagttataatggtgttattgtagttagtttgggtgatagagtaagacgttgttttttaaaaaaatataaaataaaaggataggtttaatttgttaatttgttatgtttgttagtagttatattttagggtttagtttataggtttattttggagtatgttttagttggaagggggttttttgtttagtttttttattttatagaggagtagtttaaggttttgagagatttagtttttttggtttgggttttgtggtttcgattttggttgtgatttatttaggtgggggcgggtttatttgtttattagttttagttgattttgatgtatggttttttatttgttttcgtttgttttagttttgtttatttttgttttgtatttgatcggaggaggggcgggcggaagttaagggttaacgttttagttatttaaaattatttcggtggtaggtttaggggagggcgatggtaggaggagaggatgagttgttttttttgagtaggaagtgataaaattacgtagggtaggggaaggtttagagttgttttttggtttttgggtttcggttgagttatttgtattcgtttttagtttcgtatgttgagggtggaggaggcgcgcgttattattttttttttatgtattagttttggggttaatttagttttttttatttatttttttattaaatttaataggtttattttataggtgggaaaatgaaagtttagggaagttaagtaatttgtttaaagttttataggatttgaatttagattattttgatttaaattttgatttggtaattgttttgttttacgggggaggtgagagggaagagtagggttaggttttttttagtagttatcggttgttgttatgtattaggttttgtgtttagtgttttgataggtttcgttggatttattttttagtatatttttatgaggatgggtttatttttattttttagatggagaaattgaggtagaggtaggttaagtgatttgtttaagattatattattggtaggtggtatagttgggatttgaagtttaggttaggcgtcgggggtttttcggtattgtttgggtttgttgggtattttttgttttatattattggtttttggagaagtttgtgggaaaagcggattgttagttttgcgtatatttgtggattagaatttttggggttggattttgaagtttttattttaataaatatttatatgatttgtaggttttcgggtgtgagaatatagatagggggtattttatatggggagacggaggtttagagggttaggttgggtggatgttgaggtttttgtagaggattaggtagaaatttttttacgttttcggtagagtttatgatcgtcgtttttttgtattttttgttttttagg

SEQ ID NO: 1558 - DNA, 7491 bp, Artificial Sequence
  chemically treated genomic DNA (Homo sapiens)
tttgaaagataggaagtgtaagagggcggcggttatgggttttgtcggagacgtggggaggtttttgtttggttttttgtaaagattttagtatttatttagtttagttttttgggttttcgtttttttatgtgagatgttttttgtttgtgtttttatattcgagagtttgtaagttatgtggatgtttgttaaagtggagattttagggtttagttttagagattttgatttataggtgtgcgtagagttggtaattcgttttttttataggtttttttaggggttagtgatgtgggatagagggtgtttagtagatttaggtaatgtcgaggggttttcgacgtttgatttgggttttaaattttagttgtattatttattagtggtatgattttggataagttatttaatttgtttttgttttagtttttttatttagaaaatagagatgagtttatttttataggagtgtgttgaggagtaaatttaacgaggtttattaaagtattgagtatagggtttgatgtatggtagtagtcgatggttgttagggaagatttgattttgttttttttttttatttttttcgtggagtagagtagttattaggttagggtttgagttagagtggtttgggtttaaattttgtgaggttttgggtaaattatttagtttttttgaatttttatttttttatttgtaaaatggatttattaggtttggtgagaggataaatagagaaggttagattaattttagagttggtatataggaaggaagtgataacgcgcgttttttttatttttagtatgcgaggttgggagcgggtgtaggtagtttagtcgaagtttagaggttaagggatagttttgggtttttttttgttttgcgtggttttgttattttttgtttagagaagatagtttattttttttttttattatcgtttttttttgggtttgttatcgaggtaattttgaatgattggaacgttaatttttgattttcgttcgtttttttttcgattagatataaagtagaagtgaatagggttggggtaggcgagggtagataaggagttatgtattagaattagttgaggttggtggataaatgggttcgtttttatttagatgggttatagttaaagtcggggttatagggtttaggttaggagagttgagttttttaaagttttgggttgtttttttgtagaatgggaaggttggataggaggtttttttttagttagaatatgttttagggtgagtttgtaggttggattttaagatgtggttgttggtaggtatgatagattgataaattggatttgtttttttattttgtgtttttttaagagatagcgttttgttttgttatttaggttgattgtagtggtattattatagtttattgtagttttaaattttcgggtttaggcgatttttttattttagtttttttagtagttgggattgtaggcgtatatgttattatttttggtttaaaaaaatttttttatagatataggttttcgttatgatgtttaggttggttttaagtttttggttttaagtaatttttttattttggttttttaaaatgttaggattataggtatgagttattgtatttggtttggatttgttattttatagatgaggaaattgaggtttttaggggataagatagtttgaagttattgggatttgataattgagaagggttttagtttagtttgttttttttttgtcgattttataattatttttttattttttagttttttttttttttttttgttttttaatgtttttttgttttttttgttttttatttatattttttatatattttttttaattcggtaggttgaggggaggggagagaaagtggagggggtgttagaaggtatatattataagtaagatagttatttagtttattttaagcgattttatagtatttttagggtataggtttttttttagatgaataagttgaggtttagagaggtgttgtgatttgtttaaggttatatagcggtattaagttagtgacgatagtttaggttagtttggggataaaggttgaattttaggttttttattttttttttgtatttatagagtaaagattgaggtttgttttcgtgggagatttgtttttagtttttggggtgtaggtgaggagttttgggtatttttatttatagttttgtattttttatcgagatggtttttggggtggggtggggttgaagagggtgaagttttttttagtttattttcgggtgttttttgtgggttttcggagaaggaagcgttttttttaagttgttttttagggacgtttagttttgtagggttaggggtttttttaggggtattagggcggaaggattttagggtattttagttgggggttgtgaggaagtttagttaggtatttatttattttttattattatatatttgatggtttgtatcgtgttcggagtttggagagtgtcggtggtgatagtttagggttaggcgcgtttttgcgggcgtaaggggtgtggaggttggtgaggcgtttgttgaggagtagcggtggtggggtaggaggaaacggaaggggaatttatttaagttgttttttttacggtcgtttgtagggggcggagtatgcggtttggtagagtagttggtgggaggggcgtttaggtgttgggttgagttttggttatttttataggttttttgcgtggaggttttagtaggagatttgggggttttttgtgttgggaggtttattttttgtttacggggcgggtttagaggttgttttttaagaatttgagggttttaagaatttagtgtattttaattttaagtagagtatttaatgagtgtttgttgtgtgttaggtatagtattaggtgttggtgattttaggatgtaagagatagttggtttttggagtttatattttttgtagagagggaggtatgattttattatgggagattataatagagataggaagtgattgaggtaacgggggaatttatagagaggattttagggttatcgagatggagagttgggggtttgtaagttagtattggagttggtttttgaaacgtgcgttttaaagagggaattttaggtggggggagattgtttgagttaggatttagaggtttttttaggtaagggtttgtgtgggagtttttgggtgggaggatgtggggcgatgaggtaggaagggaaggtggggttcgttgatggagaagggtatattgaggggaagtggcgggtagtgttttataggagttaagtttattttgaggtcgttttgggggattaggtattttggagttagaattgtggtttatttttttgatgcgaaaattgagggtttgagaagttatttgattatttagtttgaaattagttttaggtttaggtgattttaagtttttttttaagttgtagttattggtttcggttgttgtttgaagggataaaatttgagttttgtagtttgtagggcgtttttttcgttacgagggttttttacgtggattcgggtgaatattcgattattttagttggtattaagtttattgtttattgttattattttttatttatatatttttttagtttcggggggaagggacggaggggcggggagaggaagagttattggttatttattttggattcgttattcgggataagttaggaattttaaaggagggtgtagagggttagggtttgttggttggtagagcgtaggatttttattaggtattcggaggttgaatttttttagagtaatttatataagttattgggtttataatattgatttttatagaaagggaaatgtaatttttttaagcgttgggtaagttaattgttaaagttattagtaaatcggtgttttttttttgtattttgtatacgttgtgttgagattgtgggttagagaggttaggtgtgtttcgtgattattttggggtttttttttttataggttatttgaggattttgttttggatatttttttatgtttttttttttttttatttattgttagtttacggggtaatttttgtgttaatttaaataataataataatgtattaaatgtagtgcggtattttagattagaatttggaatagaaaaagaatatttgtggagttttagtaagatagaaagagtaagttttggtgttttgttatatagtagggtgattatagtaaattttaatttcgtgtatattttaagatagttggaagggaaggttttaaatgtcgtaataaagaaatgataaatattaaaagtgatggatgtgggaattatttggatttgattgattattatacggtgtatatatgtattggaatattatattgtattttataaatatgtacgattattatgtgttaattataaattaaaaatttttaatatattttttaaaagaatttatttttagtttttgaagggggaaaaagaaataagtgttttatttataaatgtagttttttgaagtaatttaaacgattaaattagttttaaaaaaaaaagaatattaggtcgggtgtggtggtttacgtttgtaatattagtattttgggaggtcgaggttggtggatcgtttgaggttaggagtttgagattagtttggttaatatggtgaaatttcgttattattagaaatataaaaaattaacgaggcgtggtggcgggtatttgtaattttagttatttaagatgttgaggtagagaattgtttgaattcgggaggtagaggttgtagtgagtcgagatcgtattattgtattttagtttgggtaataagagtgaaatttcgttttaaaaaaataaaataaaataaaataaaataaaaataagaatattagtggaaaaagtagtaaaatttaaattaagtttgaaatttttgatagtattgttaagaatagtaattttttagttttgataaatatatcgtggttatataaatgatgttagtatagagagaaattgggtgaaaatgtatgtgaatatttttgttatttttgtattttttttgtatatttaaaatttttttagaataaaatatttttttgtttaaaaaagggaagagaaaagaataatgcgtttttttaggaatgtatagttaatgggtgtagttatttgatttggaaagtagtgtagatattgagttttatttttcgtttatttattagagtagagattgttgttttttgttttgttttgtttgtttgtttgtttgtttgttttgagatagagtttcgttttgtcgtcggtttggagtgtagtggcgtgatttcggtttattgtaattttcgtttttcgagtttaagtaatttttttgttttaatttttcgagtagttgggattataggcgcgtgttatcgtatttagttaatttttttgtatttttagtagagatagagttttattatgttggttagaatggttttgattttttgatttcgtgatttattcgttttggttttttaaagtgttgggattataggtatgagttatcgcgttcggttttttttttttttttttttttttttttgtagtatataatttatttaattgtatatggttatgacggttttaaaattgtaattgtttttttttttaagaaagttatttttttagggtagtttaagtaaaaattttttttagtttaagttattgatttttttttttattttgtatgtattaatgatatattatttgaatatttagttttgggtttggtattgtagtgaatataaaatatggaagaatagaaagttatttttgaagtattttaatttatatcgagaatgatataggagttttggaattattttttgggaatgttttttatttgtaggtggttttgggattgtgtggataggttagggttggtaggatggttagatggaggagtgaagttatttggacgatagtagttaggtttaagtttacgtgattaagtttatgatgtagcggtattgatttttgttttagtttttttcgttttttagttttttttttaaaagtatttatatgtattttcggagtcgaggcgggtagattacgcggttaagagatggagatcgttttggttaacgtggtgaaattttgtttttattaaaaatataaaaattagttgggtatggtggcgtatatttatagttttagttatttaggaggttgaggtaggagaatggtttgaattcgggaggtagaggttgtagtgagttgagatcgtattattgtattttagtttggcgatcgagcgagatttcgttttaaaaaaaaaaaagtatttatgtggaagtataatttgaatataataagtgatttatttaaagtatataattttatttattttgatagatatatgtatttatggaattttttaagatatagaatattatagaatatttttattattttgaaaagtttttttgtatttttttgtagtttatttttttttgtttttttttttttacgtttttagttatcgtttagtttatatatataagtttcgatttgttttttgtttttgtagattattttgcgttttttaggattttatataaacggtattatacggtgtggtattttatttaaggtttttttatatagtatattttcgagatttattttgttgttatatgtgttatggtgtgtttgttttttttattagtgagtagtgttttatcgtagggatgtgttatatttggttatttatttagttttatttttttttgattatattttgtaaatttattgaattatagaattacgaggtttttgggtatgtttagaaggggtttaaggttatttgtatttaatttatttttgtgttattgatagataatgtttggtttattgtttatgatgtagttgtttagtttttgtttatatatttttaatgatagggagtttatttttttaaggggtagttttttttatttttggttagtttggtttgttagaaaatttttttttatttttagtttaaattttttttttggattgtttttatagaggtgttattttttgttttggggttatttagggttagttagtttttttttttttattataggttttcgaatttgggaggtatagttttatttagtagtgtgttgggaaatgtttaatttagagttttagtttagttatttttttggtaaatattttagtatatgaatgtattgaaatgttatttatttaatttatgtagataatgatattaaatatatattatataaaaattaaaaatagttaatatatcgttatattttaaattttgtttaaagtgtgtaaagatttatttatatttatttcgtttttttttttttgagatagggttttattttgttgtttaggttggagtgtaattatggtttattgtagtttatatttttcgggttaggatttgtaagtggt

SEQ ID NO: 1559 - DNA, 6227 bp, Artificial Sequence
  chemically treated genomic DNA (Homo sapiens)
tatttttacgttttttttttaatgtatttgatgatttattggtagtattttgtgatgatattatattagtggtaataagaatgtttttggattcgattaatgatggattaattagaatattttgaattgttgaggttgtaggaattgaagtttttatagttggagattgagaagtaggtatttgtattgtaaatttttgatttgtgagggatatgggagtttttattttagttgaaatagatatggtttgtggggttggtgtgtttagtgtgggagtatttggtttgttagtaattgaattaatatttaatcgcgggattgttatttttttcgtagaagttgatgtttttttttgtaaagattttagtttatagtttggagttgttaagtagtatttattaggtggtaatttaggatttgaatatggtttgattaatggtaaaggggtttgatttttttgttttgtaatatttaataaaaaattttttgggggaggagaggtaaaagattgattagcgcggtattggattgttaatcgtatattatttgtattaatagtagtttttttagtatggtttgaataaatttttgtattatttagaattgtggttatatatcggaaggtaaattttaatatttgatttataatttttggtttatattttgtaatttttatattttttaggatttgtgttattatttgtgtatttttcggtatgtttttgggagaagtcgttttgttagattttatgatattcgatgattagattttagattatttgaaaaaaatatgtatattagattaatttgaaatagttattttagtagtaattgttaggaatttaaaaaaattttaaatttatgttaaattgtaaaaaaatttttaaaatttaaattatatgtttttttaattttaatgaggtaatttaaggtcgttttaatttattgagtttttattatgtataaattattgtcgattataaaaagatgaagatataaataagggagcgatgaaagattaggggaaaatagggtaaaataaataaaaataatgattattttagaatatatgtagttgtatgtaaattttatattaatttaagatattatagtatagttaggttttatatttgagtttaaaatagtttttttttagtgagattaatatatttattgtgtttatatatatgtttagtagtattaaatttttgtttgtttaatttaaaaatattttttttatttatattttatttattcgaaatttagtttttttataggagtttttttaattatttataagaattgttagttattttgaaggcggaagggaaaatggttaaaataattaggatatagtattagatatttaatatttttgtggattttttaatagagtatatattttttaatggtaatttttgttttttgtattttatgataatatttagtattaatattttatttattagattttaaaaaaaaaataaaataaatttaatattaaagtgttttttattttttcgagttaaattatttatattaatgtattttagttttgattttgacgtaagttttttgtttagtgtggtttttttaatttttggtgtatttgtaagataagttatagaaaaatattgtttgtgaaatattatttattatattgcggtttattttttgtttttttttttatttttgagatagagttttatttggtttttgtttttaaaagtttttgacgattgaaatgaaaaattttttaattagtaattatatgtaaaattttttttttgagatagagttttatttttgtcgtttaggttggagtgtagtggtataattttggtttattgtaatttttattttttaggtttaagcgatttttttgttttagtttttttagtagttggaattataggtgtttattattatatttagttaatttttgtatttttagtagagatcgggttttattatattggttaggttggttttaaatttttaattttaggtgatttgttagtttcggttttattttaattgttatttgtttaatttataaagatttaaaaattgtttatggttacgtgtggtggttcgcgcgtgtaattttagtaatttgggaggagaaggcgggaggatcgtttaagcgtaggagttcgagattagtttggttaatataatgagattttgttttaaataaaaataaaaataagaataaaaataaaattgtttatgttaaaattaagtagtttgaaaattatttttattgattttttgcgtttttttttagagataattattgtaaattagtttttttttttaaagaaattttatttatgtttgtatgtaaatgtatatatatgtatatattttttgttatataaatataatatatatttttttttatataaatgataatattatatatattgttttttattttttttttttgatatttattaaaattatattttaagattattaaatttataatttttagttatttagatttaatatttttgaaattaaatttaagtataaagataatagggataatttagtttttatatttaggagaataacggttattttaagtttattataatatattaagtttgaattttggatttaatatgtttttaataaaatgtttattttaaagttttgataatgatttaataattagggtattatgtttgatttatgtaaaaagatgtaaaatttttcgtttaaggaatttaaaattttaaacgttatttgtggggtggttaatttgtattttttagaaatagatatgttttgtgcgttgttaataattttatttttgggtgaatgatgtaattttattgtttttataaagagttttaatttttttgtattttgtaataaaatttatatgtattagatttttttacgaatggtttataatttgataaatatttttaggattaaacggttagtaaaaatattcgttaaagtcgttatgtagtattttaattttttttattgataatacgtattttgagtatggttttaaagatttatttttacgcgagaaacgattcgaaatgttttatatgttttttttttaaggggcggggggattttttgatgtaatttaataaaagtatatagtaatttcgttacgttataaatatttgaattcgtttatcgaaatttaatttgaggcgtttattagaagtaaagaaaaaataaaatacggtttacggaggtttaaggagtgaggtatttattattaatgattttatcgggaagtagatatggttttacgttatttcgttaaaaattttaaggttaattttgttaaagaattaataatttattttataaacgaaatattagatttagaaagattaagtaggttgttaagttggagagttggatttgtcgatttttttttattttttttcgttttttttcggagttttaggttaacggaattaacgtttcgcgttttttttttcgtttttcgtaacgttcgcgagggtcggttttcggggcgttgataatcgtttcgtggttttcggtcggtttttgaagagggtagtgaggggtttttatttgggcgttcgatgtttagagtattttgcgtttttagtttgttttagtttagtttttttcggtcgcgcgttttgatcggtgagtaggatgttcggaagtaatatggttttcgtcgcgacggtttcgggcgtttcgtttacgtgttttttgttttatagggaggagtcggaaggggcgggcggtagtaaaagtttacggttttaaaggtttcgaagtttatcgcggcgtttttagtttgtttcggcggtttagtcgcggtttattggttatttggttttcgatgatatattttcgtcgtaaagttggagggtgggtataattcgggtcggtatttcgggttaggtagtgcgttggatgtttaagttatatattttttcggtggttttcgtttttcgtttgcgtcgattagtttggaaggttttcgggaggtcgtattttcgagaggttcggcgttgagttcgggtagggttaggtggttgtttttttatttagggtagtttttggtcgttttcgtttttcgtttaaaaggggatgtagtttcgggaaagtaaggtcgtcgcggttgcggttatattatgtatatgttttagagacgcgagtttatttttgtttttaagtttttttgggttttcgtcgttttttttttcgattcgtttattttatttggggatgagaagattgagggtgtagagttttgttttgtagcggggatttgcgagtttaattcggtattttattgattataggattacgttggacgaatatttgagtttagtattttttgtttattgtgtggggtggtggtgggtcggttaggaatagttttgaaggtttatttttgatattttattttagtaatttcgtatttttagggatagttatttgttttttaaaggaggtaattgttaattttgtttttaagagtgaatagagatttgatcgtgataatagtttgtatttttttttgtttgtttgtttgtttttgttttgttttgagacggagttttatttttgtcgtttaggttggagtgtaattttcgttttttgggtttaagtgatttttttgttttagtttttagagtagttgggattataggcgtttattattacgttcggttaatttttgtatttttaatagagacggggttttattatgttttggttaggttggttttaaatttttgattttagatgattcgttcgtttcgtttttttacggtgttgggattataggtatgagttatcgcgttcggtttttggtttgtattttttatttcgagttataaattatatttatttaaataggtgttttttttttatttgtatattttttgaaacgttatagtttttaatcgtgaacgatttggggcggagggttgaataatgtgttttttagtgtgtcgaggtgtttataggttatgtgtgtttttaaattgtaaagtagtttagtatattttttaatgtataagtttgtagattttaaattttttttttggttaatttaaaatcgttgaatttattagtttgtataaatatttaagaatttgaaaatacggttgaaaaatagtgttattaagaaattttgtaataatatgtttaaatgaagataaaaattttatagtttaagatttaaatttttcgtttatagtaagtgaatttatggtattttatttttttgggaaatattggaaatgaagatttgtaattgtaatttgaaataaggaaaattttaatttttagtataaaaattgtttaaatagaattgtttgattttaatgataaaaggtaagtatatagtatgtgtggtttttttgtttttttttttttaatatattattgagtttatgtgaaaaatttttaatattataagtagattatttgatatagttatagttattaaaattattttagaattttgattttttgtattatttaaatttattgtttttttttattagtttttgagtttttattgtattgttgattatattagtatatatttattattataattgggtatttatagtttttttttatttgagggttttttttttttttttttaggtgaattatagtttaatgtattgtaagttttaaattacggatgggaattattatagtttataatgttaaaaattttttttagattaaaggtattttttataaaggtatgatatattggaatggttatgtaataattgttttaaaataattataaatttttatatatatttttaataatttattattgttattaaagtaatagagtcgagtatttattgtaattaatgatttaagtaagtttggtaataagttgtgaaataagtgttttttaaaagtataattttaattttgaaaaagtgttttatagttttagttataaaggttgaaaatatttgaatgaaagaatatagaagagagaaatatgagtggtagttggtgttatagtttaattaaaagtattgttttttagaagtaatgtaatttagtgtgtgagtttttagtaagataggggttaaggtgggatgggggttagatagttttatgtatgtagggtagttatttttttaagtggtagttttaaattttttttgatgttaagtaagttatttaattttgttgtttattttttttttttttttagt

SEQ ID NO: 1560 - DNA, 6227 bp, Artificial Sequence
  chemically treated genomic DNA (Homo sapiens)
attgaaaaaaagagaaagataaatagtaaagttaagtaatttatttaatattaaagaaaatttagagttattatttagggaaatagttattttgtatgtatgaaattgtttgatttttattttattttaatttttattttgttgagaatttatatattgaattatattatttttaagaagtagtgtttttggttaagttataatattaattattatttatattttttttttttatgtttttttatttaaatgtttttagtttttgtgattgggattgtaaaatatttttttaaaattaaggttgtgtttttagagaatatttgttttataatttattattagatttgtttaaattattaattataatagatattcggttttattattttgatagtagtaataagttattaagaatatatataaaaatttataattattttaaggtaattattatatggttattttagtgtattatatttttgtggaagatatttttggtttaagaaaagtttttgatattataaattgtaatagtttttattcgtagtttaggatttgtagtatattaaattataatttatttggggggggggggaagaagtttttaaatgaagaaaaattgtaaatgtttaattatagtaataaatgtatattgatataattaataatataataaaggtttaagaattagtgaaaaagaatagtaaatttaagtgatataagaaattaaaattttaaaataattttaatgattataattgtattaaataatttatttgtggtgttaagagttttttatatgaatttaatgatgtattagaaaaaaaaaaataaaaaaattatatatattatgtatttattttttgttattaaaattaggtaattttatttgagtaatttttatattgaaaattaaagttttttttattttaaattatagttgtaggtttttatttttagtattttttaaaaaagtaaaatattatgaatttatttgttgtggacgaagaatttaagttttaaattgtaaaatttttgtttttatttgaatatgttattataaaattttttggtaatattgttttttaatcgtgtttttaaatttttaaatgtttatgtaaattagtgaatttaacgattttaagttagttagaagaaaagtttaaggtttataaatttatatattggaaagtatattggattattttatagtttggaggtatatatagtttataaatatttcgatatattagaaaatatattgtttagtttttcgttttaaatcgtttacgattagagattgtgacgttttaaaaggtatataggtggaaaaaaaatatttatttgagtaaatatagtttgtagttcgaaataaaagatgtagattaggggtcggacgcggtggtttatgtttgtaattttagtatcgtgggaggacgaggcgggcggattatttgaggttaggagtttgagattagtttggttaaaatatggtgaaatttcgtttttattaaaaatgtaaaaattagtcgggcgtggtggtgggcgtttgtaattttagttattttggaggttaaggtaggagaattatttgaatttaggaggcggaggttgtattttagtttgggcgataagagtgagatttcgttttaaaataaaataaaaataaataaataaataaaaaaaggtgtagattgttgttacggttaggtttttatttatttttgaaaataagattgataattattttttttaaaaagtagataattgtttttgaagatgcgaggttattgaaatgagatgttagaggtagatttttaagattatttttagtcgatttattattattttatatagtgaatagggaatattaagtttaaatattcgtttaacgtaattttgtaattagtggggtgtcgggttgagttcgtaaattttcgttgtaggatagggttttgtatttttaatttttttatttttagatgggatgggcgggtcgggaggaggagcgacgagagtttaggaaagtttgaaggtagagatagattcgcgtttttaagatatatatataatatagtcgtaatcgcggcggttttattttttcggagttgtatttttttttgggcgaagagcggaggcgattagggattattttaggtgaaagggtagttatttggttttattcgggtttaacgtcgagtttttcggaggtacggtttttcggggattttttagattggtcggcgtaagcgaagggcggggattatcgaaggagtgtgtgatttaggtatttagcgtattgtttgattcgaagtatcgattcgagttatgtttattttttaattttgcgacggaaatgtgttatcgaaagttaggtaattagtgggtcgcggttgggtcgtcggggtaggttaggggcgtcgcggtgggtttcggggtttttggggtcgtgggtttttgttgtcgttcgtttttttcggtttttttttgtagagtaaagggtacgtgagcgaggcgttcgaagtcgtcgcggcggggattatgttgttttcgaatattttgtttatcggttagggcgcgcggtcgggagggattgggttggggtaggttgggggcgtagagtgttttgggtatcgggcgtttaggtgggggttttttattgttttttttagaggtcggtcgagggttacgaggcggttgttagcgtttcgggagtcgattttcgcgggcgttgcgggaggcgagggaggggacgcggaacgttaatttcgttggtttgaggtttcgggggggggcgggggggggtggagagaggtcggtagatttagttttttagtttggtaatttgtttagtttttttgaatttggtatttcgtttgtaaaatgggttgttgattttttggtagggttggttttgggatttttagcgaaataacgtaaggttatatttgtttttcggtagagttattaatggtggatgttttattttttaggttttcgtgggtcgtattttattttttttttgtttttgataaacgttttagattagatttcggtaaacgagtttagatgtttgtgacgtgacgaaattgttgtatgtttttgttgagttatattaaaggattttttcgttttttaaaaggaaggtatatagagtatttcgggtcgtttttcgcgtaggagtgggtttttgaagttatatttagggtgcgtgttattagtgaagggaattaaaatgttgtataacgattttaacgaatatttttgttagtcgtttagttttgaaagtgtttattaaattgtaggttattcgtggaaaaatttaatgtatgtagattttattataaggtatagaaaaattaagattttttgtgggaatagtaaagttatattatttatttaaaggtaaaattgttggtagcgtataagatatgtttgtttttgagaggtgtagattaattattttataaataacgtttagaattttagattttttaagcggaagattttatatttttttgtatggattaaatatagtgttttggttattaagttattgttaaaattttaaagtgaatattttattgaaaatatgttgagtttagggtttagatttggtgtattatagtggatttgaggtgatcgttatttttttgggtatgggaattggattatttttgttatttttatgtttaagtttaattttagggatgttaaatttgaatagttgaaaattatgaatttgatgattttgaaatgtaattttaataggtattagaaggggaaggtaaagaataatgtatatagtattgttatttatgtaaaagggaatatgtgttgtatttatataataaagagtatgtatatatatgtatatttatatgtaaatataaatagggtttttttgggaaaggaaattggtttatagtggttatttttagggaagggcgtaaggggttagtagaggtaatttttagattgtttaattttaatatgaatagttttgtttttgtttttgtttttgtttttgtttgagatagagttttattatgttggttaggttggtttcgaatttttgcgtttaagcgattttttcgttttttttttttaaattgttgggattatacgcgcgagttattatacgtggttatgaatagtttttaaatttttataagttaaataaatagtagttggggtgaggtcgaggttggtagattatttgaggttaggagtttgagattagtttggttaatatggtgaaattcggtttttattgaaaatataaaaattagttgggtatggtggtgggtatttgtaattttagttattgaggagattgaggtaggagaatcgtttgaatttgggaggtggaggttgtagtgagttaagattgtgttattgtattttagtttgggcgataagagtgaaattttgttttaaaaaaaaaattttatatatgattgttaattaggaaattttttattttagtcgttaagaatttttaagggtagaggttaggtgagattttgttttaaaaataaaaggaaaggtagaaggtggatcgtagtgtgataagtagtattttataaatagtatttttttgtggtttgttttataggtatattaggggttggaaaaattatattaggtaaagaatttgcgttaaaattaggattgaaatatattaatgtgggtgatttagttcgagaaggtaagggatattttggtgttagatttgttttgttttttttttaaggtttggtaagtggagtgttagtgttgggtattgttatagggtataaaaaatagagattgttattaaagaatatatattttgttagggaatttatagaaatattaagtgtttaatgttatgttttggttattttgattattttttttttcgtttttaaaatggttggtaatttttgtgaatagttgggaaggtttttataaagagattggatttcggataggtagaatgtgaataaggagaatgtttttaagttgaataaataaaggtttggtattgttaaatatatatatgagtatagtgagtatattggttttattggaaagagattgttttgagtttaggtgtgggatttgattatgttatggtattttagattagtgtgagatttgtatgtaattgtatatattttaagatgattattgtttttatttattttattttgtttttttttaattttttatcgtttttttatttgtgtttttatttttttatagtcgataatgatttgtatatggtaggaatttaataaattaaagcgattttaagttgttttattaaaattaagaaaatatatggtttaaattttaaaaatttttttatagtttaatatagatttaaaatttttttaagtttttgatagttgttattaaagtaattattttagattgatttaatgtatatattttttttaaatgatttaaagtttgattatcggatattatggagtttggtaagacggttttttttaagagtatgtcgaaagatgtatagatgatggtataaattttgaaggatatggggattatagaatatgagttaagagttataaattagatgttggagtttgtttttcgatatgtgattataattttagatgatgtaaaaatttatttaagttatgttaagaaagttattgttgatgtagatgatgtgcgattggtaatttagtgtcgcgttgattagttttttatttttttttttttaagagattttttattagatattgtaaggtaaagaaattaaatttttttgttattgattaagttatatttaggttttaggttgttatttgatagatattgtttaatagttttaaattataggttgaaatttttatagaaaaaggtattaatttttgcgggaagaataatagtttcgcggttaagtgttggtttagttattagtagattaagtatttttatattaggtatattaattttatagattatgtttgttttaattaaagtagggatttttatgttttttataggttaaaggtttatagtatagatgtttattttttagtttttagttgtaaaagttttaatttttgtaattttagtagtttagaatgttttgattaatttattattaatcgggtttaaaaatatttttattattattaatatgatgttattataaaatattgttaatgaattattaaatgtattgaaaagaaaacgtgaagatg

SEQ ID NO: 1561 - DNA, 5567 bp, Artificial Sequence
  chemically treated genomic DNA (Homo sapiens)
atgaagaatattaagttaaaaagtttggtttttaaatttttttttatttttatttaaagtaaaatatattttttatggtaatttagtatatgtatatatacgtttataattaagataaatattttatagattaatatttattttgtgtgtaatgggttttggaatttttaattttattatagtttattttatttatttatttatttatttttgagatggagttttatttttttagttaggttggagtgtagtggcgtgattttagtttattgtaattttcgttttttgggtgagagtgatttttttgttttagtttttcgagtagttgggattataggtgcggttattatgtttagttaatttttgtatttttagtagagaaggggttttattatgttggttaggatggtttcgattttttgatttcgtggtttgttcgttttggttttttaaagtgttaggattataggcgtgagttattgtatttagttagtttatttttattatagtggtttttattaattagaaggattttttgatttattaataggttataatttatagtttgtggattttttatttttatttagttttttaggttttggttgatgaacgggttaagttttttttttttaggttttagttttattagtttttttttgagaaattttgattagtttagattttttatgttagcgtttggtggatatttggaataaatgatttttttattaaggttttttgtagattgaagagtttgggtattaatgttatatgtgttttagattgttttaatgaattaatattttagatttatttattgtaaatgttggtattgaagtaagtatagaaggtcgttaggtattggttatatgttgaatattttttttttttgatgtttataatagttttgttggatggatgttagttttatttggtaaataaggggttgagggtttttgatttgtttttttttttgttttgttttgttttttttatggagttttgttttgttttttagatttttggttggagtgtagtggtataattttggtttattgcgatttttattttttaggtttaaaggattttttcgttttagttttttgagtagttgggataataggtgcgtgttattatatttagttaatttttgtatttttagtagagacgaggttttattatgttggttaggttggttttaaatttttgattttaagtgatgtattcgttttagttttttaaagtgttgggattataggcgtgggttattttatttggttttcgattttaattaagttgtttaagattataaatttttaagtggtagaatttggatttgagtttgggtttttagtttaagatttttagtatattatgaagttttttacgagtatttattattttagttatatttgtttgtttacgggtattttggggaatggatattatattttttttatatatttaagattagttatgtagtttgtggagtttagtgtaaattgaagtattttgagttttttatttaaaaattttgaatttgaagatagtaatagaaaagtattaaattaagtataggttttttgtaagtgtagggttatttgtgattgtataggttatttatttatgtggtgggtgatttgtaagtaatttttttagtttatattattttgtattattatttttttattggttaatttttttttttttttggagatttagtttaaatattattttttttaagaagttttttttaattgtatttagttttaagttatattaagtttttttggttttttaaggtattttgttttggtatttattagattatgttatattattttggttattgtatgatttttatttttttatttttgatttttatatgttagattgggagttttttaaaggtagggattgtgttttttagttttgcgtttttagaatttaaatattgggatagatattttgtaggtgtttaaagagttttgtggaatgaagtagaggaaaattagatttggtgaggaggaatagtaaaatttagttcgaaggaaggtaggttattggggagtagttaggtagatgaaggtattaaagagagagggttgaggaagaggagttatgggtgtgttagggatttggtgatggtgaggattatagttagttaaggtaggataaggagtattgttaataaattgattaatttaagaaggttttttggagtgggagttttatatgtttttaagaagtgatttggggtttaggaatatataaatagatttaatttgtttatacgtttttttttgggagttaaggaattgggttgtgataagttagggaagtatagattttttgtttttttgtttagttttcggttttagttttttttagaaattataggtatggtggtttaagtttataattttaatattgtgggaggttgaggcgggaggatcgtttgagttcggaagtttaagattagtttgggtaatacggtgaaatttcgtttttattaaaaaaaaaaatttatatatatatatatatatatatatatatatatatatatatatatatatatgaaaattagttaggtgtggtggtggcgcgttaatagttttagttatttgggaggtggaggtgggaagattatttgagtttaagaatttaaggttgtagtgagtcgagattgtattattgtattttagtttgggtgataaagtaagattttgttaaaaaaaaaaaaaaaaaggaaggaaggaaggaagggaggaaggaagggaggaaggaagggagggagggagggagggagggagggattagatttgtgatttatagtaggttgatggtattattttttaagaagttgattaaattgttttttgaggttagtgggagttttttggtagtgacggttcggtttatagatttggggtttgaaaagggttttggtagttggttaagggtatttattatgttgaagttttttttttttagtatagttttttttttattttttatttgatggagtgtttttgatgttatttgatttgttcgggatgatattcgttattatgtaggataatttagttgattagaagtagagagaaattgtgggggtagtggtttatttttagtttggatagtttgtaggtgtaatgagttgattttataattattatagagtgtaataattataggttagtttttttttttgatttgaggttattgttgttaggttagttatgtggttggttagattaagggttagtgtgattgtgaagtagtattatgagaggggtaaaattaaggaatagattgtatgagtttttgggttttttttagttttaatattttatggtgatggtagttttgtttttttttgaagattttaaaatgtttgatatttgtgttttttcgtattgttttgggaaggagaataaggatggtgagagatgggcgtgggatgtagaggatggtggtgtggttttgagagataggtagtattggaaagtgtttgttggggagggaaattttgttcgtagaagttaaggttttttattttgaaattataggttgtagattttattgtgtttagtcggttagtgaaagggaaagtttatatggtttataggggtttatggtttatatatgattagattttattgttagaattttaaatgtgttatatttatatttttaagtatttttttgtgtggagtgataatggtggtagttgtagtgggatatagagatgggttatatatgatttttgtttttagagaaattattttatagtaggaaaatatgtatatagttttaggggtggggaggggggttgttagaaagtattggttttgtagagttagatgtggatgtgaagtttagttttgtgtcgtttagttgggtgatttttggtaagtgatttaattttattgaattttagtttttttattggtgaaatagggataaaaaatagcgttttttttatagatttgtgatgagataattatgtaaagttttatttttttttatggatgaggtaaagtaaaggatatttaaaaatattaaattatatttttttgtgtgtgttttatataattaaggttttttgtttttaaaaaaaataaaaaataaaataaaaaatagaggtcgggtacggtggtttatatttgtaattttcgtatttcgggagattaaggtaggaggattgtttgagtttagtagttcgagatttgtgtgggtaatatggtgtaattttattttgtagaggcgaaatttttataaaaaatataaaaattagttgggtaaggtggtacgtgattgtagttttagttatttaggaggttgaggtaggaggatcgtttgaatttaggaggtcgaggttgtaaagttgagattttattagggtattttagtttgggcggtcgatcgagattttgttttaattaaaataaaataaatttttgaaaaatagacgtaggtgttttttggatgttttgttgttttttgatatttgtcgtataatttgtaatgatgtgatttttgcgatttttttttattgtttgttttttttttgtttatagtaagttttttgggggtaagggcgggtcgttttgtgtcgtattttgtttttagcggagattcgtttcgtttggaacggaagttggcgtatagaaggttttttagaaggtcggtgtgtgtgttgcggtagaaggtagaggtcgaatgtggtcgcgggtggcgtgttgagcgcggagggggtcgtgggattcgggaatttgtgtaggcggtggagaggggcgtagcggttttgtttcgtgcggttcgtagatggcgttgtaggttaggttttcgtcgcgcgttagtttggaattcggaagcggtagcgcggcgcgattcggcgggcgggttttgggcgcgggaatttcggcggatttcgggcgggcggatgatttttagttttatttttggtgtcgttttttttttttttttttttttttcggtagttagcgcgtttgtgttttttttaggaaggggtaggggaggggcgtttggagaggatttttcgcgaatgtttacgtgacgtgtagtttttttggggttgtttcggtttgcggggaatatgggcgtgtttagggtcggattgtgttttggttttatcgaggagatgatttagttttttaggagttataggattaagataggtgatcgggtgtgcgcgtgttagggagtcgcgcgggtttcgtataatttgggtaggtttcgagggttggcgtattgttttggtatatttgtagggcgttttttttttatttttagagggtcgcgtttttggagaggtttaggaagggtgggcgtggggagttaagttttaaaatagggtagagatttttattgtgtgtagggtatcgcgtcggtttttgtagttttgttattttatattggttttttgagacggtttgtcggggggtagaattgatattttatttgatagatgaggaaaaattaagtgtgggaggttttagttttttttgttaattcgttatacgtgttttgtttttagt

SEQ ID NO: 1562 - DNA, 5567 bp, Artificial Sequence
  chemically treated genomic DNA (Homo sapiens)
attgaaaataaaatacgtatagcggattggtagagaggattggggttttttatatttggtttttttttatttgttaaatggggtgttaattttatttttcggtaggtcgttttaggaggttagtgtgaaataataaagttgtaggagtcggcgcggtgttttgtatatagtaggaatttttattttgttttagagtttggttttttacgtttattttttttgagtttttttagaagcgcggttttttaggaatggaggggaagcgttttgtaggtatgttagggtagtgcgttagttttcggggtttgtttaggttgtgcgaggttcgcgcggttttttggtacgcgtatattcggttatttgttttgattttgtggtttttgagaagttggattattttttcggtaaggttagggtatagttcgattttgagtacgtttatgtttttcgtaggtcggaatagttttagggggattgtacgttacgtgggtattcgcggggggttttttttagacgttttttttttatttttttttagagaggatataggcgcgttggttgtcggaggagaaaggagagaggaggaggcggtattaagggtagggttgggggttattcgttcgttcgggattcgtcgggattttcgcgtttagagttcgttcgtcgggtcgcgtcgcgttgtcgttttcgggttttaggttggcgcgcggcgaggatttggtttgtagcgttatttgcgggtcgtacggggtagagtcgttgcgtttttttttatcgtttgtataggttttcgagttttacgatttttttcgcgtttaatacgttattcgcggttatattcggtttttattttttgtcgtaatatatatatcgattttttaaagagttttttgtgcgttagttttcgttttaaacggaacggattttcgttggagataaaatgcgatataagacgattcgtttttatttttagggagtttattgtgagtaagggaaagatagataatgaaaaggaatcgtagaaattatattattatagattatacgataggtgttaagaagtagtaaagtatttagagggtatttgcgtttattttttaaaagtttgttttgttttggttgagatagggtttcgatcggtcgtttaggttggagtgttttggtgagattttagttttgtagtttcgattttttgggtttaagcgatttttttgttttagttttttgagtagttgggattatagttacgtgttattttgtttagttaatttttgtattttttgtagaggtttcgtttttataaaatggggttatattatgttgtttatataggtttcgaattattgggtttaaataatttttttgttttggtttttcgaagtgcggggattataggtgtgagttatcgtgttcggtttttattttttattttattttttattttttttaagggtaagaaattttggttatatagaatatatataaaaagatatgatttggtatttttaaatgttttttgttttgttttatttataggaagaaataaaattttatatggttattttattataaatttgtgagggaggcgttattttttatttttgttttattaatgaagaaattgaggtttagtgaggttaaattatttgttaaaggttatttagttaggcggtatagggttggattttatatttatatttgattttgtaaagttagtgttttttaatagtttttttttttatttttgaagttgtgtatatgtttttttattgtaaggtggtttttttgagagtagagattatgtgtggtttatttttgtattttattgtaattgttattattgttattttatataggaaagtatttgggagtgtgggtgtggtatatttagaattttagtagtgaagtttgattatatgtgagttatgaatttttatgaattatgtgggtttttttttttattaatcgattgggtatagtggagtttgtagtttatggttttaggatagagagttttagtttttacggataaagtttttttttttagtagatattttttaatattgtttattttttagggttatattattattttttatattttacgtttattttttattatttttatttttttttttagggtagtgcggaaggatataggtgttaggtattttgagatttttagagaagggtagggttgttattattatggagtattagagttggaaggggtttaagggtttatgtagtttgttttttggttttattttttttatgatgttgttttatagttatattggtttttggtttggttagttatatagttagtttggtagtagtagttttaaattaaggggggaggttggtttgtaattgttatattttgtgatgattatgaagttagtttattgtatttgtagattgtttaaattaaaggtgggttattgtttttatagtttttttttgtttttggttagttgggttgttttgtatggtgacgggtgttatttcgaataaattagatggtattagaggtattttattaagtgggagatggggaggaggttgtattgaagaaagaaaattttaatatgatgaatgtttttgattaattgttaaaattttttttaaattttaagtttatgaatcggatcgttattattaaaggatttttattagttttaaagggtaatttggttaattttttggaggatgatattattaatttattgtaagttataaatttggtttttttttttttttttttttttttttttttttttttttttttttttttttttttttttttttttttttttttttttttttttttgataggattttgttttgttatttaggttggagtgtagtggtgtaatttcggtttattgtagttttgaatttttgagtttaagtgatttttttatttttattttttaagtagttgggattattgacgcgttattattatatttggttaatttttatatatatatatatatatatatatatatatatatatatatatatatatataaatttttttttttggtagaaacggggttttatcgtgttgtttaggttggttttgaattttcgggtttaagcgattttttcgttttagttttttatagtgttgggattataggtttgagttattatgtttatagtttttaagaaaggttggagtcgagggttgggtagagagataaagaatttatatttttttgatttgttataatttagttttttgatttttagagaagagcgtgtgggtaggttggatttatttatgtatttttgagttttaaattattttttggaggtatatggagtttttattttaggaggtttttttggattagttagtttgttgatagtgttttttattttgttttgattggttgtggtttttattattattaaatttttgatatatttatggttttttttttttaattttttttttttggtatttttatttatttgattgttttttagtagtttgttttttttcggattgggttttgttgtttttttttattaagtttggtttttttttattttattttataaaattttttgagtatttgtaaggtgtttgttttagtgtttaagttttgggaacgtagagttggaaagtatagtttttgtttttaaggagtttttagtttggtatgtggaggttaggggtgaaaggatggggattatgtaataattagaatgatatagtatggtttggtaagtgttaggataggatgttttgagggattagaggggtttagtatagtttgagattgggtgtagttgaaggaggttttttggaggaagtgatatttgagttgagtttttaaggaaggaaaggagttagttagtgaaggggtggtggtatagggtgatgtgggttgagggaattatttgtaggttatttattatatgggtgaatgatttgtgtagttataaatagttttgtatttataaggggtttgtgtttagtttaatgtttttttgttattatttttaaatttagaatttttgaataaggggtttagggtattttaatttgtattgggttttatagattatatagttggttttgagtatgtgagagggatgtggtgtttattttttaaagtgttcgtaagtaagtaggtatggttaaagtgatggatgttcgtaggaaattttatggtatattgggaattttggattagaagtttaaatttagatttaagttttgttatttagagatttatggttttagataatttaattaagatcggaggttagatggggtagtttacgtttgtaattttagtattttgagaggttgaggcggatgtattatttgaagttaggagtttgagattagtttggttaatatggtgaaatttcgtttttattaaaaatataaaaattagttggatgtggtggtacgtatttgttgttttagttatttaagaggttgaggcggaagaattttttgaatttgggaggtggaggtcgtagtgagttaagattgtgttattgtattttagttaggggtttgggagatagagtaaggttttataaaaaaaataaaataaaataaaaaaaaaaatagattagggatttttagttttttgtttgttaaatggggttaatatttatttagtagagttgttgtgaatattaggaggaggagatgtttagtatgtagttagtgtttagcggttttttgtgtttgttttagtattagtatttgtagtaagtgaatttgaaatattaatttattaggataatttaaagtatatatgatattaatatttagattttttagtttataaaagattttggtgggggaattatttattttaaatgtttattaagcgttagtataggggatttgggttaattaggattttttaggaggaggttgatgaggttggaatttggggaggaaaaatttggttcgtttattaattaagatttgggaggttggatgggagtaagggatttataaattgtggattgtgatttattaatgggttaagaagtttttttagttggtgaagattattatgataaaaataaattggttgggtgtagtggtttacgtttgtaattttagtattttggaaggttaaggcgggtagattacgaggttaagagatcgagattattttggttaatatggtgaaattttttttttattaaaaatataaaaattagttgaatatggtggtcgtatttgtagttttagttattcgggaggttgaggtaggagaattatttttatttaggaggcggaggttgtagtgagttgagattacgttattgtattttagtttggttgagagagtgagattttattttaaaaataaataaataaataaataaaataaattataatagaattggaaattttagagtttattgtatatagagtaagtgttggtttgtgaaatgtttgttttagttataggcgtatatatgtatgtattaagttgttatggaaagtgtattttattttgggtaaaggtaaaaaaagatttgaaagttaaattttttggtttggtgttttttat

SEQ ID NO: 1563 - DNA, 10279 bp, Artificial Sequence
  chemically treated genomic DNA (Homo sapiens)
ttggtgtttttgtgtgtatgtttaaattttttttttttataaggatattagtaagattggattagaatttattttaatgattttattttaatttaattaatttatttaaggtttgtgatggttaattttatgtgttagtttgattgggcgaagggatatttatatagttattaaaacgattttgggtatgtttgtgtttatatttttggaagagattagtatttaagttagtagattgagtaaagaagatttatttttattaatgtggatgggtattatttaatgtgtttaaggtttagatagaataaagaagtggaggaagggttaatttgttttttttaagttgggatgtttatttttttttgtttttagatattcgtgtttttggattttaggatttcgggtttggattgaattatattacggatttttttggttttttagtttgaagatagtagattgtgggattttttgatttttataattgtgtgagttaatttttgtaataattttttttttttatagtagatttttttataaaaataattagaaaatgatgttttttttttatttttttttagaagtattaattgtttataagttgaaagtgaatatagtttttaattaaaatttatgaaaaatttagtaattgtttttattatatataaaataaagttatatagttattatagtttaaatataattaaattaaattaaagttaaagtttttttgttttaaaaattaatttttttttatttttaaaaaaatattgtgaaatttgagagtttttattgaggtaaattgggtagttgtttagtttggttttttgtaaagatatttattggtattttgtaattaggtatttaggttattatgtttattgtagagttgagaaagtttattttttaaatttgtatattagttttgagaaatttaggttatgttttttttatgttaatgtttgaatttaatttgtgattttatggaggtaagtaggatgaggaggtaaaataatgttttattattttgtaaggtttggaaatggaatagatgttttttgattagaaaggatatttagtaattttatatatcggtttttatttttagttttttaaatttttttatgaagatatggtttttatatttttttttgtttgaggaataaggagaaggtatttattatatattttttgggattggttaggattagtaagataatgagaatggagttttgtgttgttttttgatttttgtggaagattggagttaatgaagtgtggggttttgtgtaaattattttgattttttaagtttttggttttgttttttagtttataggaattatgggggatttttataaaggtaagtgatggtggaagagggggtagggagaatagagattgggataaggggaagagggaagagaagagaagtaaatatatgatttttttttagttagtttatggatttaataatttttgagatttttttttatggttttttttgatagttaagaatataggtttttttttgtttatacggtggtattagttgtttagaaaatagtgtagttaaaattagaaagttcgtagtagattttttgaaagtatggagagtgagttgtagtcgacgtttagagtaattaataatatattagaaattttattaataggggtaatttatattgagttaattagaaaataattttaagatagagaaagtgggggagaaatgagcgtgtggagacgttgttttttcgtcgttagtgtagggtggcgagtttgtatgtttatttagggtttcgatttagcgacgatttgttaaggttttgttttattgttagtttgagtttttttatcgtttaagatgtattttggatgggttagggagggatgttttttttttagtgtagtggaaagaacgttgttttgggagttgggagatcggatttgtaatgttatttttgttattaatttttttttgtgatattgaataggaatattttgttttttaggaataaataaataaaatatatgcgttggggtaagtaatttttaagtttttttttagttttggtttttaaattggtgatgttagaagataagagttttgttagttagagatgtatagatatatgtttatgtatgtaattttaatgttcgtaaatagtatttgttgaattatgataagagtttaaaatgtagcgtttatatatttagattatggttgtaggagtagattttgattgttattagtaattggaatttattgttgtttgggaagagattgaatttgaaaaggttttttaaaagggtttttgggagttaaggggaataagtgtaggtaatttgtttaggggggttggggtttggatggagaggtaggtgaaagtagggatgtagggagtatattgtttggaggagtagggttagtgaagggtttgtcggtatttttaggattaattatagttaattattagtttgggaggtttgcgtttaaggttggagtttggtattaagttgtttaggttttagtttatttttttcgttttttgttttttgtaataattggttaatatatgttagtagtgttttatttttaatttgtttggaataatatggattttaggtagttttgtttttgttattttatgatgtaagttaaggtttgtttgttatgtggaaaagatttgaaataaagatagtggataaaatgttagtgtttagagggataatgggttattatttaatttgttttttttaggtgatttaagggaggttttattttttaataggagataagtgatttgattttaatacggatgggagaaattgggaggtgaaattgggagaaatatggaaatattggtgatgtatataaatttagatttttattaaatagagtaattagaaaattgtatttttataggtatttaatattttgttatgttttatttaaaatttattaagtattttatttgtaaatattgtgattttttttaattataaaagtatatatgattgatgaaaaattgagtaatatagaaatttatgttaaatatgatttgaagagagagagagagagagagaaagttttttttttatttggtttgaattttatatttttattattttttgatgagtttatttgattagtttatttttttaagaaaaattgaaaaggattttatttataaattattgattttagagaaattttttaattttgttttggaggttatgggtaattaattaattttgtttatcgtagattttcggtgttaaattaaggaaagtttaaaataaattagtgtattttgttattttagttttatataatttttaagtgaatttatagaattgaagtttgatttttgaatttgttgttttgttttaatattgtgggatattattattttgtttttttttttaaggggaagtatgaatatttggttttttttttttttttttgtaagtttattggagatgtaagattttaaggagtaggaggatggggggggaaggatatttttttgtatgtaagttatgttatgatttttttttatttgattttattgtgtaaggagggtttagggttatttgttgaatatgaatattgtttttaggaaatttttagtttttatttgtttttttcgttatgttgttttaaatatgatttttaggtaaaggttgtatttttttggggaaaaatatattgaagtttttagaagttatagattagtttttttttttttttagtgttattgtagtggtttttgttttgtttttagtgagtagttgtggttttagggttgttgtgtggttaagtaggtttaaatgcgaaagagtgggagatgtaagaggagcgtcgaatgagggtagtatagaatagtgaaatttttgtatttgtttttttgatagtttttgttgagaattagataagtaaggaattttttatttattagttgaatatagaaagattttggggataaagttggtttgagaattataaaggggttttgaaatagagatagaggtgtgtatatatttatttatttttgaattatttttagattattattataaagtggtttttattattttttttttatggtataatggagtgattaggaatatgagttttggaattttattttatttttattaagtagtggttgtgtgattatgggtaagttattttattgttttgaatttttgttgtttttttttagatataatattattaaatgcgtatgattgttgtgaaaattaaatgatatataaaatatttataagtttagtttattgtttttaataatggggattaatattattaattttaggttgtaggtgatgagattgaagtttttaaagtttaagtaatgaattaaaggtttgagttaagatttaaatttaggtttgttgatgtttatattcgagtaatgtttaaatttatagtagttataaggagtattaattttttttagtaagatttgattaggttgaaaggttttgagattgtttggataatattttaagataataataaaaaaattttatagtgttgttaatatttgatgaatatttataaagaggtagatatcgttttaagtatttttttataataattgttattgtataatattattgattttttgaggtatatattattagttttttttttttatagatgtggaattgaggtatagagatatagaattttggtaaaagttggggtttatattgattgataagattatttttaatttaaatatttttagggagggaattggtagttagtgttttagtaaattttcgtatatggttttatatttaggtttttttgagttaagttttttaaagagttaggtggtagttggagttggggttttttggtttatgattggttgttattatttgtggttagttttttatggtgggggaggttgggaaggatagtggaagttgataaatagtttagtagtatgttttgagaaataagagggtaaggagagagtagagaatatattttgttttttttttggtattgagtaatattaattaaattgtagatattttaatattttggttaggtagtttgttgagtaaggtaatatttatattttttatgttttgagttaaaatatttattatatttttatgtttttaattagaagtgtttgagtttttttttttttttagttgatgaggggatgaaatgagtaaagttatattaatttttttttaaatgtatgaaaataaaaaaggtataagagttagttttagggttattgaaggtttatagaaagatgtaaaatatttgaattattataaatgaatgttattgttagaggaaaggtttaaggagtgttttttgaatgaatgtgtataaattagtagaaggtaaggtgtgagatttttggaaatgaatattggtagtttaggtgagaaaaataattaggaatataatagggtgggaggaaatgtatggttttttaggtattaataagtattgttaggtattttttgaattagattggtttaagtaggagattaatgttttttaaaatatttatttattttagaattattgaatgtttaaaaatgtaatttttggatttttttttaaatagttagattttttgggatttgatgatttgtatttttttttaaaaataaattcgtttatgattttgatttgtattaattttgagaattgttatggtagagattttgttttgaggttatgtttttgagttaggatttttggttagggattgtgatgatatatttttttttttgaagtggtttatgtaagaggttgtttgaaggaagagtaagaattgtagtgttattttgtggatatttgagatttataaaaaggttttttattttgttatatttttgatatatgatgtttggtaaaaaatagacgatagtatttgtagagtgaatgaataagtggaataggtgtgataatgagaggttatatttgagtatatagttattatttggaaattgtgtatagattaagttgaagatgttaggagggaagattgtgggttaagtaacggggtgtatgtgtgtgggtatagggtgggtagttgggatggaaatggggggttgttgttgttgttgtattttggttttttgaattaatgatattatttattagaaattattgtttttgtattgtttaagttattttaaattagtttgttaaaatgaatttgtgttgtgtggagggaggtacgtttgtagttttgatgttagatggtaatgtcgagatggtagtggtcggtggggatagggttgagtagtattaattatttagtttttgagatttcgaggttggtttattgttgagattttttgttagaagagaggagattaagtatttgtaaggtttttgagtgttaaaatatgaatttaagataatttttttataattttaattttatgttgtttataggtttatattttagtttgttttttttatgtttattcgaaaagaaagaaaagttaagggtggtggttatatttgaaattagttagattttaagtttttttgggggaaatttagaagaaaatatggaaaagtgattatgagtatatatatagttagtttttaaaatagttttatttaaaataaatgtattataaaattaataaaaatagttatttgtttgttttgaataatttaaatgatataaaaattaataaaataaaaagtgtaaaaggtttttttattaatgttaattttattttttttagaaattaaatattgttaagattttagtgtgtatttttttagaatttttgtgattttatatatgtataaatataaacgtatttatataaagggaattttattatatttgttattgttattttattttttgtttttttatgtgagtatttttttatgttattgatgtatatagaaattgtatatatgtattagtgtatatagaaaattaaattttttgtatggttttttattgtatgtttggattatagtttatttaataataatgttttttgggtaattatttatattgttttttgtttttttaaagtaatagtttttgaaataaatttttttttgtttttatataaatattgttgtatttttgtggaaatgtttttattggataattttttaaaaggagatttattgtattaaagataatatatttaaaaattttaaagatattgttaaattgtttagtaggtattttatattaatttatattttttttaagaatgtatggagatattttaatttttttatgtttttattaatgttgaattatataagtagttttaatttttgttaattgaatagataaaaaatatttaatttaagtttagtttttaaaagttttattttttattaaaagtaatatacgtttattttagggagtaaaaattataagtaaggataaaaaatagtgtagtaataaatataggagtgtagatgtttttgaatatattgatttaattttttttggataaatatttagtagtaggattgttggattatataataattttatttttagtttttttgaggatttttatattattttttatagtggttgtattaatttatatttttattaattgtgtatgaaggtttttttttttttatatttttgttagtatttattattgtttgttatttggatataatttattttaattggggtgagatgatattttattgtagttttgatatgtatttttttgatgattagtggtgttgagtatttttttatatatttgtttgttatttgtatgtttttttttgagaaatgtttatttagatattttatttattttaaaatcggattattagattgttttttgtagagttgtttgagttttttgtatattttggttattaattttttgttagatgtatagtttataaatatttttttttattatgtggattgtgtttttattttgtggattgtttattttgttgtgtagaagtttttaatttgatgtaattttatttgtttatttttgttttggttgttttttataggagtatttaaataaatgtagtttggtagattttggtatagtaatgtaggttagtgggagttaggggagaaatgtgtagggaagtgagatagttttaaggattttataaatatgttttatgattgatttatttaatgtgaaagttaatattaaatttgatgagttttagagatggttatgtattttaaaaagaattatttaaaatattgttttggaatattagagagtaagtgttttaagtataggttgggaagtaaaatgttaaaggaatgagaaggtatttggggttgagtttaatttaagaggtaggggagttatagggaaagatttagtatttgttatagaagagaattaggaagtagaattgaattataagtaattttgaggtgttcgttgggttgtagttgaaatattttttgaggttaatgagatatttgaaatggtcgtgtattgtttaatttttgtatagttttgtatagggaataatttaataggatttttttgtgaattaagttttagaaatttgtttttaatttttatgaaaaacgtttatttttttgtttttgagatagagttttgttttgttatttaggttgggttgtagtggcgtgattttggtttattgtaatttttgttttttgggtttaggtaatttttttgttttagtttttcgagtagttgggattttaagtgtttgttattatgttcggttaaatttttttgtatttttggtatagatggagtattattatgttggttaggttggtttcgaatttttgattttaagtgatttattagttttgattttttaaagtgttgggattataggtatgagttattgtgtttgtgttttaaaatattaatttttgatgtgtgatgtatgtaagatagaataaattttagtaaagcggggatttgaaaagaggttttggtaatagttgttagtattaatttttgttttttcgtattttttaattttatttttgtttaaagtatgtttatttgagaatttgtttttataattatgtgattataaaaatttttatcgattttgttagttgattaattgagggaaaaatatatgttatttgatataattggtgggttaaaagaattaatttaggtaaatttgagataggtggatgggatgatggattgaaaatatagttgttttttttttaattatgtattaagtaatttgggaaagattgatttaattgggtttagagagtatattttatatggtattgtttgattttttttttgtatcgttagcgatttgtgtattataatttaaattagtcgggttttttggtatatgtaattgttaatgttttttattagaagagaaatattatttttatttttttttattatgttataaattatagtgttaatgattatcgattaatagtgatttttaggatgatttgtgtgagttttatttgaaattatgtgaattttttattttaaaagttttttagaattttagtttatgtatatttaggtttgttgtaggtttagagtttcgtgttttttgtttttaatgtagatatagttttataatttataatagtatttattaattaaaattgtaagtataattattatttacgatatttattattagtttgtatttataaagtttaaaatttattttatttttttaagtagtgaataattagtttttttgggtttgtagttttattatttttttatgatttatttggaagaaataaataattaattttttggaagattgttttaaaaagttggaaatatattgtttagttagtataatgaggttaatataatgtggaaaatattatttttttttgattttagtagtttgtttatttttatatttattgaataaataattattgagtatttaatgtatattgggatttttggggaggtaaagatgaattaaagattttgtttttaaagattttaaggtttttgtggaaggaaataaaattttatatgtatatatttaagtatttatatgtgtgtaataggtataagtaattataaatattgttagaagaggaaataattttatgattagtatttaatatgatatattaaggtagaagatttaatatatattttttggaatatatgaataaataattgaatgtatttatttttattatttataagatatattagtgggatattgatattggttttaatatgatttgtttttattgtttttagg

SEQ ID NO: 1564 - DNA, 10279 bp, Artificial Sequence
  chemically treated genomic DNA (Homo sapiens)
tttgagaataatgaaaataagttatattaagattaatattaatattttattgatgtattttataaataataaaaataaatatatttaattatttatttatgtattttaaaagatatgtattaaattttttattttaatatattatgttaggtgttgattatagagttatttttttttttgatagtgtttatggttatttatatttgttatatatatataagtgtttaaatatatatatgtaaagttttatttttttttataaaaattttaaggtttttaaggatagaatttttgatttatttttgtttttttaagggttttagtatatattaggtgtttaatagttatttgtttagtaaatgtaaagataaataggttattaaaattaaagaaaagtaatattttttatattgtattagttttattgtattagttggataatgtatttttagttttttaaagtagttttttagggggttggttgtttattttttttaaatgggttataaaaggatgataaagttgtaaatttaaagaaattaattatttattatttgaaaggatgaagtgaattttgagttttatgaatgtaaattaataataagtatcgtggatagtaattatgtttataattttaattagtgaatgttgttgtaaattataaggttgtgtttatattagaaataaaaaatacggaattttaaatttgtaataaatttgagtgtatatagattgagattttaagggatttttaagatgaaaaatttatatggttttagataaaatttatataggttattttgaaagttattgttggtcgatggttattagtattatagtttgtaatataataagaagaggtgggagtaatgttttttttttggtaaaaaatattggtaattatatatgttaggaaattcgattgatttgagttgtaatgtatagatcgttagcgatgtagaaaaaaagttaaataatgttatgtgaagtgtattttttagatttaattagattaattttttttaaattatttagtatatgattggaaagagagtagttgtatttttaatttattattttatttatttattttaaatttgtttgggttaatttttttgatttattagttatattaagtaatatatgttttttttttaattgattaattaataaaatcgatgagaatttttatagttatatagttatggagataaatttttagatgaatatattttgagtaggggtgggattaggaggtacggaggggtaagggttaatgttgatagttgttattaaagtttttttttaagttttcgttttattgaagtttgttttattttatatgtattatatattagaaattggtgttttggggtataggtatagtggtttatgtttgtgattttaatattttgggaggttaaggttggtgaattatttgaggttaggagttcgagattagtttggttaatatggtgatattttatttgtattaaaaatataaaaaaatttagtcgggtatggtggtaggtatttgaaattttagttattcgggaggttgagataggaaaattgtttgaatttaggaggtagagattgtagtgggttaagattacgttattgtaatttagtttggatgatagagtaggattttgttttaaaaataaagaaatgggcgttttttataaaaattaaaagtaaatttttaagatttgatttatagagaaattttattagattgttttttatgtaggattatgtaagagttaaataatatacggttattttaaatgttttattaattttaaaaaatattttaattgtagtttaacgaatattttaaaattgtttatagtttaattttgttttttaatttttttttgtggtaggtgttaggtttttttttgtggtttttttgttttttaggttgaatttaattttaaatgtttttttatttttttagtattttattttttagtttatatttaaagtatttgttttttggtattttaagataatattttgagtaattttttttaaaatgtatgattatttttagagtttattaagtttaatattgatttttatattgagtaagttaattataaggtatgtttgtaggatttttagaattattttatttttttatatattttttttttgatttttattggtttgtattattatattaaaatttattaaattatatttatttaaatatttttgtggaaggtaattaaagtaaaagtggataaatgggattgtattaagttaaaagtttttgtatagtaaagtaaataatttataaagtgaagatataatttatatgatgggagaaaatatttgtaagttatgtatttgataagagattaataattagaatatataaggagtttaaataattttataggaaataatttaataattcgattttaaaataggtaaaatatttgaatagatattttttaaaggaagatatataaatggtaaataggtatatgaaaaggtgtttaatattattgattattagagaaatgtatattaaaattataatgagatgttattttattttagttaaaatagattgtatttaaatgataagtaataatgaatgttggtaaggatgtagagaaaagggaatttttatatatagttggtaggaatgtaaattagtatagttattatgaagaatagtatggaggtttttaaaaaaattaaagatagaattattatatgatttagtagttttattattgggtatttatttaaaggaagttaaattagtatgtttagagatatttatatttttgtgtttattgttgtattattttttatttttatttgtgatttttattttttaaaatagacgtgtattatttttggtagaagatagaatttttaagaattagatttagattagatattttttatttatttaattagtaaagattaaaattatttatatggtttagtattaatgaaggtatggagaaattaagatatttttatatatttttgggaggagtataaattggtataaaatatttattagataatttagtaatatttttaaaatttttgaatatattatttttgatgtaataaatttttttttgggaagttatttaatagaaatatttttataggaatgtaataatatttatataaagatagagagagatttgttttaaaagttgttattttgaaaaagtaggaaataatataaataattatttaaagggtattattattaaataaattatggtttagatatatagtggaaaattatgtagaaaatttaattttttgtatgtattgatgtatatgtgtaatttttgtatgtattagtgatatggaaagatgtttatatgaaaaagtagagaatagaatgataatagtaagtatagtaggattttttttatgtagatacgtttgtatttgtatatatatgaaattataggaattttgaaaggatatatattaaaattttaatagtgtttaatttttgaaaaaaatagaattggtattgataagagggttttttgtattttttattttattaatttttgtattatttgaattatttaaaataagtaagtaattatttttattaattttgtgatatatttattttggataaaattgttttaaagattagttgtatatgtgtttatagttatttttttatatttttttttaaattttttttagaaaaatttaagatttggttaattttaaatatgattattatttttagttttttttttttttcggatgaatatggagaaagtaggttaaaatatggatttgtagatagtatgaagttaggattgtgaaagagttattttggatttatattttgatatttagaaattttgtaaatgtttgatttttttttttttaataaaaggttttagtagtagattagtttcgggattttaaaggttgagtggttggtgttgtttagttttgtttttatcggttattgttatttcgatattgttatttgatattagagttataggcgtgtttttttttatatagtatagatttattttgataaattagtttggggtggtttggatagtgtaggaatagtagtttttggtgagtgatattattagtttaggaggttagggtgtagtagtagtagtagttttttatttttattttagttgtttattttatatttatatatatatatttcgttatttggtttataatttttttttttaatatttttaatttagtttgtatataatttttaagtaataattgtgtgtttaagtgtgattttttattattatatttgttttatttatttatttattttgtaaatattatcgtttgttttttgttaaatattatgtattaaaaatgtgataaaataaaaagtttttttataagttttaagtatttataaaataatattataatttttgttttttttttagataattttttgtatgaattattttagaaagagaaatatattattataatttttggttaggaattttgatttaagaatataattttaaagtagggtttttattatggtaatttttaaaattaatataaattagaattatgagcgagtttgtttttaaaaagaaatgtagattattaggttttaaagagtttggttgtttgggaaggaatttagaaattgtatttttaaatatttagtgattttaaaatgagtgaatattttgagaaatattggttttttatttaggttaatttagtttaggaaatgtttggtaatatttgttaatatttgggaaattatatatttttttttattttattatgtttttgattattttttttatttgaattattagtatttatttttaagagttttatattttattttttgttgatttgtatatatttatttaagaagtattttttaaattttttttttgataatagtatttatttatagtaatttagatattttgtatttttttatgaatttttagtggttttaaaattggtttttgtattttttttatttttatatatttaaaaaaaaattgatgtagttttgtttattttatttttttattaattggaaagaaaaaaaagtttaagtatttttagttagaaatataaaaatgtaataaatattttggtttaaggtatgaaaagtatgagtgttattttgtttagtaggttgtttggttaaagtgttgagatgtttgtaatttggttgatattatttaatattaaagagaaggtaaagtgtgttttttgttttttttttgtttttttgttttttagaatatgttgttgagttgtttattagtttttattgttttttttagttttttttattatggagggttaattataaatgatggtagttaattatgggttaggagattttagttttagttgttatttggttttttaggaagtttagtttaggggggtttgagtgtagaattatgtgcgagagtttgttggggtattggttgttagttttttttttgagaatgtttgggttggaaatggttttgttagttagtataagttttagtttttgttagggttttatatttttgtgttttagttttatatttgtaaaaaggaaaggttagtagtatatattttaaagagttaataatgttatataatgatagttattataggaaaatatttgaaacgatgtttgtttttttgtagatgtttattagatattaataatattatggaatttttttattattattttgaaatgttatttaaataattttagaattttttaatttggttaaattttgttgaggaaggttgatgttttttgtaattattgtaagtttaaatattattcgagtatggatattaatagatttggatttaaattttgatttaggtttttgatttattatttaaattttaggaattttaattttattatttgtaatttaagattaataatattagtttttattattgagagtaatgggttaggtttgtaagtgttttatgtgttatttaatttttataatagttatacgtatttgataatattatgtttaaaaagaagtaatagaagtttagagtaatggagtgatttgtttatggttatatagttattatttagtgaaggtggggtggaattttaaagtttatgtttttaattattttattatattatgaaaggagaataatgaaagttattttgtagtaatagtttaaggataatttaagaatgaataggtgtatatatatttttgtttttgttttaaaatttttttataatttttagattagttttatttttaaagtttttttgtgtttagttaataagtgagagattttttgtttgtttgatttttagtaaaaattgttaaggaggtaggtgtaaggattttattgttttgtgttgtttttattcgacgttttttttatattttttattttttcgtatttggatttatttaattatataatagttttggggttatagttgtttattaaagataaggtagaagttattgtagtaatattgggagagaggagaaattggtttgtggtttttaggagttttagtgtgtttttttttaaggagatgtagtttttatttgagggttatatttgaggtaatatggcgagaaaggtaggtgagagttaagaattttttgaagatagtgtttatgtttaataggtggttttgagttttttttatataatgaggttaagtagagaggagttataatatgatttatatgtaagagggtgtttttttttttttatttttttgttttttaaaattttgtatttttaatggatttataggaagaaaaagaaaaggttagatgtttatgtttttttttgaaggaaagagtaaaataataatattttatagtattagaataaagtagtaagtttaaggattaggttttagttttgtaggtttatttggaagttatgtaaaattaaagtgataaaatgtattggtttgttttggattttttttggtttagtatcgagagtttacggtgaatagagttggttggttgtttataatttttaaagtagagttagaaaatttttttgaggttaataatttataaatggaattttttttaattttttttggaaaagtaagttggttaaatggatttattaaagaatggtgaaggtgtgaggtttagattagataagggaggagttttttttttttttttttttttttttaaattatatttaatatagatttttgtattgtttaattttttattagttatgtatatttttataattaggaaaaattataatatttataaataaagtatttaatgaattttaaatgagatataataaaatattgggtgtttatgaagatatagttttttaattgttttgtttgataaaagtttggatttgtatatattattagtatttttatgttttttttaattttattttttaattttttttattcgtgttgaaattaagttatttgttttttattgagaagtaagattttttttggattatttggaaaaaataagttaaataatggtttattgtttttttggatattaatattttatttattgtttttattttaaattttttttatatgataagtaaattttaatttgtattatgaaatagtaaagatagagttgtttaggatttatgttgttttaagtaaattaaaaataaaatattgttgatatgtattggttaattgttgtaagagataaagaacgaaaagggtgaattagagtttggataatttgatgttaagttttagttttgagcgtagattttttagattagtgattagttgtggttagttttggaagtgtcgataggttttttattggttttgtttttttaggtaatgtgttttttgtatttttgtttttatttgtttttttatttaagttttaatttttttgagtaggttgtttatatttattttttttggtttttaaaggtttttttaagagatttttttaaatttaatttttttttagatagtaatgagttttaattgttgataataattaaaatttatttttgtagttatggtttgagtgtgtgaacgttgtattttgagtttttattataatttagtagatgttgtttacggatattgagattatatatataagtatgtatttatatatttttaattagtaaaatttttgttttttaatattattaatttgaaagttagaattagaagggaatttagaggttatttgttttaacgtatgtgttttatttatttatttttgaagggtaaagtgtttttgtttaatgttatagaagggaattagtagtagaaatagtattataaattcgattttttagtttttaggataacgttttttttattatattgaaaagggaatatttttttttaatttatttaagatgtattttagacggtaaagaaatttaagttggtaatggagtagaattttaataggtcgtcgttagatcggagttttgggtgagtatgtaaattcgttattttgtattggcggcggagagatagcgtttttatacgtttattttttttttattttttttgttttaaaattgttttttaattaatttaatgtgaattatttttgttagtaaaatttttaatgtgttattaattgttttaaacgtcggttgtagtttattttttatgtttttaggagatttgttgcgggttttttgattttagttatattgttttttaagtagttagtgttatcgtgtgggtaaagaaaagtttatatttttgattattagaaaaagttatgagaaaaagttttagaagttgttgaatttatgaattggttaagaagaaattatgtatttgttttttttttttttttttttttttttattttaatttttattttttttatttttttttttattattatttatttttgtagaaattttttataatttttatagattaggaaatagagttaaaagtttaaaaggttaaagtaatttgtataagattttatattttattaattttagttttttataaaggttaagagataatatagaattttatttttattgttttgttaattttgattagttttagaaaatgtgtaataaatgttttttttttattttttaaataagagaagatatgaggattatgtttttatgagaaaatttgaagagttgagagtaaaggtcggtgtataagattgttaaatattttttttaattaggagatatttgttttatttttaaattttataaaatagtaaggtattgttttgtttttttattttatttatttttataagattatagattgagtttaaatattgatataggaggaatatgatttaaattttttagagttaatatataggtttggggaataagtttttttaattttatagtaaatataatggtttgaatgtttaattgtaggatattaataaatgtttttataaaaagttaaattaggtaattgtttagtttgttttagtgagggtttttaaattttataatatttttttgaggataagaaagggttagtttttaagataaaggagttttagttttaatttaatttaattatgtttaaattataataattatgtggttttgttttatatataatgagaataattgttaaattttttataaattttaattaaaaattatatttatttttaatttatgaatagttagtgtttttggagagagatggaaaaggagtattattttttgattatttttgtaaaaaaatttgttatgagagagagagattattataggaattggtttatataattatggaggttaagaagttttataatttgttgtttttaagttggagaattaggaaaattcgtagtgtaatttagtttaagttcgaagttttgagatttaggagtacggatgtttgagggtaggagaagatggatattttagtttagagagagtaaattagttttttttttatttttttgttttatttgggttttaaatatattaggtgatgtttatttatattggtgagggtggattttttttatttagtttattgatttaaatgttaattttttttagaagtatgaatatagatatatttagaatcgttttagtagttatatgggtattttttcgtttagttaagttgatatataagattaattattataagttttaaatgggttgattaagttaagatggggttattagagtgggttttaatttaattttattggtatttttataagaaaaggagatttggatatatatatagagatattag

SEQ ID NO: 1565 - DNA, 6042 bp, Artificial Sequence
  chemically treated genomic DNA (Homo sapiens)
cgatagtatttattttgaatgtgaaaatattgttttatttttatgtttgtttttataatggtttatttatggtttagtggttttttattttaaacggtgatacgaagtatttgtttaatgtaaatttaaattaaaagaaaagtatcggtcgggcgcggtggtttatgtttgtaattttagtattttgggaggtcgaggcgggcggattacgaggttaggagatcgagattatttcggttaaaacggtgaaattttgtttttattaaaaatataaaaaattagtcgggcgtagtggcgggcgtttgtagttttagttatttgggaggttgaggtaggagaatggcgtgaattcgggaggcggagtttgtagtgagtcgagatttcgttattgtattttagtttgggcgatagagcgagatttcgttttaaaaaaaaaaaaaaaaaaaaaaagaaaagtattaagtttatgaaaggttatatcgtgtagatatggtaaaggttgagaagatttatttaagagaagtttggggaaatttgaaaataatgaaattaatattttaggaatgatagatgatttgaattttatatattgtgggtgattagggggattgatattcgagttatttttagagaatttttttttttggtttttttcgagacgtagttttattttgttgtttaggttggaatgtagcggcgtgattttagtttattttagttatcgtttttcgtatttaagtaatttttttattttagttttttgagtagttgggattataggtgtgtgttattacgtttggttaattttttttatttttggtagagatagggttttgttatgttgtttatttaggttggttttgaatttttgggtttatgtgatttgtttgttttagtttttcgaagtgttgggattataggtgtgaagttttaaattaatcgttttttttagagataaggttataattcgtagtttagtttggagtgtagtcgtgttattttattttattgtagtttgtaacgtttgggtttaagttatttttttattttatttttttgagtagttggggattatacgtgaatattattataattagttaattttttgtagagataggattttattatgttgtttagattggttttgaatttttgggtttaagtaatttgtttattttagttttttaaagtgatgggattataggtgtaagttattacgtttggttatattgtgtattttttttttttttttttttgagatagttttattttgtcgtttaggttggagtgtaatggtgtgattttggtttattgtaattttcgttttttgggtttaagtaatttttttgttttagttttttaagtagttgggattatagacgtgtattattatatttggttaattttttatttttttagtatagacggggttttattatgttggttaggttggttttgaatttttgattttaagtatttattcgttttggttttttaaagttttgggattataggcgtgagttatcgtatttagtttagattgtgtatttttaataagtttttaggttatgttgatgttgttggtgtggggatatattgagaaagtagtaggtttttgttgttgttgttgttgttgagatagagttttatttgttgtttaggttggagtgtagtggtgcgattttagttcgttgaaatttttatttttcgggttcgagtgatttttttgttttagtttttcgagtagttggattgtaggcgtttgttattatattcggttaattttttgtatttttagtagagacggggttttattgtgttggttaggttgattttgaatttttgatttcgtgatttatttgttttagttttataaagtgttgggattataggcgtgagttatcgcgttcggttgaaagttaggtttttgaaaaaaatttggtgtgtggtcgggtatagtggtttatatttgtaattttaatattttgggaggtcgaggtgggtggattatttgaggttaggagttcgaaattagtttggttaatatggtgaaatttagtttttattgaaaatataaagattagttaggtatggtggtgagcgtttgtaattttagttattggggacgttaaggtaggagaatcgtttgaattcgggaggtagaggttgtagtgagttgagatcgcgttattgtattttagtttgggtaataaagcgagattttgttttaaaagaaaaaaaaaaaaaaaaaaaagaatttggtgtgttattattgcgtatgtttttttaattttggtgttagtgatattttattagtaataatataggttatggttgaaggatttatatttagaaaattagtagacgttataaaatagggtttaatttgttttattaattgttttgtggttttaagaaagtgatagaaaaataagtaaaatttataataaattatatatatatatataaatatatattaacgaatatatttttttttagagaagttgttgttaaatatttattatattttattggttgtttagaaaagtttaataattatgtaaatatatgtgttttggattaggaattggtaaattttttttgtaaagatataaatagtaaatgttttaagttttgttggttaaaaagtttttgttaaaaaaaaaaattagttttaatgttatagtttaaaagtagttagagataatatataaatgagtaagtattggttgtttttaaataaaattttatttatagatattgaaatgtaaattttatattatttttatattaatagatattttttttttggtatttttttttttaattagttaaaaatgtaaaaaaatcggtaggcgcggtggtttatgtttgtaattttagtattttgggaagttaaggtgggtagagtatttgaggttagaagttcgagagtagtttggttaatatggtgaaattttgtttttataaaaaaatataaaaattagttgggtatagtagtatatagttgtaatgttagttatttagaaggttgaggtaggagaattattttaattcgggaggcggaggttgtagtgagtcgaaattgtattattgtattttagcgtgggtaatagagttagattttaaaataaataaaagaaagggaagggaaggaaagggagggagggaataaggggagggagggaggaattatttttagtttatagattatatttggtttatagattgtagtatttttcgtttttttttagattatatttaaaaaggtgtagagttgggattttaatttaggtaagatttgaaatataaggttttaggtagagagacgattaagtgtaaagatttttaggttggaatgagtttgtgttttaaggatggaaagatttacgcggttgaatagtaatgagtaagggggaataaagtagggtatgggagttaagtttaggggattttataaatttgaatataaggtttaggatattttaagtttagttgagagttttttggaagtattgagtggttttgatatttttatttttagtttatgtgtatatatatatatatatatatatatatatatatatgtatacgtgtatgtatatatttgtgtgtatatatatagataaaaataaagtatatatgtgtatatatatgggggaggtttttgttgtgtttttaggatggtggtagtggtattgttatagtttattgtagttttaattttttgggtttaagtgatttttttgttttagttttttaagtagttgggattataggtttgtattattatattcgggtaatttttgtgtttttgtagagatggggttttgttttgttgtttaggttggttttgaattgagtttaagcgatttttttattttggtttttcgtagtgttgggattttaggggtgagttatcgcgtttggttgattatattttttaaagattttttagtttgcggttatgtgtagaattaagtttggggttttaaaagaatgtagtaaaggatagtagagaggtcgttgtttaagttttttatgagatagatacggacgatgtggtttagggtggtgatagtttgggggtgataatgggtggttttgggttgtattttggaggtaaggttaagttcgaaggatttgttgagagatttatagtaggtgagtagagaataattttagggtgtttaggatttttttatgagttttgtgagtgaggttgatggttttattttatagatgggtaatttggaggcgcgcggttttttttttatgagtttgtgaagttgattttcgtagtttcgaggggtcgagtttttcgcgtcggtttttttcgtttttaacgttagtatttgggttttagggttgcgtttttttttagagtttgattacgattttcgttttcgtcgatgagttttgatttattttttaattttaagtatttcgcgttttttcgttatttttttcgtggttttaggaaagcgtttgtcgaaggtatcggtttttaaggcgggtaaattgaggtaggaggtaacgcgtttttcgttcgcgcgtgtgggaagttttcgtaggttcggcgatttatttggaggaaggtttcggttgcggcgttttgaattgtttattgttttatcgcgggggaatttcggaaaacgagtgggaaaacgagtgttttaagattcgtttcgggtcgcgcggtgtcgttttattaaattttagtcgttgttattgcgtatgcgtttttttcggtttttttttcgtttttttagtcggcgggaaaaggaggcgggagatggttcgtgcgtaggtgcgtgttaggagcgcggttcgttagggtaggttgttttgtagggtaggcgattcggggttcgttttcgcgcggtatttagcgcgtaggcgcgagttggtcgttttatacggagtcggtttgttaagtgcgtacgcgcgggagtttttggtagaaagtaggcgagtttgggtcggcgcggggttttgtgggagggtttaaggaagtaaaatggcggatttggcgaacgaaggtaggggaggcgtcgttggggatcggttggcggtcggggaacgggcggcgggaggattaggggttataagtttttggggggagtatcgtagagtgtaagggtttcgttcgttttaggttagcgtcgtggcgggttttgtagtcgttttttattgcgtttttttaggtcgggtttatcggttcggtttattattttcggtaattttagttattgtagtcgtttggttagaggagtcgggtggttatcgggatcgtagttttaaggtttttttgcgtcgtagttaagttcggggttgaagggggcgggaggcgcggttttagtgtttcggttacggatgtaaatagattttagggtttggttgtggttcggagcgcgttacgtttttttttcgttttttcgtttttcgttattcggtattttttttttttcggtttggttgtttattttttaagttcgtgaggttttcgtttttcgcgggttagtcgtatatcgcggacggaggaagtttaggtcgtttttatttcgttttcgtttcgaatttcggtttttatttttcgttagtttttttcggatttttcggggcgtttcgttttttttttatttaggtttcgtcgtaggatttgggtcgtcgaaaattttggttgttttttggttttttttgttgtatttttagataagagatcgtgcgagttttttttttgtggagcgttgatagtttatttgagtgtttttgataaggttatatttttagatttttcgagaaggtattataaggttgatgtttgtttttatttatagtcgtgttgttatcgttgtagttttaagatttttgaggtttatttttagtttttttttttttttagttgtataaatgtaggtaagttttttatttgtttggttttgatttttttattcggtgttttttgtgattggagggttttttttatcgaattgtagtaatgaatgaatgatgataggaagtgtttggttttgtggagta

SEQ ID NO: 1566 - DNA, 6042 bp, Artificial Sequence
  chemically treated genomic DNA (Homo sapiens)
tgttttataagattaagtattttttattattatttatttattattgtaattcggtagggaaaattttttagttatagggagtatcgaatgggggaattagagttagataggtagagagtttgtttgtatttgtgtaattagaaaagggggggagttaaaaataggttttagaagttttgaagttatagcgatggtaatacgattatggatggaagtagatattagttttatggtgttttttcgggggatttggaagtgtaattttgttaaaaatatttaggtgggttgttagcgttttatagaggagggattcgtacggttttttgtttggaagtgtagtaaaaagggttaaagagtagttagggttttcggcggtttagattttgcggcggggtttaaatgagggggagacgaagcgtttcgaaggattcggggggaattggcgggaagtgggggtcgaagttcggggcggggacggggtgaaaacggtttgggtttttttcgttcgcggtgtgcggttggttcgcggaggacgagggttttacgggtttaggagataggtagttaggtcggggaaggggagatgtcgggtggcggaggacgagggggcggggagggagcgtggcgcgtttcgggttataattaggttttaaggtttatttatattcgtggtcgaagtattggggtcgcgtttttcgttttttttagtttcgagtttggttgcgacgtagaggggttttagggttgcgatttcgatggttattcggtttttttagttagacggttgtagtggttggggttgtcgggagtgatgggtcgggtcggtgagttcggtttgaggggacgtaatagggggcggttgtaaggttcgttacggcgttagtttggagcggacgaaatttttgtattttgcggtgttttttttaagggtttgtggtttttagttttttcgtcgttcgtttttcggtcgttagtcggtttttaacggcgttttttttattttcgttcgttaggttcgttattttatttttttaagtttttttataaggtttcgcgtcggtttaggttcgtttgttttttgttagaaattttcgcgcgtgcgtatttaataagtcgatttcgtgtgaggcggttagttcgcgtttgcgcgttgaatgtcgcgcggaggcgagtttcggatcgtttgttttgtagagtagtttgttttgacgagtcgcgtttttagtacgtatttgcgtacgagttatttttcgtttttttttttcgtcgattgagagggcggggaaagggtcgggaagggcgtatgcgtagtggtagcgattaaggtttagtgaggcggtatcgcgcggttcgaggcgggttttgaagtattcgtttttttattcgtttttcggggttttttcgcggtgggatagtgagtagtttagggcgtcgtagtcgaggtttttttttaggtaaatcgtcgggtttgcgggggttttttatacgcgcgggcgggagacgcgttgttttttattttagtttattcgttttaggagtcggtattttcggtaaacgtttttttgaaattacgggggaagtggcgagagggcgcggggtgtttgggattggggggtaaattagagtttatcggcgggggcgggggtcgtggttaggttttaggagggggcgtagttttgggatttaggtgttggcgttgggggcggggggagtcggcgcgagggattcgatttttcggagttacgagaattaattttataagtttatgggaggggaatcgcgcgtttttaggttatttatttgtaaaatgggattattagttttatttataaggtttatgggagggttttggatattttggagttgttttttatttatttgttatgaattttttagtaaatttttcggatttggttttgtttttaaaatatagtttagagttatttattgttatttttaggttgttattattttaggttatatcgttcgtatttattttatggaagatttggatagcggtttttttgttattttttgttgtatttttttgaagttttaggtttggttttgtatatggtcgtaggttgaggagtttttgaaaaatataattagttagacgcggtagtttatttttggaattttagtattgcgggaggttaaggtgggaggatcgtttgagtttagtttaaaattagtttaggtaatagagtaagattttatttttataaaaatataaaaattattcggatgtggtggtgtaagtttgtggttttagttatttgggaggttgaggtaggaggattatttgagtttaggaggttgaggttgtagtgagttgtgatagtgttattgttattattttagggatatagtaagaattttttttatatatatatatatatatattttgtttttatttatatatatatatatagatatatatatatacgtgtgtatatatatgtgtgtgtgtgtatatatatatatatatatatagattgaaaatggaaatattaaggttatttagtgtttttagagggtttttagttgaatttggaatattttaaattttgtatttaggtttatgaagttttttgaatttggtttttatgttttgttttgtttttttttgtttattgttgtttagtcgcgtgggtttttttatttttggagtataagtttattttaatttaagggtttttgtatttggtcgtttttttgtttgggattttgtgttttaggttttatttaggttggagttttagttttgtatttttttgagtatgatttaaaagagagcgaggagtattataatttgtgggttagatatagtttatgagttaaaaatggtttttttttttttttttttgttttttttttttttttttttttttttttttttttttatttattttggaatttaattttgttgtttacgttggagtgtagtggtataatttcgatttattataattttcgtttttcgggttgaagtgatttttttgttttagttttttgagtagttggtattatagttgtgtattattatatttagttagtttttgtgtttttttgtggagatagggttttattatgttggttaggttgttttcgaatttttgattttaggtgttttgtttattttggttttttaaagtgttgggattataggtatgagttatcgcgtttgtcgatttttttatatttttagttggttgggaaaaaaaatattaaaagaagaatatttattgatgtgaaaatggtgtgaaatttatattttagtgtttgtaaataaagttttatttgaaaatagttaatgtttatttatttatatattgtttttggttatttttgagttgtgatattagagttaatttttttttttaatagaaattttttggttaataaaatttaaagtatttattgtttgtgtttttatagaaaaagtttgttagtttttaatttaggatatatgtatttatatggttgttaaatttttttgaatagttagtgggatgtggtaaatatttaatagtagtttttttggaagagaatgtattcgttagtatgtatttatgtgtgtgtatatagtttattgtaaattttatttatttttttattatttttttaagattataagataattaataaaataaattgaattttgttttgtagcgtttgttgattttttgggtgtgaattttttagttatggtttatattgttattaatgggatgttattagtattagagttgggaggatatgcgtagtagtagtatattagattttttttttttttttttttttttttttgaggtagagtttcgttttgttgtttaggttggagtgtagtggcgcgattttagtttattgtaatttttgtttttcgggtttaagcgatttttttgttttagcgtttttagtagttgggattataggcgtttattattatgtttggttaatttttgtatttttagtagagattgggttttattatgttggttaggttggtttcgaatttttgattttaagtgatttatttatttcgattttttaaagtgttgggattataggtgtgagttattgtgttcggttatatattagattttttttaagaatttgatttttagtcgggcgcggtggtttacgtttgtaattttagtattttgtgaggttgaggtaggtggattacgagattaggagtttaaaattagtttggttagtatagtgaagtttcgtttttattaaaaatataaaaaattagtcgggtgtggtggtaggcgtttgtaatttagttattcgggaggttgaggtaggagaattattcgaattcgagaggtggaggttttagcgagttgagatcgtattattgtattttagtttgggtaatagatgagattttgttttaataataataataataataaaaatttgttatttttttagtgtgtttttatattagtagtattagtatgatttggaagtttattagaaatatataatttgggttgggtgcggtagtttacgtttgtaattttaggattttgggaggttaaggcgggtgaatatttgaggttaggagtttaagattagtttgattaatatggtgaaatttcgtttgtattaaaaaaataagaaattagttaggtgtggtggtatacgtttgtaattttagttatttgggagattgaggtaggagaattgtttgaatttaggaggcggaggttgtagtgagttaagattatattattgtattttagtttgggcgatagagtgagattgttttaaaaaaaaaaaaaaaaaaaatatataatatggttaggcgtggtggtttatatttgtaattttattattttgggaggttgaagtgggtagattgtttgagtttaggagtttaagattagtttgggtaatatggtgagattttgtttttgtaaaaaattagttagttgtggtggtgtttacgtgtagtttttagttatttaggaggatgaagtgggaggatggtttgagtttaggcgttgtaggttgtagtgaggtaggatggtacgattgtattttaggttgggttacggattgtgattttgtttttaaagaaaacggttaatttgaaattttatatttgtaattttagtatttcgggaggttgaggtaggtagattatatgagtttaggagtttaagattagtttgagtgggtaatatggtaaaattttgtttttgttaaaaatagaaaaaattagttaggcgtggtggtatatatttgtagttttagttatttaggaggttgaggtgggaggattgtttgagtgcgggagacggtggttggagtgagttgagattacgtcgttgtattttagtttgggtaatagagtgagattgcgtttcgaaaaaaattaaagaaagaaattttttaagagtagttcgaatgttagtttttttggttatttatagtgtgtagaatttaggttatttgttatttttggggtgttggttttattatttttaggtttttttaaattttttttgggtaggtttttttagtttttattatatttgtacggtgtgattttttatgaatttgatatttttttttttttttttttttttttttttgagacggagtttcgttttgtcgtttaggttggagtgtagtggcgggatttcggtttattgtaagtttcgtttttcgggtttacgttatttttttgttttagttttttaagtagttgggattataggcgttcgttattacgttcggttaattttttgtatttttagtagagatagggttttatcgttttagtcgggatggtttcgattttttgatttcgtgattcgttcgtttcggttttttaaagtgttgggattataggtatgagttatcgcgttcggtcgatattttttttttggtttaaatttatattaaatagatatttcgtattatcgtttaaaatggaaaattattaagttatgagtagattattgtaaaagtaaatatgaaaatgaaataatgtttttatatttaaagtagatattgtcg

SEQ ID NO: 1567 - DNA, 8404 bp, Artificial Sequence
  chemically treated genomic DNA (Homo sapiens)
ttatttatttttaatttggattttttttatttattttttttgtttaatgttattgtagttttttatgtaggaaacgaggatttgaatagtgatggagagatgagtaatggttcgatttggaatatattttatgggtagaataaatggaatttgttggtttagaagtgggtggtggaagaaagagggaagttaaaagtgatttttaggtttatggatggatgaattggttaaattattgtggtgttatttgtttagatagggtagatggggggatgtaggattaagagaggaagagaaaagttttatttgggttatattaaatttggttatgattgtggattagataggtaaaagtaagagaaggagggaagaagttagaatatagatttttggggaaagtttatacgtagaaaaggggtggaagaagaggtattagaaagagaggtaaagaagagtaatttgaggggtagaaaaagaattaggaaagttagagaaaaaagggaaaagttttaggaaagtggtaatggttaattatgtaaataagaggggaaggaaggtgaggattgagaaaggattttttatgtaagtaataaggaggtttttggtgatttttgatagaatatttttagtagattggataaggtttttgtttgagtgtaagtgagttgaaaatgtaagtgagtgagggaagtgttttaaaaaagtttaaagtgttatgtgtgtaaggtaatgttgttatttttgttgttatggaaatagaaattatttaggagaattaaaagttatttaaaatttttgattttaatttattatattcgtttgattttttgagaaagataatgataaaaaattagttattagaggggtagggtaattttaggttttttttttttagatatagtttttaattggaaatttttattttttttgagaagggagtttgtattaatatttataatggtttttaaaaagtatagatgatttgttatattttttgatttgtttgttattggttggtattgtttataaatataatttgtttttttatttttttttgaaatgagtaatttgaattattcggaggagaaaggtaggagagatagaggtagtagaagttagggtagttgaaagatagagatttttaggtgggtattttaatttttgttttgttaatttagtgttgagtattatgatttgatgattatataatagttagaggagtaattttttaaaagtaaatttgttttgttttattataaatgttatttttttattatgtatatggtagtttaaaaaatattgtggaagtataaaaatgttgaaagaagttaaattttttattaaaatagtttttattgatattttggggatcgtttttttgtgtgtgtgtgtgtgtgtgtgtgtgtgtgtgtgtgtgtgtgtgtgtgtgtgtgagatatatatatatatatatatatatatatatatattttttgagatggggttttgtttttgtcgtataggttgaagtgtagtggtatgattttagtttattgtaatttttgttttttgggtttaagtgatttttttgttttagtttttagagtagttgggattataggtatttgttattatatttagttaatttcgtatttttggtagagatgtggttttattatgtttgttagtttggttttaaatttttgattttaggtgatttattcgttttggttttttaaattgttgggattataggcgtgagttatcgtatttggtttagattttgtcgaaattttaatatttttttggtaatgtaatagaaaattaaagattttgatggtgaatttaattgtttttgagttgtgtggatgaaaatatattttattatttttttttttaatttttaagtttttaggtatatgtgtaggatgtgtaggtttgttatataggtaaatgtgtgttatggtggtgtgttgtatagattaatttattattatggtattaagtttagtatttattagtttttttgatgttttttttttttttattttttttcgttataggttttagtgtgtgttgtttttttttttgggtttattttatggtatgtatgtgtgtatgtgtgtgtgtgtgtgtgtgtgtgtgtgtgtgtgtgtatttatttatgtgtatatattatgatatatatattatattttttttaaattattattttaggtttagggatatatgtgtaagtttgttatataggtaaattgtgtgtttttggggtttggtgtgtatagatttttttattatttaggtaataagtgtagtatttgataggtagttttttgattttttgtttttttattttatatttttaagtaattttttagtgtgtgttgtttttttttttatgtttatgtgtttttattgtttagtttttatttataagtgagaatatgtagtgtttggttttttgtttttgcgttagtttgttgaggataaaggtttttggttttatttatgtttttgtaaaggatatgattttatttttttttatggttgtaggaaaatatattttatatattagtgaatatagttaaattaatttatggttaagatatatatttttttgtaaattgagaaatttttttattataattgtaatatggtaataaataaatttagattatataaatgtaatttagatgttgataaattggttttaaataaagtaagtgatatttacgtatgaagagagtttattttagtttttagaatttttttttatttttttgttatttttatttttagtaagtaagtatttattgtgtgtgtaatattgtgttaggtattaaggtaatgatgatatttaagatttggtttttattttgaagataagtataggagaaatattattagttatgatgttttttgttgtaaataagtgaaaattttagtttagtttaggttagttttagggttggttaaattagaggtttatttataatattgaggatttagatttttttgaaattttttttgtattaatattagtatttttattttttttgtagggtggtttgttttacgttataatggttgtagtaattagaagtgttatatttttagtaatatttaatattattattattatttaataatatttagaattgtgttatttttgttttaatttattaggtttttagtagattattttttattttttaaatgttaaaattgtattttgagtttttgtttaaattaatttggggtgaggtgaatggaagtagtattttaattgtatttattttttgtagttggatttgggtttgggttattttttgatatttgtttataagaaagatttttgaagttaggtaggaatggttgttgagtaggttagtgtttgttaaatttttatatatttttatatatgttataatatgtagataaaaagataattttttatataatttgttgggataaatttaggaggtttatagtatgatttgtttgaaggttttttttgttttagattttgtttagttgttttaggatgaggggatttatattatagtataattgtattttatttatagtataaattattttttttttttttagttgacgagtttagatgggtaataatagtgtttgttaaagagaaaaaaaaatgtatttaaattagataatttattggtataaatatcgagatatagaagtgataatagttttaagttaatgtttgatggtggtagttttagtaagtttttttttgatgtttttgtgtttttgtatatgttttttttttgttattgttttttttattaaatataatataatggataagtggaattaaatagaattgagtttaaattttttgttatttatcggttttggtattggataaattaatttttttgagtttgtttttttatttgtaacgtagattagttaatattatttattggaaagcgttgttttttagttaatgtatgtaaggtttaaaatttagatgacgggttgataggtgtagtaaatttttatggtatacgtatgtttatgtaataaatttatacgttttgtatttgtatttcggaatttaaagtaaaaaaaaaaaaaaaaaaaaaaagaaagaaagaaaaagaaaaaaaaggttgtttttggggattaaataagataattatgtaaggtggttagtatagtttttggtatatagtaaatgttaggtttgtttgatagatttttatttagtagttattgtttttttgaaaattttttttagacgtttttacggtgtttttcgtttttatattattataattttttattatattattattcgtttattttttatagttttttttttttttttttttaattagtgattttaaaaggttagtaagtgtttaatattttttattttttaagtgattggtaaagtttcgtatttattagcgttttaagtttgtttttgttttggtcgattttgtaaaacggattgggcgggatgagaggtggggggcgtcgttaaggagggagagtggcgttttcgtcgagggtgtattagttagatattttttgcggggttcgagagttttttttattagatttcgggatagggatgaggtttatagttatttattagattttttgtatagtttcgttaagtgtatttcggtttggagggggtggttttgggtagaagtacgttcgggtcgcgtcggatgttttttggaaggcgtttggatttacgttaggttttttagtttaattttttatgatttagcgttttagttcgcgtatcgattagcgttttagttttttatagacgtcggcgggttcgggagtttcgcggacgtgacgtcgcgggcggaagtgacgttttttcgcggttggacgcggcgtttagttgtcgggcgggggagggcgcgttcggttttttttaggggacgttgaaattatttttgtaacgggagtcgggagaggacggggcgtgtttcgacgtgcgcgcgcgtcgtttttttcggcgtttttttatagttcgttggttttcgtcgcggaaaggcgttatgtcgtttaaaatttttcgaaaaacggtcgttatcgtcgtcgttgtcgtcgcggaattttcggtatcgtcgtcgtcgtttttttttgaggaggatttagagtaggatagcggttcggaggatttgtttttcgttaggtgagcgagtagagtcgtcgtcgttttacgcgggaagggcgtttcgggtgtgcgtagggcgggcgtaaggcggttcggcggggattcgttttcgttaggggtcgggtttcggcgggaggaggcgttttttttgtttttcgttacggcggagcgtttgtagaatggtgataggattttgggtttttgggcgaggggtttcggttttaatttgataggtgtcgggcgggtggggttagggttttgagcgaagtgataggtgtagtttttttttgtgaggttcggaggtagagggtcgttgcgagcgtttattagacgtaaaaaatgaaaaataaaaatataaaaatggtgtttgtgggagagttttttatcggagaattggagtatttcggtggtcgtttgattttttgttttggtttacgcgatgtaatagttgggaagtattttttttcgggcgtgtattgtatttgaagtttatttgtgggagaggtcgattagaaagttttggataagaagcgtagggttttgagtgtttattgtttataggatattcggtttaggagttttgcggcgtttttttagaataataatgtatcgaggttttggggatttaaagttatttgtagtgattgatggagcgtaattttttagaggaattgaaatatgggtaaaatttttatgagatatttattagaagtgtttgaaagtttttaaattttttttttttttgtttgatgaattttttttgcgtgttagtcggtttcggtttgttttattattttttttattttgttttttgattttgaattagtaaggattttggtgttttttttttttgtttttgtttttggtataaaattagtggttttgtgcgtaaatggaaattttcgtttttttttattaagtggaatttaaatttaagtaagtttatacgaatgtattagattttgaagggaagtatttattgtattataatattttattttttttgatttttttattttatggttaaatagttatgattgaaagagtgtaattgttattattgttagtattggttttattttgagataagtttattgtagagggaatgggatttgtttttgttttttattatttttttttttatttttgtttattattaaatttttttatttttatttatttttttttattcggtatatattaataatttacggtagaaaagattgaagtgggatttaggaaatggtttttggaaggttattaaaaatttatatatttaaatggattgttttataggttagttaaaaattatattcgttaaaaaattaaaataataataataaaaaattaaaaattacgtttggggtatgttttgggaaaagatatggttttagtttttgattaaattttgatgtatttaatttttgtaaattttttttgggaaaatgtagtaatggttattttaaagaattttatgttatgtatatagttttggaagtatattttaatgtagggtaattaggaatattgacgttgtggttattgtttggaaaaaagaggattgttttttttattttttaatttattttatatattttaagtaatggaattataaaaaatttttttataagttaaaattatataagatatagtttgtttttgattatttatatttataaagggttttattaatatagatagttgaattttataaattaattagtaagggtagaattattgtcgtgtagtttgatattgagtattttgtttggagatggaattaaggtttagtttaattgtatttttagtgatagattttatttttgatttgagagtttagattttatttttgttgttttatttttggtttaagtaatgtagttggaagggaaattgttattaggaatagtatattatatttattgttgaaataattaaaggttaattatgtttcgagttgggtgtgatggcgcgtatttgtagtttatgttatttaggaggttgaggtaggaggattatatgagtttgggagttggaggttagtttgggtaataacgtaagattttagtttttaaaaaaataaaaaagttgattaggtatgttggtttacgttgtaatgttagtattttgggaggttaagatgggaagattgtttgaggttaggagtttgagaggagtttgggtaataaaataagattttgtttttaaaataaattttaaaaaattagttagtggttgtggtatatttgtaggtttatttatttaggaggttgaggtgggaggatttttgagtttaggagtttgagattgtagtgagttatgattttattattgtattttagtttggatgatagagtgaaattttattttaaaataagaaaaaaaaataaaaattaattatgttttgaaggaggaattggtagtttagaatagtggttaagggtatggattatagagttagattgttgggtttatatagtggtttattttttatcggttgagattttaggtaagttttttaatttttttaatttgatagatatttgtaaatgtttatttttatagatgagaatatttatttaaaagggttgatgtcgggatttagtgaaattatatgtttaaggtattttttataggattatagtaaatatttaaaaattattaattattttttatattatttttattagtagataatatatagaaattagatgaatgaaaatgaattagttaataagaatttattaaatgtttgtttttgttaaggggaaaggataaaaataagtagtcgtattatgtaagatgtgttagtaggtagagagatatatgaaatattgataagagaagattatagtttaataaagttattggcgttgaattgtataatattatttatgggtttttatttttttgttgttatttttattttatttttttaaatagttttagttattatatttatttttttttatagaagtgttttgttgttttgaagtatatttgatttattatgtaagtaaatattttttattgtgtggtatttttattttggaatgattatgaaaaagataattatatgtttaaatttgaagtgtaatgtttttttaagataaaataagattttaaagtatttaataatgtttttttttatagtagtgttatgtgtaaattattgaaataagtatgtattgaattaatttgatttataagtatatgttaattatatgattatttttatttggtagg

SEQ ID NO: 1568 - DNA, 8404 bp, Artificial Sequence
  chemically treated genomic DNA (Homo sapiens)
tttattaaatgaaaataattatataattggtatatatttataaattaaattgatttagtatatatttgttttaatagtttgtatataatattattgtgaaaaagaatattattaaatattttaagattttattttattttagaaaaatattatattttaaatttaaatatatgattattttttttatggttattttaaaataaggatattatatagtgaaaaatatttgtttgtatggtaagttaaatatattttaaagtagtaaaatatttttgtgaaggaaagtaaatgtaatagttaaagttgtttgggaaaataggataaagataataataaaaagataaaaatttatagataatattatataatttaacgttagtgattttgttaaattgtagtttttttttattaatgttttatatatttttttatttattagtatattttatatgatgcgattgtttatttttgttttttttttttaataaagataagtatttaataaatttttgttggttaatttatttttatttatttaatttttatgtgttatttattaataagaatagtatgaagaataattaataatttttgagtatttattatgattttgtagaaagtattttaaatatatggttttattgaatttcgatattagtttttttagataagtatttttatttgtaaaagtagatatttatagatgtttgttaaattggagaagttaaagaatttatttgaggttttagtcggtaagaggtaaattattatgtgagtttaatagtttaattttataatttatgtttttgattattattttagattgttaattttttttttaaaatataattagtttttgttttttttttttgttttgaaatagggttttattttgttatttaggttggggtgtagtggtgaaattatggtttattgtagttttaaatttttgggtttaaggatttttttattttagttttttgagtagatgagtttataggtgtgttatagttattggttaattttttaaaatttgttttagagatagggttttgttttgttgtttaggttttttttaaatttttggttttaagtaatttttttattttggttttttaaagtgttggtattatagcgtgagttaatatgtttggttagtttttttgtttttttaaagattggggttttgcgttgttgtttaggttggtttttaatttttaagtttatgtgatttttttgttttagttttttgagtagtatggattataggtacgcgttattatatttagttcgaaatatgattaatttttgattattttaataatgaatgtggtatgttgtttttagtgatagttttttttttagttatattatttaggttagagataaggtaatagaaataagatttaaatttttaaattaggaatggaatttgttattggaggtgtagttggattgagttttgattttatttttaggtaagatgtttagtattagattgtacggtagtggttttatttttgttggttaatttatagagtttaattgtttatgttaatgaaattttttgtgggtatggataattaagaatagattgtattttgtatggttttgatttataagagaattttttatagttttattatttaaaatatataaaatgagttaaaaaatgaaagaaatagtttttttttttttaagtagtggttataacgttaatatttttggttattttatattagagtatgtttttaaagttgtgtgtataatatggaattttttagagtagttattattgtatttttttaagggaaatttgtaagaattggatatattagaatttaattagaaattaaagttatgtttttttttagaatatgttttagacgtggtttttaattttttgttgttgttattttggttttttaacgaatatggtttttaattgatttataagatagtttatttaaatatataaatttttaatagttttttaggggttattttttaaattttattttaattttttttgtcgtgaattgttagtgtatatcgagtggaaagaaatgggtgagggtgaaaggatttggtgatagataagaatgggagagaaaatagtgaaaaatagaaataagttttattttttttgtaatgaatttgttttaaagtagaattagtgttgataataatgataattatatttttttaattatagttatttaattataaagtagaaaaattaagaaaagtaagatgttgtaatataataaatatttttttttaagatttagtgtattcgtatggatttgtttaaatttagattttatttaataagggaaaacgaaaatttttatttgcgtatagaattattaattttgtgttaaaaataaaggtaaaaagaggggatattaagatttttgttggtttaaagttaaaaggtaaaatggaagaaataatgagataagtcgaagtcgattaatacgtaagaagagtttattaaataggaaaaaaaaaagtttagaaatttttaagtatttttggtaaatgttttatgaaagttttgtttatgttttagtttttttaaagagttacgttttattaattattatagatggttttgagtttttaaggtttcgatgtattattgttttaaggaaacgtcgtaaagtttttgagtcgagtattttgtgggtaatggatatttaggattttgcgttttttgtttaaggttttttggtcggttttttttataaatggattttagatgtagtgtacgttcggaagaaaatattttttaattgttgtatcgcgtgaattaaaatagaaagttagacgattatcggagtattttaatttttcggtgaaaaatttttttatagatattatttttgtatttttattttttattttttgcgtttgatggacgttcgtaacgattttttgttttcgagttttataagagggaattgtatttgttatttcgtttaggattttagttttattcgttcgatatttgttaagttgaagtcgagatttttcgtttaagaatttagaattttgttattattttgtagacgtttcgtcgtggcggggggtagggagggcgttttttttcgtcgggattcggtttttggcgaggacgggttttcgtcgagtcgttttgcgttcgttttacgtatattcggggcgtttttttcgcgtgaggcgacggcggttttgttcgtttatttgacgagaggtaggtttttcgggtcgttgttttgttttgggttttttttaggagggggcggcggcggcggtgtcgggggtttcgcggcggtagcggcggcggtggcggtcgtttttcggggggttttgggcggtatgacgttttttcgcggcgggagttagcgagttgtggaggagcgtcggggaggacgacgcgcgcgtacgtcggggtacgtttcgttttttttcgattttcgttataaaaataattttaacgttttttgagaaaaatcggacgcgttttttttcgttcggtaattgagcgtcgcgtttaatcgcgggaaaacgttattttcgttcgcggcgttacgttcgcgaggttttcgggttcgtcggcgtttgtggggaattggggcgttggtcggtgcgcgggttgggacgttaagttatgaggaattaaattgggaaatttggcgtgggtttaggcgttttttaggaggtattcggcgcggttcggacgtgtttttatttagaattattttttttaggtcggggtgtatttaacggggttatataaagagtttggtgggtgattgtgggttttatttttatttcggggtttgatagggaagattttcgggtttcgtagggaatatttggttagtgtattttcggcgggagcgttattttttttttttggcggcgttttttattttttatttcgtttaattcgttttgtaaagtcggttaaaataaaaataaatttggagcgttgataggtgcggaattttattagttatttagaagatagaaaatgttagatatttgttggttttttgggattattggttagggaaaggaagggagggagttgtggggaatgaacggatagtagtgtaataaaggattgtagtggtgtaagaacgggaagtatcgtggaaacgtttgaggaagatttttaggggagtagtagttgttgaatagaagtttgttaggtaggtttgatatttattatgtattaggaattgtgttggttattttatataattgttttatttaatttttagaaatagttttttttttttttttttttttttttttttttttttttttttttttttattttaagtttcgggatataagtgtagaacgtgtaggtttgttatataggtatacgtatgttatggaggtttgttgtatttattaattcgttatttaggttttaagttttgtatgtattagttaagaaataacgttttttaatgggtagtattagttagtttacgttgtagatgaggaaataggtttagaggagttaatttgtttaatattagggtcgatgggtagtagagaatttgaatttaattttatttgattttatttgtttattatattatgtttgatgaagaaaatagtgatagagaaggagtatgtgtaaaggtataaagatattagaaaagagtttgttgggattattattattaaatattggtttaaagttgttattatttttgtgtttcggtatttgtattaatagattatttagtttgaatatatttttttttttttttggtagatattgttattgtttatttgaattcgttaattgagaaggaaagagatggtttatgttgtgaataaaatatagttgtgttgtgatgtaaatttttttattttggagtagttgagtaaggtttaaggtaggaagaatttttaagtaggttatgttgtaagttttttgagtttattttagtaagttgtataagggattatttttttatttgtatattatgatatatgtgaggatgtgtaaaggtttggtaagtattggtttatttaatagttatttttatttaattttagaaattttttttgtgggtaaatgttaggagatagtttaggtttaggtttagttataaagaatgaatataattaaagtgttatttttatttattttattttagattagtttaggtaagagtttaggatgtagttttgatatttgaaagataaggagtagtttgttgggagtttgataaattgaaatagggatggtatagttttaaatattattaaataatagtaataatattaagtattattgaggatgtgatatttttgattgttgtagttattgtaacgtgaggtaagttattttatagagaaggtagaaatgttgatattggtgtaggaggaattttaaaagaatttggatttttagtgttataaatgagtttttgatttggttagttttggagttgatttaagttgagttgaggtttttatttgtttgtaatagaaagtattatgattgataatgttttttttgtgtttatttttaggatagagattaaattttgggtattattattgttttagtatttagtatagtgttatatatatagtaaatgtttgtttattaaaagtagggatggtaggaaagtgaaggaaagttttaggaattgaagtaaattttttttatacgtagatattatttgttttatttaaaattagtttattaatatttagattatatttatgtaatttagatttatttattattatattataattatgataaagagattttttaatttataaaagaatatatgttttgattatggattaatttaattatgtttattagtatgtaaaatatatttttttgtagttataaaaaggaatgagattatgttttttgtaggaatatggatggagttagaagtttttatttttagtaaattaacgtaggaatagaaaattaaatattgtatgtttttatttataagtgggagttaaataatgagaatatatggatatgaagaggggaataatatatattgggggattatttgagggtgtagggtgagaggatagaagattaaaaaattatttattaggtattatatttgttatttgggtggtgaaaaaatttgtatatattaaattttagagatatatagtttatttatataataaatttgtatatgtatttttaaatttaaaataatagtttgaaaaaagtgtggtgtatatattataatatatatatataaatagatatatatatatatatatatatatatatatatatatatatatatatatatatattataaaatagatttaggaaggggaataatatatattggggtttgtagcggggaagggtggggagagggagagtattaggagagttaatggatgttgggtttaatattatggtgatgggttgatttgtgtagtatattattatagtatatatttatttgtgtaataaatttgtatattttatatatatatttgggagtttaaaagttgaaggaaaaaataataaaatatatttttatttatataatttagaagtaattgagtttattattaaaatttttagttttttgttgtattattaaagaagtattagaatttcggtagagtttagattaggtacggtggtttacgtttgtaattttagtagtttgggaggttaaggcgggtggattatttgaggttaggagtttgagattaggttggtaaatatggtgaaattatatttttattaaaaatacgaaattagttgagtgtggtggtaggtgtttgtaattttagttattttggaggttgaggtaggagaattatttgaatttaggaggtagaggttgtagtgagttgagattatgttattgtattttagtttatgcgataagagtaagattttattttaaaaaatatatatatatatatatatatatatatatatattttatatatatatatatatatatatatatatatatatatatatatatatatatataaagggacgatttttaaaatattaatagaggttattttggtggagaatttggttttttttaatatttttatatttttatagtattttttaaattattatgtatatgataggaaaataatatttatagtagaataaaataaatttatttttaaaaaattatttttttgattattatgtgattattaagttatgatgtttaatattgaattaataaaataaagattaaaatgtttatttgaaggtttttgttttttagttgttttggtttttgttgtttttattttttttgtttttttttttcgagtaatttaggttgtttattttaaagaaaagtgaaagagtaaattatatttatgaatagtgttaattaatagtaagtaagttaggaagtgtagtaggttatttgtgttttttagaagttattgtagatgttagtgtaagttttttttttaagaagggtgaaaatttttagttaggggttatgtttaaaaagaagaaatttaaaattgttttgtttttttaatgattggttttttgttattattttttttaagagattaagcggatatgatgggttagagttaggaattttaagtggtttttagtttttttaaatggtttttgtttttatggtaatagaaatagtaatattgttttatatatatagtattttagatttttttaaagtattttttttatttatttgtatttttagtttatttgtatttaggtagagattttatttagtttgttgaaaatgttttgttagaggttattaaaaatttttttgttgtttatataaaaaatttttttttagtttttattttttttttttttttgtttgtatagttgattattgttatttttttgaaattttttttttttttttttgatttttttggttttttttttattttttagattgtttttttttgtttttttttttgatgtttttttttttattttttttttacgtgtgagttttttttagaggtttgtgttttgatttttttttttttttttttgtttttatttatttgatttataattatggttaaatttaatgtggtttaggtggagttttttttttttttttttagttttgtatttttttatttattttgtttaagtaaatggtattataataatttagttagtttatttatttataaatttagaagttatttttaattttttttttttttttattatttatttttgagttaataagttttatttgttttgtttataaaatatgttttaaatcgaattattatttatttttttattattgtttaaattttcgttttttgtatagaaagttgtagtaatattaagtaagaaaaataagtaaaagggatttaaattggaaataaataa

SEQ ID NO: 1569 - DNA, 5195 bp, Artificial Sequence
  chemically treated genomic DNA (Homo sapiens)
ttagttataaattttttgtttaggttgatgtttagaagagtgttttttaggtttttttttaggatttttatagtttgaagttttatatttaagtttttaatttattttgagttagtttttgtagttggtgagaggtaggggttaagttttatttttttgtatatatttagttaatttttttagtattatttattaaataggatggaaaatgatatattttaaaatttaaatttattaaatagattatttagaataaatttttaatatgataaaatgttgattttattgtttaatttttattttagtgtttttgttttatttaaagtatagatttgttgtttgttttttttggatagaatattaattgatggagaaaatgaaggaaaaagttaaaattttaggtgttaatattttttaatgataaatttatttagataaattttgaaatgataattaagttaatgtgaaaattttattgtatttatatagaatttttttaagaaatgtaaattatttggtaataataaaaggataataagaatagataatatataaaatatatattttgtgataggtatttttttaagatttttatatatattattttatttaatttttggggcgtttttttgagataaagttttatttttgttgtttaggttggagtgtaatggtatgattttcgtttattataatttttatttttcgggtttaagtgatttttttgttttagttttttaagtagttgggattataggtatgcgttattatgtttagttaattttgtatttttagtagagacggggtttttttatgttggttaggttggttttgaattatcgattttaggtgatttttttattttagttttttaaagtgttgggattataggagtgagttatcgtgattggtttattttatttaatttttataattttataaggtaggtattattattattttataggtgagaaattgaggtatatagaaattaagttagtttgtttaaggttatagttagtaagtgatagtaatttattttaaaattattagtttaaatatggtttaattaaaaaatgtgtatatgaggtgaattagatttcgtatttgatgttagagggagatatataaagattttttttttgaagattttgaaatttagataaatattataaaatgttaaatattaatataagagtgaaataaaaattttagataatttttttaaaaatttataaagaatgatttaatttttttaaattttttgtttaaataagtttttagtagtattttatataaatgagtacgcgtaatttttaattttattattgttaaatttttttgttgtagttaatgatttttataggaagttatgtttatataatagttaaaatatatgtttacgaggtagaagtattaatatagaaattaataatattttgggttaattaagtgtattttatattattatattgaatttattttttagttttattttagttagattatttgtttttataattatttattatggaaaggattttttgtaggtaggaattttaggtatatttggtagttaattgtataggatttttttatttgtatatttgtttttatgaaagttttgtgtttgtatttaattgggggtataattaggtattttagagataatttggttggtgaaaattatattatttttatttaaattgatgtgatggtttgatgattgtaattattgagaatatcgtattgaaaaaattaatttatttttttgtatttgaaaatatggattgattaatttttttattttttaattaattattttgatattttttaaatgtagttagaagataaatgttgttttatttttttgttttttattttttttggtttcggtttagatgtgggtataaatgttattttgtataaaatggagttggttgttagtgtttaatttttatgagggtaaggatataaatgttttgtattagttttgtgagttatggtaaaattttttttagttttttttaggagttagtgatgtgtttgatgttgtgaaggttaaggtaatagtaatttttgttataggtaattttttaaattttagtagttttatttagtggaagtttattttttatttatataaagttagttattagtggggattttggtagataagagaagaaaagagaggatgtgaataattgaacgggtagtttttttgagttttgtttgggagtgatatagtttttttcgttggttagaaggttcgtggttttatagagtttcgggaagtggggacggggaaggtaggggttggtagattggtagtttttaattttataatatggaaggggattgtaaattttttggtgaaaggttaagtagttatttgtgttataagtattaaattttgaggaattatatattagaaagggtgaattttgaataggtttttaaaaataaatgttttatggagtttgtatagagtgattaattttagtaaaagaaattatatttattgattaagtatttattatgaataagttttttgatatatttagtggaaaagtggggagaatggggataggtataaagatgaatgaaagaaatatggtttgtttttttatgaagtatggtaaggaaatgaatgaaattttgtgtatattatatacgatttataagatgtaatttaaaatataattttatttataggaaaaggagtaagaaaaatatttgtaaaggaaatatttgttttattttttgatttacgtttttattatagaaaattttaaaaatataaaaaggcgtaaagaaaaaattttttagcgtttttaattttattttatagagatatttattatgaatatttttttttttgattttatatatatatatatttgaaaagttaatgtatgaggattttttttaaagtattgaagttaagaatattagttgatttgaattaatttatttgtaattatgaagaaattttagaaagaatgttaaagtaaattgtttttttttgttggtatttggagtattaaggtttatgatttattattaaaagaggaggggtagaggaatggttatattaatttttttttttttttttttattttaaatttttattttgaaataatttttaaatatttaataaataaatgaaaatttgttgttgtattaaaattattatcgaaatgaattgaaatattttttattatttaatttatagtgtgtgtaagggttattagaatgtgttttaggagaaatggttgtaaggttagggggtattaggagaacgtttttggtaggaataattgtttaaaggtaattgggttaagttaggagttttttattattaaagaatttggagtaaaaattggaagattttttttttggaatgtcgaagaggggatttaagtattgggtaggagatagagaggtgttttaaaatttttttttatttagggtgtatagatatatattttatagggttttgtaggagacgatttgaagtagaatttatttgagttgtttgggattatatagttttttataaaattggtttaattagaagattttttagttagtttgttgtttagaaataggtttttttagttttgcggcggttaggagttaaatgtattatcgttggttttttagatattgttgggatttaaatgggtgtaagagtgaaggggaaggtgggaaaaagatggagaagtaggggggaaggaagttatagatgttatttttttaggatgtttagaattagttttaatgttttatagataaaggattggtttgagaattaattaattttttatttttgtttggtagttatttttttttttttcgatttttttttattttaggtcgggttgtagtaaaatggtttaaattgatttcgaatttttttaatttaggttatggagatataatcgatattgtatggaaagaattttaagaagagatatttttttgttatattatgaatttttatttcgttatttttattttttgattggttgttttgattaaacgagtggaattttaatttcgaatagaaagagaaaaatagggttagtaaattgtgttattatataggaaaatatttaaattagttatattgttttgatttaattggttattgaagttatagaatgttgtttattttttttttttttgtttattttttagttaataaaataatcgattttagttgttttgaaaataaatgaaaattttaatatgggtttgaaataaaattgtattataaataatcggtaggtgttttttaaagtggttttagggaagtgttacggagtaagtaggcgattatcgaggttgttaaaatattttttgttttgattagggttgcgtttttggagaatatttaatagggagggttttaacgtttttaaagatgttgaaattaaagaataaatattgattagagggtattataacgtttttgaaagagagtaaaatatattttttataaaatgaaaaattatttggatgaattattttaaaatttttgtataagtggattttagaaggtagacggaggcgttaatttggtatggttagggtttgggtatttacgtattagggagtttcgcgggttcgttttcgttttgtgaggttacggttttttcgttaggttgattcgagttttttgttagagttattggtttcggaggttattttagatcgtagttggcggtcgttggtacgagtgtagggtaattgagttagggtcgttggcgtatttggtttggtcgaggttatttcgcgcggtcgttttattgtgttcgaggttgttttggaggtgaggtcggtttatagggattttgttcgtgttcgggtttcggtgagttagggcgcgttatgtaagtgttttcggcgtttttttttcggttttttatttcgcgcggttacgaaagcgcgatttttttttttcggcgttataaagtagcggggcggtcgcggcgcgttcgtttttttcgttttacgcgcgttcggattcggcggttaggtttgcgcgcggtttttttttcggtggtgagtcgcggtcggggtttcggggtcggcggcgggatgggtcggggtggggtggggtggggtgaggtgggatacggcggcgggggtcggttgtcgggtattgacggaggcgcgtttttcgtagg

SEQ ID NO: 1570 - DNA, 5195 bp, Artificial Sequence
  chemically treated genomic DNA (Homo sapiens)
tttgcgggagacgcgttttcgttagtgttcggtagtcgattttcgtcgtcgtattttattttattttattttattttatttcggtttatttcgtcgtcggtttcgaggtttcggtcgcgatttattatcgggaggggaatcgcgcgtaagtttggtcgtcgagttcgggcgcgcgtggagcgagggaggcgagcgcgtcgcggtcgtttcgttgttttatagcgtcggggggagggggtcgcgttttcgtaatcgcgcggggtgaaagatcgaaggggaggcgtcgggggtatttgtataacgcgttttgatttatcggagttcgggtacgggtagggtttttgtgggtcggttttatttttaggatagtttcgggtatagtggagcggtcgcgcggggtggtttcggttaggttaaatgcgttagcggttttggtttagttattttgtattcgtgttagcggtcgttagttgcggtttagggtggttttcggggttagtggttttggtaggaggttcgagttaatttggcgggaagatcgtggttttatagagcgagagcggattcgcgaggttttttggtgcgtgagtgtttaggttttggttatgttaaattggcgttttcgtttgttttttgaggtttatttgtgtaggaattttggaataatttatttaagtagttttttattttataaaggatgtattttatttttttttaggagcgttgtggtgttttttggttaatatttgttttttagttttaatatttttaaaagcgttaaaattttttttgttaaatattttttagaaacgtaattttggttaggataggaaatattttagtagtttcggtggtcgtttgtttatttcgtggtatttttttgaaattattttgaaaaatatttatcgattgtttatgatgtaattttattttaaatttatgttggaatttttatttatttttaaaatagttaaggtcggttgttttgttggttggggagtagataaaggagagaagagtaaataatattttataattttagtagttaattgaattaaaatagtgtgattagtttaggtatttttttgtgtgatggtataatttattgattttgtttttttttttttgttcgaagttagagttttattcgtttgattaaagtagttaattaaaggatgagaatgacggaatgagaatttatgatgtggtaaagaagtatttttttttgagattttttttatataatatcgattgtgtttttatggtttaaattggaaagattcgagattaatttgggttattttgttgtagttcgatttgaaataagaggagatcggggaagaggaaggtggttgttaaatagaaataaggagttgattggtttttagattaattttttatttatagggtattagggttaattttgagtattttgaaaagatgatatttgtggttttttttttttttgtttttttattttttttttatttttttttttatttttgtatttatttgagttttagtagtgtttggggagttaacggtgatgtatttaatttttaatcgtcgtagagttaggaaagtttgtttttggataataagttgattaggaaattttttgattgggttagttttatagaagattgtgtaattttaaatagtttaaataagttttgttttagatcgttttttgtaggattttatggggtatatatttatgtattttgggtgggaaaggattttagggtatttttttattttttgtttaatatttggatttttttttcggtattttagaggagaggttttttagtttttgttttaggttttttagtgatagagagtttttagtttagtttagttgtttttggatagttatttttgttagaaacgtttttttaatattttttggttttgtagttattttttttagaatatattttggtggtttttgtatatattgtaggttgaataatgaagggtattttagtttatttcgatgatggttttgatgtagtaataagtttttatttatttgttgggtgtttaaaggttgttttagagtaaaaatttgaggtgaaaaaagaaaaaagaaagttggtgtaattatttttttgtttttttttttttaatgataaattatggattttagtgttttagatattagtagaggaaaatagtttattttggtattttttttaggatttttttatgattataaataagttaatttaggttaattgatgtttttaattttagtattttggaaaaaatttttatatattaattttttaaatatgtgtatatgtaaagttaaaaggaaaaatgtttatagtgaatatttttgtgagataggattagggacgttgaaagattttttttttgcgtttttttgtatttttaaaattttttatgatgaaaacgtgaattagaaaataaagtaaatattttttttataaatattttttttgtttttttttttgtaggtaaaattatgttttaaattatattttatagatcgtatataatgtatataaaattttatttatttttttgttatgttttatggagagatagattatgttttttttatttatttttgtatttgtttttattttttttatttttttattgggtatattaagagatttgtttatagtaggtgtttaattaatagatataattttttttattgaaattagttattttatgtaaattttataaaatatttatttttaaagatttgtttagagtttattttttttaatatataattttttaggatttagtatttgtagtataggtggttatttggttttttattagaaaatttgtagtttttttttatgttgtaaagttggggattattagtttgttagtttttgtttttttcgtttttatttttcgaagttttgtaaggttacgagttttttggttagcggaaggggttgtgttatttttaggtagagtttagaaaagttgttcgtttaattgtttatatttttttttttttttttttatttgttagggtttttattggtgattgattttatgtgaatgagagatgagtttttattggatgaagttattgagatttgagaggttatttgtaatagaagttgttgttattttaatttttatagtattaaatatattattaatttttaaaaaagattgaaaagggttttattataatttatagaattaatgtaagatatttgtgtttttatttttatgaaaattaagtattagtaattagttttattttatataaagtaatatttatatttatatttggatcgaggttaagaaaaatgaaaaataaggaagtggagtagtatttattttttgattgtatttaaaagatgttaaaataattggttgaaaaatggaaaggttagttagtttatgtttttaggtataaagagataaattaatttttttaatacggtgtttttagtggttgtagttattagattattatattaatttggataaaaataatatggtttttattaattaaattgtttttgagatatttggttatatttttaattaagtgtaggtatagggtttttatgagagtaaatgtgtagatggaagggttttgtgtagttggttgttagatgtgtttgaaatttttatttatagggggttttttttatgatgggtaattataggaatagataatttggttaaggtggaattgaagagtgggtttagtataataatgtgaaatatatttaattagtttaggatattgttgatttttgtgttggtgtttttatttcgtaggtatatgttttggttattgtataagtataattttttgtagaagttattaattgtagtaaaaaaatttaataatgatggaattagaaattacgcgtgtttatttatgtagagtattattgaaaatttgtttaagtagaaagtttaaggaagttaaattattttttgtggatttttaaaaagattgtttggaatttttattttatttttgtattagtatttaatattttatgatatttgtttagattttaaaatttttaaagaaagagtttttgtatatttttttttagtattaagtacgaagtttagtttattttatgtgtatattttttaattgagttatatttaaattggtagttttagagtaggttattattatttgttggttatgattttgggtaagttaatttaatttttgtgtgttttagttttttatttgtaaaatgataatggtatttattttataagattgtaaaaattaaatgagataggttagttacggtggtttatttttgtaattttagtattttgggaggttgaggtgggaggattatttgaggtcggtagtttaagattagtttgattaatatggagaaatttcgtttttattaaaaatataaaattagttgggtatggtggcgtatgtttgtaattttagttatttgggaggttgaggtaggagaattatttgaattcgggaggtggaggttgtggtgagcggagattatgttattgtattttagtttgggtaataagagtgaaattttgttttaaaaaaacgttttaaaaattaaataagataatatatgtaaggattttaggagggtatttgttatagagtatatattttgtatgttatttatttttattatttttttattattattaggtggtttatattttttaaaaaaattttatgtaaatgtagtggagtttttatattgatttagttattattttagagtttatttaaataaatttgttattaaaaaatattagtatttaagattttgatttttttttttattttttttattagttaatattttatttaaaaaaaataaataataaatttatgttttgaatgaaatagaagtattgaggtaaaaattaaatagtgaagttaatattttgttatgttaaaaatttattttaagtgatttgtttggtaagtttaaattttaagatatgttattttttattttatttaataaatggtgttgggaaaattggttaaatatatgtagaagaatgaaatttgatttttattttttattagttataaaaattgatttaagatggattaaagatttaaatgtaagattttaaattataaaaattttagaagaaaatttaggaaatatttttttgaatattagtttaggtaaagaatttatgattaa

SEQ ID NO: 1571 - DNA, 5487 bp, Artificial Sequence
  chemically treated genomic DNA (Homo sapiens)
atttgtttgttatggtttgaatgtttttggtttttttaaaatttatattgaaatagaatttttaatgtaatagtattaagaggtgtggtttttaggaagtgattgatttagaatttttatgaaaaggattagatgtttttataaaataatttgatagagagagttagtcgtttttgtttttttattttttttgttacgtgaggatatagtgtttttttttttcggagggtgtagtaataaggtgttattttggaagtagaaagtagttttcgttagatacgaattttgtttatattttgattttggattttttagtttttagagtagtgagaaataaatttttgttttttataaattataaatatagatttataaatttttataaattataaatatttataaatttataaatttataatatatttataatatataaatatatataatatttaatattttaaataaaatatttaatttaaatattaatattaaatatttaatttaaataaatatataatttaaataatttaaatataatatttaaagataaataatatataattaatatataataaatttataaaatataaattataaataaatttataaatatagatttataaatttttataaattataaatatagatttataaattattttgttttaggtattttgttttagaagtataaatggattaggatattgtttttagaagtgtatatattgtgtatagaaaatttttggaaagttatgttttaatgttaatagtagttatttatgagaatgggatttgagatttttttttttttttttttatttgtatatattgatttttttaaaataaataagtaagtaaaaataaataagtaagtatgtataatttgtgtaatttttttgtttttatattgtcgtttaggttggagtgtagtggtacgatttcggtttattgttttttttgttttttaggtttaagttatttttttattttagttttttgagtagttaggattataggtatatgttattatatttaattaatatgttttttcgtattttgtttttatagatttggggttttgttatgtttttaaggttgattttgaatttttaggtttaagttatttgtttgttttagttttttaaagtgttgggattataggtatgagttattgtgtttggttaatttttagttttattttttaaatagaaattaattttaaaattttatagatttgagttttatttcgaattaaaaaattaaagtttaaattaattatagttttttgaatattaattatttcgtgatggagttgtaattagagtaattgtatttttttttttttagtgagatttgtgaatatttaagatttgaatgtatggtgtgattataaagttacgtttgagtttttttaaatattcgagaatttataaatttaagaagtgttgttttttaaagttattttgtttgttttagttttgaattttttttatgaaattgtttttagagttggtttagtaacgttaaagaaaataaattttattataatttagaagaaatatttgtttaagttatagttttatttttttttttatgtttttttttttagtgttttttatttttattgttaatgtgtttgattaagattttaaggttttattgttgaaaatttggggaaaagagtgtgggaagaggttttgaggtataataaagtttggggtttggggaggagtatagggagggggttggatagtttgaatgtgaggtttaaaagtaaggtgattatattatttattattttattttggtatatttttgagtgtgaaagagttatgattaataattatgttaggttaattaggatgtatgattattttatgtgaatagggagaaagttaggaaggtattttaatatttgtttatttgggttatttttagggtaagagatgtattagtataattgattaagggttataaatgtgaattgtcggaagtggaggatggtttttatttgaggatggagttattattatatttgattattgggatagatttatttttaatttagggaaattttatttagtgaaaaagttatattgaattttttgaaagtatttttaataggttaaaagattttgtgattatttatatatttagatattttttggaaatgaaaagatttttaaggtattataatatatttatttatttatatatgtttttgttattttttaagattttattataattttggaatttttatatttttttttttttttaaaagattgataaaagattaaatagttaataaaatttttttaattgtatggttatttagtttaagttgtttttttatttattgttttatagtttgtttttttgttttgtgttttttatttgtgtaaagttgtagttttattgagtttgttggtttttttatttaagttgtttattgtattaaattttatttattttggtggaaattagtttgtaatataagggtttatgttatatatgttaaatattgttttgttttttaagttattgtttattgtaatatatattttattaaatttaaaaagtaagaaatttataaattttttttttaatagttttaaagttaattttattatttataatatatatttttaaaagaatgttagaatagttgaatttatatattttataaaaatttattgagttttttttttttgtacgtgtattaggagaaattatatagttttttattttaaggtttttatagtatataaatttaagatatttgtgtattttaggtaaattatattttaataaaaatataaataaaattaattttgttatatgttatgggtttttataggttaagaaaattgatttttggatttttataatatatttttttaaataggttatttattttagatatttattttttttcgagtagaatggattaattataagtaatgatattggattagttttgttttttttaagtataggtttttattgtaatttgtttttaaataattttaataaaatcgttgattttaagagttaaaaagttgtttagagttttttttagggatttttaattttttttgttatatggattttttgaaattttgataaaagtaaagttatagattttttttttggaaatatatatatgtattaagattttgggataaatatattattgaaaattatgtagggattatttaggaatttaaagattttaaattaagatttattgagataatataattttttttttttagatgaaagtaatagatttagggagcgaaaatagtttgtttaggggttgaagatagaatttagttttttgatattgtttattttattgtttttttagatattattaagtttttttggtttttaaaatttttatttgtggattttttgagtttagaagaatttttatagtattttgtagtttattttttataattggagttacgtcggaagttggttaaagtttattttttatttattggagaataataggtataaagtagagttttttatattaaattgggatatttttttttttttttttttaaaatcgagaatggaagtgaaaattaaaatttagtaataaagggttttttttttagtttaatgaaattaattttaaaatttgtttttatttatattttgaaatttaaaattttgtttttcgttgatttttataatattggaaagattgaatttatattttgttttgtgaattttttaatggtttgtgattaaattataaattttaattcgatttaggaaatttttgcgatttgtgtttatttagttttgtagtttggaatagaatttttgtttttaatttaaatagagattgagagaaatgaaagaggatttagaaagtttttttttttttgtgaaaggtttgattttaagtggcgtaattaataaagaaaagggtttaaggtgtagtttataaattttttagagtttaatgtgtttaggttgaggtggagaaattatataaatttgtgaatagatatggaatagaagttatgtgtatatgtattttgtttttaaaggttttgttaggtatttattaagttattttttttgtgtaattatttttcgtttttttatttgtatggatgaaagtttatttttattgaatattttattttatgtgttagttattgttttaaatttattatattatttaatttttacgataattttttaaggtagttttattattatgtttattttatagatgagtaaataagtttttaggggttaagaaatttgagtaagtttatattaatttgtaaattacgaaattgagtattagatataagtatttggttgtattttttgagtttgtacgttttatttttataaaatagatatattgaagattgagaaagaatattgttggtcgattttttaggtaataattttttcgatattgtattgttgttttagaaatttttagttttttttattgatggacggtaggaggggtatatggagtggattaggagtgggtaggagtggggtgggggcgtgtttttagaagcgtttcgggggaacgataaggcgcgggtcgtagaggtttattttttttgtagttttagtatggtttttggagttttttgggcggtcgttgatttcgatatcgcggcggttcgtttttagcgtcgcgttgtttaattagcggcgcggtttggtgtttcgttatttcgcgtcggttatataggtttttttttggcgcgttttcgtatcgtattggtggatcggtttttagttcgtttatgggcgttgtggtcgttatcgtaggtttcgtttttcgtttttttcgtttttaacgtacgtcgtatcgtttttttgtagtcgttcgcggagtatcgtagtcggttcgggttttcgttagttttttttttcgcgtttttcggtgtttttcgcgggtcggcgcgatgcggttgggttcgaggatcgcggcgttggggttgttgttgttgtgcgtcgtcgcggtcggcgtcggtaaggtcgaggagttgtattattcgttgggcgagcgtcgtagcgattacgatcgcgaggcgttgttgggcgtttaggtgaggcggttaggtcggtgttgggagggtcgggtttcgtatcgcggttgtcgcgggttttgtttcgggataaaggggggcggtcgggcgaggtttggtaggggcggtttgataatgggggtcgggcggcgcggtattcgttttttgggggttttggggtttggaaagtttgaggagatagtacggtttaagagttggattttttttattttttagattatggagggtgtgtagggggtaggggttttgaagtgtaggtgcgggttatttcgaaattttttggtaagggggttttttagtagttttgtttttttttattattttgttttattgatagtaatgtttggtttttttgtgtgtcgtttttttttaaagg

SEQ ID NO: 1572 - DNA, 5487 bp, Artificial Sequence
  chemically treated genomic DNA (Homo sapiens)
tttttagggggaagcgatatataggagggttaagtattattattagtggggtaaaatggtggagaaaaatagggttattagaagatttttttgttaaagggtttcggggtgattcgtatttgtattttaaggtttttattttttatatattttttatgatttgaggggtagaagggatttagtttttgggtcgtgttatttttttaggttttttaggttttaggatttttagagagcgagtgtcgcgtcgttcggtttttattgttaggtcgtttttgttaggtttcgttcggtcgtttttttttgtttcgggataaagttcgcggtagtcgcggtgcgaggttcggtttttttagtatcggtttggtcgttttatttggacgtttagtagcgtttcgcggtcgtagtcgttgcggcgttcgtttagcgggtagtgtagtttttcggttttgtcggcgtcggtcgcggcggcgtatagtagtagtagttttaacgtcgcggttttcgggtttagtcgtatcgcgtcggttcgcggaggatatcgagggacgcgaggagggaggttggcgggggttcgggtcggttgcgatgtttcgcgggcggttatagagaggcggtgcgacgtacgttgagggcggagggaacgggaggcggaatttgcggtggcggttataacgtttatggacgggttgggggtcggtttattaatgcggtgcggaggcgcgttaggaggaggtttatatggtcggcgcggagtggcggggtattaggtcgcgtcgttgattgggtagcgcggcgttgggggcgggtcgtcgcgatgtcggggttagcggtcgtttagagagttttaggagttatgttgggattgtagagagggtagatttttacgattcgcgttttgtcgttttttcgaaacgtttttaaaagtacgtttttattttatttttgtttatttttggtttattttatgtgttttttttatcgtttattaatgagagaggttggaggtttttgagataataatataatatcgaaaaaattattgtttgaggaatcggttaatagtatttttttttagtttttaatgtatttattttatgagagtaggacgtataaatttaggaagtgtagttagatgtttgtatttgatgtttaatttcgtgatttataagttaatgtgaatttgtttaaattttttgatttttgaaaatttgtttgtttatttataaaatgagtatagtaataagattattttaaagaattgtcgtgaagattaaataatgtaatgggtttagaataatagttggtatataaggtgaagtgtttagtgaaggtaggtttttatttatataagtagaaaaacgaaagatgattgtatagaaggaatagtttagtaagtatttagtaaaatttttagggatagaatgtatatatatatggtttttattttatgtttatttataggtttatgtaatttttttattttaatttgaatatattaaattttaagaaatttgtaggttgtattttgaatttttttttttattgattgcgttatttaggattaggttttttatagagaagaaaaggttttttgggtttttttttattttttttagtttttatttggattgggagtaagaattttgttttaaattgtaaaattgggtgggtataagtcgtagaaattttttgggtcgggttgaaatttatggtttggttataaattattgaaagatttatagagtaaagtgtaagtttaatttttttaatgttataaagattaacgaagaataaagttttaaattttagaatataaataaaagtaaattttagagttgattttattaaattaaaaagaaaattttttattgttggattttaatttttatttttattttcggttttgaggaaaaaaagagaaaaatgttttaatttaatataagaaattttgttttgtatttgttgttttttaataagtaaaaggtaaattttgattagttttcggcgtgattttagttataaaaggtaggttataaggtattgtggaagtttttttaaatttaggggatttatagatgggagttttgggggttaagggaatttaatgatatttaaagagatagtggagtaagtagtattagaaggttgggttttgtttttagtttttaaataggttgttttcgttttttgggtttattgtttttatttggaggaaaaggattgtgttattttagtggattttaatttgagatttttgggtttttaagtggtttttgtatggtttttagtggtgtgtttattttaaaattttggtgtatgtgtatatttttagggaggaagtttatagttttgtttttattagagttttaaaggatttatgtggtagaaaaagttaagagtttttgaagaaggttttgagtaattttttgatttttaaaattaacgattttattgggattgtttggaagtagattatagtaaaggtttatgtttaaaagaggtaagattgatttaatgttattatttgtaattaatttattttattcggggaaaaataaatatttaaaataagtagtttgtttaaaaaaatgtgttatgagaatttaaagattaatttttttgatttataaaagtttatagtatatagtaaaattggttttatttatatttttattgaggtataatttatttaaagtatataaatgttttagatttgtatgttgtgagagttttgaggtagggaattgtgtgattttttttagtgtacgtataaaaaagaggaatttaataaatttttgtgaaatgtatgaatttagttattttggtatttttttagaagtatgtattatgggtaataaagttaattttgaaattattgaaagaaagatttgtagattttttgttttttgaatttggtaagatgtgtgttataataagtagtggtttaaaaaataaagtaatatttaatatatatggtatggatttttgtgttataggttgatttttattagaatgaatgagatttggtataataaataatttaagtgggaaagttaataaatttaatgagattgtagttttgtatagatggaaaatataagataaaagaatagattataaggtagtgaatgggagaataatttagattgaatgattatgtaattagggggattttgttggttgtttaattttttgttagttttttgaggggagaaggaaatgtgagaattttagggttatggtggagttttagaaggtgataagaatatgtgtaggtgggtgggtgtattataatgttttaaaaatttttttatttttaaggagtatttgaatgtgtaagtagttataaaattttttaatttattagaagtatttttaagaaatttaatgtaatttttttattgaataagatttttttaaattaaagatggatttgttttaatgattaaatgtaatgatagttttatttttaaatagaagttattttttattttcggtaatttatatttatggtttttggttagttatattggtgtattttttgttttaaaggtagtttaagtggataaatattagagtgtttttttgattttttttttatttatatagggtgattatatattttggttgatttgatatgattattaattatgatttttttatatttaaaagtatattagaatggggtgataaatgatatggttattttatttttgggttttatatttaaattgtttagttttttttttgtatttttttttaagttttaggttttattatgttttagaatttttttttatatttttttttttaggtttttaataataggattttgaggttttagttaaatatattagtaataaaaataaagaatattaagaaagagggtatgaaaagaggaataagattgtgatttaagtaagtgttttttttgaattataatgaaatttattttttttggcgttattaaattagttttgaagataattttatggaggaaatttaaagttgaaataagtagagtgattttgaaagatagtattttttgaatttataagttttcgagtgtttaagaaaatttaggcgtggttttatagttatattatgtatttaagttttaggtatttatagattttattgaggaagagaaaatgtagttgttttgattgtagttttattacgaggtggttggtgtttaggggattgtgattgatttgggttttggttttttgattcgggatgaaatttaagtttatgggattttgaggttaatttttgtttaaaaaataaaattaaaaattggttaggtatagtggtttatgtttgtaattttagtattttgggaggttgaggtaggtagatagtttgagtttaggagtttaagattagttttggaaatatggtaaaattttagatttataaaaataaaatacggaaaagtatattagttgggtgtagtggtatgtgtttgtagttttagttatttaggaggttggggtgggaggatggtttgagtttgggaggtagaggaggtagtgagtcgagatcgtgttattgtattttagtttgggcgatagtgtagaaataaaggagttatataagttatgtatgtttatttgtttatttttgtttatttgtttattttaggaaaattagtgtatgtaaataagaaaaaagaaaaaaagattttaaattttatttttataaataattgttattaatattggggtataattttttagaggttttttgtgtatagtatatatatttttaaaggtagtattttaatttatttgtgtttttagaataaaatatttgagataggataatttataaatttgtatttataatttataaagatttataagtttgtatttataaatttatttataatttatattttataaatttattatatattaattatatattatttatttttaaatattatatttaaattatttaaattatatatttatttaaattaaatatttaatattaatatttaaattaaatattttatttaaagtattaaatattgtatatatttatatattataaatatattataaatttataaatttataaatatttataatttataaagatttataaatttgtatttataatttataaagaataaaaatttattttttattgttttggaagttagaaagtttaaaattaaggtgtgggtaggattcgtgtttggcgaaggttgttttttgtttttaagatggtattttgttgttgtatttttcggaggggaagaatattatgtttttacgtggtagaagggatggaagggtaaaaacggttaattttttttgttaagttattttataagggtatttgattttttttatgaaggttttgaattaattattttttaaaggttatattttttaatattgttatattaggaattttgttttaatgtgaattttggaggggttaaaaatatttaaattatagtaggtagat

SEQ ID NO: 1573 - DNA, 9268 bp, Artificial Sequence
  chemically treated genomic DNA (Homo sapiens)
aatggatgttatgtttttggttttaggtttttttttttggtgattttttgtttttgtgggttttagttttttgttttttttttatttttggagtttttggttgtttttttttttatttatttatttattcgtttatttatatatatatatatagagagagagagagagagagtttcgttttgtcgtttaggttggagtgtagtggtatagttttagtttattgtaacgtttattttttaggtttaagcgatttttttgtgttagtttttcgagtagttgggattataggtacgttttattttaattggttaatttttgtatttttagtagagatagggttttgttacgttggttaggttggtttcgaatttttgattttaggtgattcgtttttttcggttttttaaagtgttgggattataggtatgagttattacgttcggttttatttatttatttatttaataattattgagtatttggtatatgttagatattgttttaggttttgggaatatattagtgtgagaaatagagttttgtttttaggtagtttatattttagtagataaaaatagtagatttattatgttttgtgatgtgggtgtggatggtgttaagtgttgtggaaaagaaaattaggatagggtacgttgtaggatttaatagggttatttgagtggttttattgagaaggtggtatttgattaaagataaggagatttgggagggattttggaaggttattagaggagagtgttttaagcggaagagatgttcgcgtgtttgaggttagtttggttggagtggagggagtgaggagggaagagaagatgaggacgttgggtaatttttttttttggagggttgttatattttttgaacgattcgttttagcgttttttttaggtttttgggattggtggtgattttatttttgatgatttagtagagagataaaaggtattcgtttttttttattcgtttttggaggtgttagaggttatttgcgagaaatggtgggatgagggttagtgttgtttgttgtaggtttttggtttggattgggagaagtgggtagttatagtgtatgatttgattttatggttatggggtttattgcggggttgtaaggggataagagtagaagtaggaagagttgttaggaggtagcggtgatgttgtttgtataaggtaggtgtaagggaggcgggaagaacggtttggttttggatgtattttgaaggtagagttaagatgattttttgatagattggagtgggttgtgatcgaaagagaaatattgagaatgatgttaaggattttaatttaagttattaaaaggatggattgttattttttgtaatggggatagttgtgggaggagggtttttttttattttttgtttttttcgttattttttttatattttttttttttttttaatgcggatttttttgtaggtgttggttttaggttagagggtaggagggtcgttttggtttttagtttatagtaggtaaggtcgagtaatggggaaggggtggcgtttgggttttagttaatggttaagatggagtttttgtttgaggggatagggttagtttttgggaagtattttttagtttagcgaggagagcgagattaaaattgggattttttgtttggagatgaagtttttttttttagagtagtttttgggttttgggagagtttatggttttagtttagatttaataaatcgatttataatatattatttttaataatttgtttggttaaggagtataagttttttttttgatagaagatgtttatgtaggtttttaaataaatttttaggttatgattttttatttttagtattaatatagttgtttgcggttttttggggttttttttgggtatagtaatttggagaatgtggattgtattaggttgttttcgatttgggtttagtttttttttttttgtgtttggagaggatagtaaagattggagggttttggttgttttttgtttcgtttagggttttttttattgatatggtaattttatttttttatttatttgttttttaggtttaggttttttgtgacgtagataaaggaagtttaaatggataggttggtagatttggattttttttttttttggtattgttatttagtaattatgtgattttaggttggtgatatgtttttaggaggttttattttttatttgtaatattggtttcgttttatttgttgtaggtttgatgtggataggggtgcgatttaggaggtatttttagtcgttttttattagtggtttagagtaaggggtcgaggtttttgattttattttttttttatttttagggttgtaaggaagttttggaatgaatgcgattttagggtgtggtttgggttttcgtttgtttttaaggttagtgattgttttgtttttaattgtttttgagaataaatgtacgttataggatggtgaaagtttaggagaggaaggatttttatttagaagtaatatttttattgggcgtagtggtttatgtttgtaattttagtatttggggaggttaaagtaggtagattatgaggttaggggatcgagatcggtttgattaataaggtgaaattttatttttgttaaaaatataaaaattagttgggtatggtggtgagcgtttgtaattttagttatttgggaggttgaggtaggaaaatcgtttgaatttgggaggtagaggttgtagtgagtcgagatcgtgttattgtattttagtttgggcgtagaatgaggttttgttttaaaaaaaaaaaaataaaaaaaataaataaataaaaaaaaaaaaatttataaagtgatggaaaaaaattagaaagtttatatatatattttaatatgtaggttttttgagaaatttttgaaattgtattgggtagagcggttgggagggatgagtttgttttttggtgtttgaatttttcggtttttttagagtgatatgaggtgggtttggtaggtggtttttttttagtagtagggatttattttttgttgttattagtttgttagtaagtaggttaaaatttttattttatattttgagatgtaaggcgggcggattatttgaggttaggagtttacgagattagtttgattaatatggtgaaatttcgattttattaaaaatattaaaaaaaaattagttgggcgtggtggtagatatttgtagttttagttttttaggggattgagataggagaattgtttgaaattaggaggcggaggttgtagtgagttaagatcgtgtttagtttaagtgatagagggagatttcgtttaaaaaaaaattagtttatttgtttggagatcgtggggtttattttttattatttttattttagggtaaaaagagataattttttatttacggtggtaaggttggggttttgagtgtgttttttcgagtattgcgtttcgttaaggaaagtgtacgtttatttttttttttttttgggtgataagaatttaggtgtgtagcgtttttattaggttgttttttcgtgtttgatatttttcgttgagttgtatagacgcgaagtttgtttttgtatagtttcgtttttgattatttagttatttatttatttatttagtaaatacgtttttttgtttgtttattttaagtttattgtagacggatattttgtagtttgttatggatttatagatagattgtgtttggtttatattatgttttgttttgtttttgtttttgtttttgttttgtttttttgagatggagttttatatttgttatttaggttggagtgtaatggtgtaatttcggtttattgtaatttttgtttttcgggtttaagcgattttttagttttagttttttaagtagttgggattatagttatttgttattatgttcggttaattttttgtatttttagtagagatagggttttattatgttggttaggttggtttcgaatttttaattttgtaatttttttatttagttttttaaagtgttgggattatagacgtgagttattattaaaattttgaattaattgttaaagttgaaaagtgtggaaattgtaagaaaaattttgatttttggattttttttgaataatttaaaaaaatttaaaaattttattattttatgtgattacgttttttggtagttttttttcgaggtgatataggtttggttgttttttgttggtttttttaggtagtttatttttattttttgtgattgatggataataataaaacgagtgtttagtattagttatgtgttagtttttaagtgtgttagatatattgatttatattagttttataatgatagtgtggtagatgttatgatgtttatttatttaagaaagatttgttgggggtttaagtttattaggttttggtaatggaaatgtattcgggaataatatagataaaattttattttttacggagtttttatttcggtgaggggatatgtagcgtgtcgatgatggtgggggttgtgttattatagatagagggttagtataggtttggttgagtaggtgatatttaagtagagatatgattgtagtgaaggtttagaagagtgttttaggtggaaagaggtgaagaaataagtttggggttatatagttagttaagtagttaagttgggatttgaatttatgttggttttagagtttgtgtttttaattattgtattttagggtttgatatgagatgttagtttcgtttcgagatgtttagagttagtgaggaagagaaatagggaatatggttgttgttagagggttggggttgggggtgtcggaggttttagttttgagggttttaattttttgttttgttttagtatcgtttcgggaggtcgagatgaattgtttgtttgttttgggttttttattttaattttattagggttttgggagtatttttttttatcgttttcgttttttataaagtttttgggttttttttttttttaaggattgcgaagaattggtcgtaaatttttttaagttattagtatttcggtttttagtttatattagttttgagtttagtttgcggttaggggattacgtacgttttatttatttagcgattttttagtcgttgtttatttttttttatttatggggaatagtaaaagtggggttttgtttaaggagattttggaggagttgtagttgaatattaagttttcggaggaggagttgtgtttttggtattagttttttttgaaggattgttttatcggtcgtattatttagtagtagttttagagtatttacgttaagttttttttcgatatcgattttaaggtttacgtttagtatgtgtttcgtagtttcgattttaatttcgacggtattttggattttaaggagtacgttatcgttttgtatatgattatcgcgggtaagattaattagaagttggagtgggttttttttttttacgacgtggacggtaacgggattattagtaagaatgaagtgttggagatcgttatggttagttttttttttttttttttggttgggcggtgtcggggtcgtttcgggttgggggttttttgttgtagttgttgtagagggagtggatttgtgggtggagcgggggatgcgggttattggttttgagagcgtggtgtttcgagatgttgatattgatagaggggtgggtatttgtttatagtttcgttgttttttcggagtagaatttgagtgttttttaatatagttatgttatgtttggttttacgatgtttgggttaataacggacgatatagattattgtggttttataagattgtaatggagttgaaaaatttttattgtttagtgacgttatagtatagttattttattttttaaatgtatttagtgtagtttaagtgtattcgtaaagtttgtagttgtgtacggtaatgttttagttttttatatttatttattatttatttattgatttatttagagtaatttttagttttgtaagttttatttatggtgagtgttttagataggtttattattttgtattttggttttttattttttatttttttgagatggagttttattttgtagtttagagttggagtgtaatagtgcgattttggtttattgtaatttttgtttttcgagtttaagtaatttttttgttttagtttttcgagtagttgggattataggtgtgtattattatgtttagttaatttttgtatttttagtagagacggggttttattatgttggttaggttggttttaaattttcgatttttagcgattcgttagttttagttttttaaagtgttgggatttataggtatgagttattgtgttcggtttattttttatttttatattgtatttttattgtatgatttttatgtttagttatgtttagatgtataaatatttattatcgtgtgataattgtttgtaatatttaggatagttacgtgttgtataggtttgtagtttaggagtaaaaggttggattatggagtttagggatgtagtcggttttattatttgtgttcgtgtaaggatgttttatgatgtttttatatagaagttgttttaagatgtgtttttcggaatgtatttttgtttttgagcgatacgtgattatatttatattttttttttttttttattttttgtttttttttttttttattaaaatgttttttgaaatttttagtagtatatatttaagttgaattattgtttattttaaatatataatatgtttttaatataaagtagaaagaggttaaagttgggggtatgaattttgagttttagtttttatgttttttttagcgcggggcggattatggtattacgtatgagttttcgttttttacgcgcggcgtggtttttcggtttttgatagtttttttgtgaggcgtataggtttttatatggtttttaatacgtttttttttttgtttatattgtttttttgttagattttttgttgtgaaagtaatggtaaaaattataattatttttttattaatttcgtaggtgttttgaaaatggtttatttgatataaaagtaatttatgaaatttagaaatttaggtaaaagagattaataattgtttttaattttaatatttagggaaaattttttttagtatattagtatatatttttttagttttttatttatataattttaaataatgttaaagttatgatatatttatatacgattttttattatatattttttagttatttttttattatgagtgttttttatattattatatatttttttaaaatattttttttttttttttagatagagttttgtttttgtcgtttaggttggagtgtagtggcgtgattttagtttattgtaattttttttttttgggtttgagtaatttttttgttttagttttacgagtagttgggattataggtatttgtttagttaatttttgtattttagtagagacggggttttattatgttggttaggttggtttcgaatttttgattttaggtgatttgttcgtttcggttttttaaagtgttgggattataggcgtgagttttcgtatttaattttttttaaaatttttttaatagttgtttggaattttggtttatggaaatgtggaaattattgaatatttttatgtttttggatattaggttgtttttattttttttttattatattagttttaattttttttatttgatttttttttaatttatttttttttagtttttttgtttttgttatttattttatttttttaattttatttttgttagtagagattattgtttagatgttaataattttgtgtgtattggtaattatgtttttatttgtatgatgataaatgtataaaaattttttatagttattaggagaaattataaataaaatagtagagtatgtagtttgtggtttatgggtttatttttaatgtttagttcgggttttttattttggtaggtatgtgttttttttattgttattttggtatagtttgtagagaaagttttttcggattggttgtggggtttttgggtggtttgggatagggattaagtttttagagtggtataaataatgtagggtttagtagaagtttataaattgatatttattgaataaaaggaggaggaaagggaggagggggaaatgagggagggagagagggaaggtaggagttaggaaggaaagagggggaagtaaggggaaggagagaaggaagggagggaggagaaggaaaggaggagagaaaggaagaaagaagaaaggaaagggagggagggagattttattaatggttggggttgtgtaaggtggtagaaggttttgttatttattagattataagtttatgggtagagtattgattgagggagttaaaagtgaagggttttagttttagttttgattttaattagtagtgttgttgtgggaaaattatataatttttttgggtttagggtgaggatttgattatttttgtagttttttttgaggttttggaggtttgttttttcgtgttggaagtggggtgggtaggtatttattgttagtttttagttggtatatttgtatatggtgtttaaggttttgtatagatggataggagtgtaggagttatttatattggcgtttagtttagggttttgagtgttgttagcgacgttgttgttttgggttgtggttttggtttttttatttttttatttagtattagggggttgaagggaaattttttaaagttgtcgattttttttttaggataattttatagttattattgtttttgtttgatttgtttataggtgttttcggggaggtagaacgtaaatggtttgcgaatgtttttttttattttataagttatattttgattttgtttattgttttttttgatatggagaagttttttagtgtgatgttattttgtttgtttattttggtttatgttgtttttgtttttggtgttatatttaaaaaattatcgttaagattagtgttaagaagttttttttttacgtttttttttagtagtttgacggtttgaggttttatgtttaagtttttaatttattttgagtagatttttgtgtatagtgtaagatgtggattttttagggttgttagttttttaaagttttttttaacgagttttttttttttgtttggtatagg

SEQ ID NO: 1574 - DNA, 9268 bp, Artificial Sequence
  chemically treated genomic DNA (Homo sapiens)
tttgtattaaatagaaagaaagaattcgttaggaggaattttaaggggttggtaattttggaaaatttatattttatattgtatataaaaatttatttaaaatggattaaagatttaaatataagattttagatcgttaaattgttggaggaaaacgtaggggaaaagttttttggtattggttttgacgataattttttggatatgatattaaaagtaaaggtaatataaattagaataaataagtaggatagtattatattaaagagtttttttatgttagaggaaataatgaataaaattaaaatgtaatttatggaatgggagaaaatattcgtaaattatttgcgttttgttttttcggagatatttgtgagtaggttaggtaggggtaataatggttgtgaaattattttggagggaaggtcgatagttttgagaagtttttttttagttttttggtgttggataaaggagtaaagaggttaaagttatagtttagggtagtagcgtcgttggtagtatttaaagttttgagttggacgttagtgtaggtggtttttatatttttatttatttgtgtagggttttgggtattatgtgtaggtgtgttagttagaagttggtagtgagtgtttgtttattttatttttaatacggagggatagatttttagagttttaggaaagattgtaaaaataattaaatttttattttgggtttaggaaggttatatggtttttttatagtaatattgttagttggagttagagttgggattagaattttttatttttaatttttttagttagtgttttgtttatgaatttgtaatttggtgaatagtagagttttttgttattttgtatagttttagttattgatggagtttttttttttttttttttttttttttttttttttttttttttttttttttttttttttttttttttttttttttttttttttttgttttttttttttttttttttgatttttatttttttttttttttttttttattttttttttttttttttttttttttttttatttaatgagtattaatttgtaggtttttgttgggttttgtattgtttatgttattttgaagatttagtttttgttttaggttatttagagattttatagttaattcgagggagttttttttgtaggttgtgttaagataataatgagagagatatatgtttgttagaatgggaggttcgagttgagtattgaggataagtttatggattataagttgtatgttttgttgttttatttatgattttttttaataattgtggaagatttttgtgtatttgttattatgtaaatgaaagtatgattgttaatgtatataaagttattaatatttaaataatagtttttattaataggaatggaattagaagaataaggtaagtggtaggggtagggggattgaaaaagaataaattaaaaaaaaattaaatgaaggaaattagaattggtataataggaaagaaatggaaataatttaatgtttaaaaatataggaatgtttaataatttttatatttttataagttagaattttaagtagttattaaaagagttttggaagaggttgggtgcggaagtttacgtttgtaattttagtattttgggaggtcgaggcgggtagattatttgaggttaggagttcgagattagtttggttaatatggtgaaatttcgtttttattaaaatataaaaattagttgggtaggtgtttgtaattttagttattcgtgaggttgaggtaggagaattgtttaaatttaggagggggaggttgtagtgagttgagattacgttattgtattttagtttgggcgataagagtaaaattttgtttgaagaaaaaaaaaaagtgttttggaagaatatgtaatgatatggaaagtatttatgataaaagagtaattgaaaaatgtatgataaaaaatcgtatgtgaatatgttatagttttaatattatttaaaattatataggtaaaagattgaaaaggtatatattgatatattaagaaaagttttttttggatgttggaattagaggtaattgttagttttttttgtttaggtttttaaattttatgagttatttttatattagataaattatttttaagatatttacgaggttagtggaaaagtaattatggtttttgttattatttttataataaaggatttgataggaggatagtatggataggggagaaggcgtgttgggaattatatggaagtttgtgcgttttatagggaaattgttaggagtcggggagttacgtcgcgcgtgggaagcgggggtttatgcgtggtgttatgattcgtttcgcgttggggagaatatgaggattagaatttagagtttatgtttttaattttgatttttttttattttatattagaagtatattgtgtgtttagaatgaatagtgatttaatttgaatgtgtattgttgaaaattttaaaggatattttaataaaggaaggaagaaataaaggatggagagaaagaaaaaatgtaaatatagttacgtgtcgtttagagataggaatatatttcgagaaatatattttaaggtaatttttatgtgggaatattatagagtatttttgtacgaatatagatggtagagtcgattatatttttgagttttatggtttagttttttgtttttaggttataaatttgtgtagtacgtgattgttttgaatgttgtaggtagttgttatacgatggtaagtatttgtgtatttaaatatagttaaatatagaaattatgtagtaaaaatatagtataaagataaaaaatgggtcgggtatagtggtttatgtttgtaaattttagtattttgggaggttgaggttggcggatcgttggaggtcgggagtttgagattagtttgattaatatggtgaaatttcgtttttattaaaaatataaaaattagttaggtatagtggtgtatatttgtaattttagttattcgggaggttgagataggagaattgtttgaattcgggaggtagaggttgtagtgagttaagatcgtattattgtattttagttttgggttatagagtgagattttattttaaaaaaataaaaaataaaaaattaagatataaaatggtagatttgtttagggtatttattatgagtggagtttgtaggattgggagttgttttgggtgagttagtgagtgagtagtgagtgaatgtgaagaattaggatattatcgtatataattatagattttacggatatatttaggttatattaaatgtatttgaaaaataaagtaattgtgttatgacgttattaggtagtaggaattttttagttttattataattttatgggattatagtggtttatatcgttcgttgttgatttaaatatcgtgaagttaagtataatatggttgtattaggaaatatttagattttgtttcgggaagataacgaagttgtgggtaagtgtttatttttttattaatattagtatttcggagtattacgtttttagagttagtggttcgtatttttcgttttatttatagatttattttttttgtagtagttgtagtaggggatttttagttcggagcgatttcggtatcgtttagttagaaggggagaggggagattgattatgacgatttttagtattttatttttgttgatggtttcgttatcgtttacgtcgtagagggagaaggtttattttagtttttggttggttttgttcgcggtggttatgtgtagggcgatgacgtattttttgaagtttagggtgtcgtcgaggttggaatcgaagttgcggaatatatgttgggcgtaggttttggggtcggtgtcggggaagaatttggcgtagatgttttggaattgttgttgggtgatgcggtcggtgggatagttttttaggaaggattggtattaggagtatagtttttttttcgagaatttggtgtttagttgtagtttttttaggatttttttggatagggttttatttttgttgttttttatgagtgaggaagagtgggtagcggttggggagtcgttgggtgggtgggacgtgcgtggttttttggtcgtaggttgggtttaaggttggtgtgagttgaagatcgagatgttggtggtttaggaggatttgcgattagtttttcgtaatttttgaagggaggaggggtttaggagttttgtggagggcgggagcggtgggggggggtgtttttagaattttagtgagattaaaataaagagtttagggtaggtaggtaatttatttcggtttttcgggacgatattagaataggataggaggttggaatttttagagttggggttttcggtatttttagttttagttttttaatagtagttatgttttttgttttttttttttattaattttgagtatttcggggcggggttggtattttatattaagttttagaatgtaatggttaggagtatagattttggggttagtatgggtttaagttttagtttggttatttaattagttgtgtggttttaggtttgtttttttatttttttttatttgggatatttttttaaatttttattgtagttatgtttttgtttaaatgttatttgtttagttaggtttatattgattttttatttataatagtataatttttattattatcggtacgttgtatgtttttttatcggaatgaaagtttcgtgaaggatgggattttgtttgtgttgttttcggatgtatttttattgttagaatttgataggtttgggtttttagtaagttttttttgaataaatgggtattatagtatttattatattgttattgtgaggttgatgtgagttaatatgtttgatatatttagaaattggtatatggttaatgttaaatattcgttttgttattgtttattagttatagggagtgaaggtgaattgtttgaagggattagtagggggtagttaggtttgtgttatttcgggaaggggttgttagagaacgtggttatatgggatggtgagatttttgggtttttttaaattatttaagagaaatttaaaaattagaattttttttgtaatttttatattttttaattttggtaattaatttaaaattttaatggtggtttacgtttgtaattttagtattttgggagattgagtggggagattataaggttaggagttcgagattagtttggttaatatggtgaaattttgtttttattaaaaatataaaaaattagtcgggtatggtggtaggtgattgtaattttagttatttgggaggttgaggttggagaatcgtttgaattcgggaggtagaggttgtagtgagtcgagattgtattattgtattttagtttgggtgataagtgtgagattttattttaaaaaaataaaataaaaataaaaataaaaataaaataaaatatggtgtgggttaaatataatttatttgtgggtttatggtaggttgtagggtgttcgtttgtagtggatttggagtgagtaggtaagaaaacgtgtttgttgagtgaatggataaataattgagtggttagagacggagttgtgtaaaggtaggtttcgcgtttgtgtagtttagcggggagtattaagtacgaggaagtaatttagtgaggacgttgtatatttggatttttgttatttagaaggaagggagggtgggcgtgtattttttttagcggagcgtagtgttcgaggggatatatttagaattttagttttgttatcgtggatggagagttgtttttttttgttttggggtgagaatgatgaagaataaattttacggtttttaggtaggtaaattggtttttttttagacggagtttttttttgttatttaggttgggtacgattttggtttattgtaattttcgttttttggttttaagtaatttttttgttttagttttttgagaagttgggattataggtgtttgttattacgtttagttaatttttttttggtatttttagtagagtcgaggttttattatattggttaggttggtttcgtaaatttttgattttaggtgattcgttcgttttgtattttaaagtgtaaagtggggattttagtttatttattaataggttagtggtagtagaaggtaggtttttgttgttgggagaaagttatttgttaggtttattttatgttattttggaaggatcgagaggtttaggtattaaggggtagatttattttttttagtcgttttgtttagtatagttttagagattttttaggaaatttgtatattggggtgtgtgtgtgaattttttaatttttttttattattttgtgagtttttttttttttgtttgtttgttttttttgtttttttttttttaagatagagttttattttgcgtttaggttggagtgtaatggtacgatttcggtttattgtaatttttgttttttaggtttaagcgatttttttgttttagttttttaagtagttgggattataggcgtttattattatgtttagttaatttttgtgtttttagtagagatgggattttattttgttggttaggtcggtttcgattttttgattttatgatttgtttgttttggtttttttaagtgttgggattataggtatgagttattgcgtttagtgagaatattatttttgaataggagtttttttttttttaggtttttattattttgtagcgtgtatttatttttaagagtagttagaaataggatagttattagttttgaaaataaacgggagtttaagttatattttggaatcgtatttattttagagtttttttgtagttttggggatggagggagagtgaggttagaggtttcggttttttgttttgagttattagtagggggcgattggaagtgttttttggatcgtatttttgtttatattaagtttgtagtagatgaggcgaagttagtgttataagtgagaagtggggttttttaaaggtatgttattagtttggggttatatggttgttaaatggtaatgttagaaggaaggaaagtttaggtttgttagtttgtttatttaggttttttttgtttacgttataggaggtttgagtttagaggataagtaggtgaggaggtggggttattatgttaatgaaagaggttttgggcgaggtagaaggtagttagagttttttagtttttgttgttttttttaggtataaggaggaaggagttggatttaggtcggaagtagtttggtatagtttatattttttaggttgttgtgtttaggaggggttttaggggatcgtaggtagttgtgttgatgttgagagtgaggggttatgatttggaggtttgtttgaaaatttgtataaatattttttattagagggagagtttatgttttttagttaaataagttgttggagatgatgtattgtgagtcgatttgttaagtttgagttggggttataaatttttttaaaatttaaagattgttttagaggagaaggttttatttttaggtagaggattttagttttggtttcgtttttttcgttggattgaaagatgttttttagaagttggttttgtttttttaagtaggagttttattttggttattagttgggatttagacgttattttttttttattgttcgattttgtttgttatgagttgaaggttaagacgatttttttgttttttggtttggagttagtatttgtagagaagttcgtattgagagggaaaagggggtatggagaaggtggcgggggagatagagaatggggaaggattttttttttatagttgtttttattgtagaaaatgataatttatttttttgatgatttggattgaggtttttggtattatttttagtgtttttttttcggttataatttattttaatttattaagaaattattttgattttatttttaaggtatatttagaattagatcgtttttttcgttttttttgtatttgttttgtgtaggtagtattatcgttgttttttaatagttttttttgtttttgtttttgtttttttatagtttcgtagtgagttttatggttatgaaattaggttatgtattatggttgtttattttttttagtttaagttaaaagtttgtagtaggtagtattggtttttattttattatttttcgtaagtggtttttggtatttttaagaacggatgaaagggggcggatgttttttgtttttttgttaagttattagaggtaaaattattattaattttaagaatttgggggaaacgttgagacgggtcgtttaaagaatgtgatagttttttaggaaagagggttgtttagcgtttttatttttttttttttttttattttttttattttagttaggttggttttagatacgcgagtatttttttcgtttggaatatttttttttggtgattttttagggttttttttaggtttttttgtttttgattaaatattatttttttaatgaggttatttaaatgattttattgaattttgtaacgtattttgttttggtttttttttttataatatttaatattatttatatttatattatagaatatagtaggtttattgtttttgtttgttagaatgtaagttatttgagagtagggttttgttttttatattgatgtgtttttagaatttagagtagtgtttggtatatattagatgtttagtaattattgaatgaatagatggatgggatcgggcgtagtgatttatgtttgtaattttaatattttgggaggtcgaagaggacggattatttaaggttagaagttcgagattagtttggttaacgtggtaaaattttgtttttattaaaaatataaaaattagttagttgaggtggggcgtgtttgtagttttagttattcgggaggttgatataggagaatcgtttgaatttgggaggtagacgttgtagtgagttgagattgtgttattgtattttagtttgggcgatagagcgagattttttttttttttttttttatatatatatatataaatgaacggatggatggatggatgagaaaagaaatagttaggagttttagagatgagagggaggtaaagggttggaatttatagagataggaagttattagggggaggggtttgaggttaggagtatagtatttatt

SEQ ID NO: 1575 - DNA, 6821 bp, Artificial Sequence
  chemically treated genomic DNA (Homo sapiens)
ttttaagatgtttatggtaaagtcggttgttaggtcgtttaggtttacgtttaggtcggcgttagttggaggtagtttttgtagaggttgatgtcgttattcggggagttggcgatgaggattgttattattaggttatagatggcgatgatgttagtcgtgattatcgggatgatggattttatgattagtttcggtcgtatgatagatatggtcgcgatgtcggtatcggttttgatcgtgttataggtagcgcgcggggcgttgaagattatggcggtcgaggttgttatgacggcgaaaaacgaagtatattcggggtcgtttttggattcggatattgtttgcgggtggggagggggtaagttttgcggtcgaggcggaggcgaagatcggggcgaggtcgggtcgggcgcgaaggcgagtacgtaggcggcggcgaagacgattagtattaatggtatttttaaagaagaaaagtgaattatttttggtttcgttaattttttttattatttttataatagatgtttcgtatttagatttatatttaatatggttcggaagtaggaaggagtttttttttttttgatagattaattattgttttttttgtagtttatttttttttgtttgtttatcgttatattttgttttgattcgtatttgaaaggtttggttagagatatttttgatgtgtttgtttttttttttttatttttttgggtaatttaacgtgttggggatgcgagtacgttaaatttttatttattgaagttattttatttagggttattagggggtatttatagatttgttatgggtttagtatcgtttttttcgtcgtatttataattttaaggttatttgaggagaaagaggtgtttgattaatcgggttatttttgtagagttatttttaaatttttgtttttggtttttatattaaatttttttttttttttttttttttgatttttttttgtttgtacgtgtgtttttaagaggttttttgtgatagcgttatagttatttatattttattttttgtaggataattgttttttaatttttattttattttttgtaggaggtatgagttttttggttgtttgaatatttttttttggaaaaagtaaaataaaaggaaataattttaaaagtggtagtaattttttttaatgtttttgatgataaagagttgaaatttttttataatttaaagttattataagttaatattggttgttagaagagtgattattttgggtaatattgtttttgatttaaaatgttgtgtgattatagtataataagaatgtttttttatatggtttaggatttggtttttgaaattatttttatttggagtttagatttgagttgagtaatggaataagtgttttgttttttaaggtgattgttggatgggaaaatttatgttttgttgtttagtttttatattttttttgtttgtggagattatttttttgatttatataatgatttggagattttgaagaggagtgtgtgggtagtgagtttagtgtaggggaattaatgtatataagggaagaaaggagattttggattagagttttgatttatttgttattaagagtttataggttttatattttaattatgaaattttttttggtattaggtggataggaatttgatgataagattggtttgttttttttttttttttttgagatggagttttgttttgtcgtttaggttggagtatagtggtgtgattttagtttattgtaatttttgttttttgggtttaagtggtttttatgttttagttagtttttgggagtatagttggggttataggtgtttgttattatgtttagttattttttttttttttgtatttttagtagagatggggttttattatgttggttaggtttgttttgaatttttgattttaagtggtttatttgttttggttttttaaagtgttggaattataggtatgaattattatatatggttttggtttgtttttaaaagtttttgtatttatgtataggttgttttgagaagtaagattattggatttttgggaattttaatgtattttaaattttagggtgggtgaggtggtttatatttgtaattttagtaatttgggaggttgaggtagaaggattgtttgagtttaaggagtttgagattaatttaggtaatatagtaagatttcgtcgttaaaatttttttttgaaaattgtaataggtatagttaaattgtttttttaaagggttgtaaaattttatattttaaagaaaataaataatattattaaaaagtgagtatgttgggtattgtggtaggtatttgtaattttagttttttaggaggttgaggtgggaggattgtttgagaatagtagttggagattagtttggataatatagatagattttgatttaaaaagaaataaaagtaggtaaaagtgttgaatagatattttattaaagaagatatgtagatggtaaataagtatatgatatatgaaaagattaaatgttattagggtattgtaaatttaaataagatgtagttatatatttattatagtggttaaaatttgaaatattgataatattaaatgttggtaaggatatgaagtaaaaattgttggtaggaatgtaaaattgtatagttattttgtaagatagattggtagttttttataaagttaaatatagttttattatgtaatttagttattgtgtttttagatatttatttagatgaatggaaaattttttagtaaaaatttgtacgtggatgtttatagtagttttatttataattgttaaaaattggaattaattaggatattttttgataggtgaaggaataaatcgtggtatatttatgtgatgaaacgttatttagtgataagaagaaatgagttattaagtcgtgaaaagatatagagaattattaattatatatattgttaagggaaagaagttagtttgaaaaggttatatgttgtatgattttaattgtaagatattttagataaggtaaaattatagatttagacggtggttgtttagggttgaggagtgagggaaggaggaatgaataggtagaatatggtaggttattagagtagtggaagtattttgtatgatataataatgatgaatatatgatattatgtatttggtaaaagtgatagaattatatgtataaagattgaattttaatgtaaattatagattttagttaataatagtgtattaatattggtttattaattgtaataaatgtattatattaatgtaagatattaattagaggagaaattggttggggagatggagaataatgggaattttttgtattttttgtttaatttttttgtaaatttaaaattattgtaagaaataatttattaattaataataataataaatgtatagatttattaagagtgtatatttttatttttattttttttgttgatgtatggtgatagaattttgatatatatttaatttgatggatcgagtttggtttttttttttttttgagacgttattttatttttgttatttaggttggagtgtaatggcgtaattttggtttattgtaatttttatttttcgggtttaattgatgttttttttttagttttataagtaattgggattataggtgtttgttattatatttagataatttttgtatttttagtagagatagggttttattatgttggttaggttggttttgaatgtttgattttaagtgatttatttattttggttttttaaattgttgggattataggtgtgaattattgtgttcggttaagtttggtattttattgttgtttggatttgtatttttttgtttattatttaagttgagattttttttagattattggattttttaagttttttaattatgaattgtttgtttttggtttttgtttatttttttagttgattattggttttttgattgtgaatttttgtttattgtgaatttgtgagatttaaaatatttttgtatattaatttttttttttttttttttagatagagttttattgttatttaggttggagtgtaatgtggggattttagtttagtgtaatttttattttttgggtttaagcgatttatttgttttggttttttaaagtattgggattataggtataagttattatgtttggttattgtatattattttttaattttataagttgtaaatgtttttttacgatttgttatttttttttttttttttttttttttttttttttttttgtttttttaaaatttgagatagggttttattttgttatttaggttggagtgtagtggtacgattatggtttagtgtagttttgaattttttaggtttaggtgattttgttattttagtttttagagtagttgggagaattataggtgtatgttattatatttagttaatttttttttttttttttttgtgtgtgtgtgtgtgtgtgtggagatggggtttttttatgtagtttaggttggttttgaatttttgggtttaagtgatttatttaatttggttttttaaagtgttgggattataggcgtgatttattgtgtttggttttgttatttttttttttagagaggataataatttatttgttttatagaaagttttaaatgttgaaggagattggtttggaaatatgtttttggggagtaatacggtttgagttagatatttagatatagtttatttttttggttagttttgttttttgtttttgattttttaagttgtatttagagttttttggtttagtatgtatttggaggttgtttttgattatgttttgagagtggtatggttttatttaatgggatgaatttggttaaagagattagtaaaatgttttgtggattttatttttaatttgtagcgtttaggttgtttttttttggttgggaagggcgttgaagaaataacgtttaggattaggattattttttgtttaagttgtgatttcgagatttttgttattattattgtatttacggggattttaggttagtgggattcgatatgggtagtttttagggtagttttttatagtttgggttatttgtattttttttaaggttttaagttttcgtttttgggttcgttaaggtttggggtgggagttgtgttgtgggaagtaattcggattatatttggtaagtatggcgttattgaaagttaagtttgattagaagaagcgggttaagttggtttaagggttttggtttatgaattggtttttcgtgttggttggtattattatttttagtttaggattgtttttgaagattgaatttcgaaagaggagcgatgtgatgaataattttgagagttattttgtgtttaatttattgatagggatgggggtgttattttgtgtttttaattcgttggttgggaagatttgttacgacgttttggatttagttaagtatgttagatggaagttttggttgaagtcgtatttggttatttgtgttttttttaatattatttttttttttgtggttttttgttgttttttgtttcggggttcgttggagaatattttgggttaagggtttaagaacggtatgaagtattatcgggatatagatatttttggtaggtgttttatgaagaagattatcgatatgttgtagatcgagtttaaatgttgcggtaataacggttttcgggattggtttgagatttagtggattagtaatcgttatttggattttttttttaaagaagttaaagagtgagtggtttttagttttggggttagagttatgaatatattggggatattgaggtttaggtttttgattagttttttttttcgtatttagtgtttttttttttttatcgggtgtataatttattgttgcgtatgtgagggtgtattaggtggaattatatgaaattgttaatattttatttttttgatttataaaaaatgataattttatagggtttaatttaatattggttaaggtggtaggaaggtattaatttatataagttgtttggataggagttttttgggatgaagagttaggtagtaatgtgtgtttattttatatagagggatggaagttatttatagattataaatattgaggtattatttggttatttgttttatttatttaaagtagatggatttagttttagaagtttaaattttttagttagtttttttgttttttaattttttaattttgagtatttatttttaagatgtttgtttggatatgttggaaagagtataggaaggggaagttatgagatttagggtgaagttttggttttgttgtttaaggttttgtgattttgggtaggttattagttattttgcgttttggtttgtttattttttaaatgagtattggaatagaataggtaattttggaagttattttttagttttgtttggtagttggtatgtagtaggtatttattaaatgtttgttggtgtttatttagcgagttatgatagtgtaatgtgataaagtatttttaaagtatttttggtatatgtaaaagtaaaatgttgcgatgggttgtgggaggtgttggtgagagagagattttcgattattgtgtcggagggaatagtttgtgtattggttttagcgggttgttttttttaatatatttattaatttggggttcgagtgattttttagggaaagggtagtttgttttgaggtagtcgtttttttttattttttttttttgtttgattcgattttatt

SEQ ID NO: 1576 - DNA, 6821 bp, Artificial Sequence
  chemically treated genomic DNA (Homo sapiens)
ggtagggtcgagttagatagaaagaagaggtgagggaaagcggttgttttaaggtaggttgttttttttttgaaaagttattcgagttttaggttggtgggtgtgttgggaagagtagttcgttggagttagtgtataggttgtttttttcgatatagtggtcgagagttttttttttattagtattttttatagtttatcgtagtattttatttttatatatgttaagaatattttagaaatgttttattatattgtattattatgattcgttaagtaaatattagtaagtatttaatgagtatttgttgtatgttagttattaggtagggttaggaggtgatttttaaaattatttattttattttagtgtttatttaaaagatgggtaagttaaagcgtagagtgattagtgatttgtttaaggttataagattttgaataatagaattaaaattttattttagattttatgattttttttttttatgttttttttaatatatttagataaatattttgggaatggatgtttagggttgaaaggttggaaaataagggaattaattaggaaatttaaatttttgggattgaatttatttattttgaatgaatgggataaatagttaaatagtattttagtgtttgtgatttatgaatgatttttatttttttgtataaagtggatatatattgttgtttggttttttattttaaggggtttttatttaaatagtttatataaattgatatttttttattattttagttaatgttaggttgaattttatgaagttgttattttttatgggttaaagaggtagaatattagtaattttatatggttttatttgatatatttttatatacgtagtaataagttgtgtattcgatggagaggaaaaggtattgggtgcggggagaggggttggttagaggtttgagttttagtgtttttaatatatttatagttttgattttaggattggaagttatttattttttgatttttttggaggaaaagtttaggtagcgattgttgatttattgaattttaaattagtttcgaaaatcgttgttgtcgtagtatttgaattcgatttgtagtatgtcgatggttttttttatgaaatatttgttaggggtgtttgtgtttcggtagtattttatgtcgtttttgagtttttggtttagggtgttttttagcgagtttcgaagtagaaagtagtagagagttataaggaagaggatgatgttgaagagaatatagatagttaggtacggttttagttagggtttttatttggtatatttggttgggtttagggcgtcgtagtagatttttttagttagcgagttgaagatataggatagtatttttatttttattaatgagttgggtataaaatggtttttagaattatttattatatcgtttttttttcggagtttaatttttaggaatagttttaggttgaagatgatgatgttagttaatacggagaattagtttatgagttagagtttttgggttaatttgattcgttttttttggttaaatttgatttttagtagcgttatgtttgttaagtgtagttcgggttgttttttatagtatagtttttattttaaattttaacgagtttagaggcggagatttagggttttgggaaaagtgtagatggtttaagttgtagggagttgttttgggggttatttatgtcgagttttattagtttgggattttcgtgaatgtagtagtggtggtaggggtttcggaattatagtttgagtaggggatagttttggttttgggcgttgtttttttagcgttttttttagttaagaaggggtagtttgaacgttgtagattaaaagtgggatttataagatattttgttaatttttttagttaggtttattttattagataaagttatgttatttttaaaatatggttaaaagtagtttttaggtatatgttgaattagaaagttttgggtatagtttggagaattaggagtaaagggtaagattggttagaagaatgggttgtatttggatgtttggtttagatcgtgttgttttttaaaagtatatttttaggttaattttttttaatatttaaaattttttgtaggataaataaattgttattttttttgagaaaagaaatgatagggttaggtatagtggattacgtttataattttagtattttgggagattaagttgggtggattatttgagtttaggagtttaagattagtttgggttatataggaagattttatttttatatatatatatatatatataaaaaaaaaaaaaaaaaaattagttgggtatggtggtatgtatttgtagtttttttagttattttggaggttgaggtggtaagattatttgagtttggggagtttaaggttgtattgagttatgatcgtgttattgtattttagtttgggtgatagagtgaggttttgttttaaattttaaaaagataaagaaaagaagagaagaaggaaggaaagaaagaaagtgatagatcgtgagaaaatatttgtaatttgtaaaattaaaaagtaatatatagtggttaggtatggtggtttatgtttgtaattttagtattttgggaggttaaggtaggtggatcgtttgagtttaggaggtggaggttgtattgaattgagatttttatattgtattttagtttgggtgatagtgagattttgtttggaaaaaaaaaaaaaagaattaatatgtaaaaatgttttaagttttataaatttataataaataaaaatttataattaaaagattaataattaattggaaaaataggtaaaaattaggaatagataatttataattaggaaatttgaaaagtttaataatttggaaaagattttaatttgggtaataagtaggaaaatgtaaatttaaataataataaaatattaaatttggtcgggtatagtggtttatatttgtaattttagtagtttggaaggttaaggtgggtggattatttgaggttaggtatttaagattagtttggttaatatggtgaaattttgtttttattaaaaatataaaaattgtttgggtatggtgataggtatttgtaattttagttatttgtgaggttgaggaaggagtattaattgaattcgggaagtggaggttgtagtgagttaagattgcgttattgtattttagtttgggtgataagagtgaaatgacgttttaaaaaaagaaaaagattaaattcgatttattaaattgaatgtatgttaaaattttgttattatatattaataaagagagtggaagtagaagtgtatatttttggtgaatttgtatatttattattattattaattaatggattattttttatagtagttttaggtttataaaaaaattgaatagaaaatatagggagtttttattattttttatttttttaattagttttttttttaattaatattttgtattaatgtggtatatttgttataattaatgaattaatattgatgtattattattaattaaagtttatagtttatattaaggtttagtttttgtgtatataattttgttatttttgttaaatgtataatgttatgtatttattattattgtattatatagaatatttttattattttaataatttgttatgttttgtttatttattttttttttttttattttttagttttgggtaattatcgtttagatttatagttttgttttatttagaatattttatagttggaattatataatatgtagtttttttagattggttttttttttttagtaatatatgtgattaatgattttttgtatttttttacggtttaatagtttatttttttttattattgaataacgttttattatatggatgtattacggtttatttttttatttattagagaatattttggttgattttagtttttgataattatgaataaaattgttataaatatttacgtgtaggtttttgttgaaaaattttttatttatttgggtaaatatttaggagtataatggttagattatatagtaagattatgtttaattttgtaagaaattgttaatttgttttgtaaagtgattgtataattttgtatttttattagtaatttttattttatgtttttgttaatatttgatattgttagtgttttagattttaattattgtaataggtgtgtagttgtattttgtttgaatttgtagtgttttaatgatatttgatttttttatgtgttatgtgtttatttgttatttgtatattttttttggtgaagtgtttgtttagtatttttgtttgtttttatttttttttgagttaggatttatttatgttgtttaggttggtttttaattattatttttaagtaatttttttattttagttttttgagaagttgggattataggtatttgttataatgtttagtatgtttattttttaataatgttgtttgttttttttagagtgtaaagttttatagttttttggaagggtaatttagttatatttattataatttttaaaaaaaaattttagcgacggagttttgttgtgttgtttaggttagttttaaattttttgggtttaagtaatttttttgttttaattttttaaattgttgagattataggtgtgagttattttatttattttaaaatttaaaatgtattaaaatttttaaagatttaataattttattttttagaatagtttgtgtataagtataagggtttttaagaataaattaaggttatgtgtggtggtttatgtttgtaattttagtattttgggaggttaaggtaagtggattatttgaagttaggagtttaagataagtttggttaatatggtgaagttttatttttattaaaaatataaaaaaaaaaaaaatagttgggtatggtggtaggtatttgtaattttagttatatttttagaggttggttgaggtataagaattatttgaatttaggaagtagaggttgtagtgagttgagattatattattgtattttagtttgggcgatagagtaagattttattttaaaaaaaaaaaaaaagaataaattaattttgttattaaatttttgtttatttaatattaaaaagggttttatgattagaatatgaagtttgtgagtttttggtggtaagtgggttaaaattttaatttagaattttttttttttttttatgtgtattgatttttttatattagatttattatttatatatttttttttaaggtttttaaattattatgtaaattagaggaatagtttttataggtagaggaggtgtaagaattaagtaataagatatgagtttttttatttaataattattttggaaaataaagtatttattttattgtttagtttaagtttggattttaaatgggagtgattttaaaagttaggttttgagttatatggggaaatatttttgttatattatagttatatagtattttgggttaaaaataatattatttaaagtgattatttttttaatagttagtgttggtttataatagttttggattatgaaaggattttaattttttattattaaggatattgaaaagaattgttgttatttttgaagttgtttttttttgttttgttttttttaaaagaggatgtttagataattagaggatttatattttttataaaaagtaaaataaaaattggaagataattgttttgtaggaaataggatgtagatgattgtgacgttattatagagagttttttagaagtatacgtgtagataagagaaaattagagggaagaagaggaagaaagatttaatgtagaaattagaaataaaaatttaaaaatagttttataagggtaattcgattagttaggtatttttttttttttaaatgattttgaggttgtaaatacgacgaggagggcggtgttgagtttatagtaagtttgtggatgttttttggtggttttaaatagaatggttttaatggatggaaatttaacgtgttcgtatttttagtacgttaaattatttagaaaagtaagagaaaaagaatagatatattagaaatgtttttggttaaattttttaagtacgaattaaggtaagatatggcgatgaataagtagagaaaagtggattgtaaaggaagtagtaattaatttgttagagaagggagggtttttttttgttttcggattatgttggatgtgagtttagatgcgagatatttattatagagataatagaagaggttagcggaattaaggatggtttattttttttttttagaaatattattaatgttgatcgttttcgtcgtcgtttgcgtgttcgttttcgcgttcggttcggtttcgtttcggttttcgttttcgtttcggtcgtagagtttgttttttttttattcgtagataatgttcgagtttaagaacggtttcgagtatgtttcgtttttcgtcgttatggtagtttcggtcgttatggtttttagcgtttcgcgcgttgtttatggtacggttaagatcggtgtcggtatcgcggttatgtttgttatgcggtcggagttgattatgaagtttattatttcggtggttacggttggtattatcgttatttatggtttggtggtgatagtttttatcgttagtttttcgaatgacgatattagtttttataggagttgtttttagttagcgtcggtttgagcgtgggtttgagcggtttggtagtcggttttgttatagatattttgggg

SEQ ID NO: 1577 - DNA, 9084 bp, Artificial Sequence
  chemically treated genomic DNA (Homo sapiens)
  unsure 2011: n is a or g or c or t
ttattcgggaggttgaggtaggagaatggcgtgaattcgggaagcggagtttgtagtgagtcgagattgcgttattgtagttcgtagttttgtttgggcgatagagcgagatttcgttttaaaaaaaaaaaaaaagaaagtaggtttgtaggtttgtgggtttttattattgttttgtatgtagtgtttaatgaggtgttgtataagaaagaaatatggggtttttgggtatggagttattaattggattttatgtatgatttgagaaattagtttttatagatttaatgtttaagaggttatatgattaaaattatgtgtataggaataattagaggattagagtggttatgtattgaataaggtttaagatgataaatttggtagtgtgatatgttagtgaaagaggtaatagattgagaaattttaatttaagagttgttttgttaaggaaataaaaatttttaaaggatatgtaagatatataggggatatatttttattgtatttatttttttgtgaaatagtagttttcggttttttaagtgtttataagtttattgtttttttggttttcggattagtgggttgttttttggtggtattgttttgatttgagtataatgtgtatatggttttattttagtaagtttaattgataagcgtgtgtttattagtagtttaaatggttttgtttatttggtagtaaattggtgtttaggtttttgttttttttaggtatttaggaggatttaattttttagttgaaaaggatgtaggattatatttgttggatgagtggttttgttagaagtaaatttatgaatagaagttagtatagtgtttagagttttaatatttggtaattgttaaattttttaaaatattagttggtttttttattaggataaaaatttagaatgggttattagataatattttaaaggggtttaatttgaatttatttgagggagttattcgaatttataatagtaattagtaatattttattttaagttaaattagttttttgatatattttggtaatgtttttttttagagtatggtttatttttttagttttttttatggattgtggtttttaagatgataatttaaaggttttaggaagagataagttatagtttttttgatatttttgttattattatagatagtttttgaattaaggtaggtgggtattaattatagaatacgttgtttttgtattaataagaaagttaataagtttgttttttattgttaattttatttagggtttttgtgggattatgatagtagttggttaagtatatatatttaatgtatgtatgttatagaagaagttacgaatatttatgaaggtgattttgatatatgcgtattgtataaatatgtatgttatatatgatttatgtttattttgaggtgaaagcgtaatatttaaatgtattataattaggttttgtatattaaaaggtttttttagaatataaaggtatgtaaatgtataatttttataattagttagaattagtttatggttagtagttttattattaggagaaaattagtgaaattagttttttgtttaattaaagttatagttatggttggtggaattggggtttagttagttagtatttatgaattggatgagttgaaattgttttaatattgtttgttttaaggttagtgtttgtttagttgttagagaaaaagagaaattttgtgttattgagaatatagtttattttttaagtgtaaggatgtatgatttaatttttgtttggtatggttttaggttttgtttataatatggtattttattgttataaaattttagttatgttagttttatgatttttattttaatattagtgttgattagttattgtatttaaattataaaagggagagggtataatgaggcgtatttgattttttattatattatatttgaagattaagtttttaaggtttttttggggttttttagttaagagggggnttatttagttagtagggggtttaatattttatttttagttgatatttttttatttggttaagatatattaaaggtagtataaatggttaaatttttattttgttttatattgttgttgggggtgttgtggttatgtgttttaggtttattatattttttggtaggatttttgtggttaaggaatttaaagttaaaagatttgtagttaattaaacgttttaggttatttggtaagggaggtggttaagtatttattaatttttaaaattttttaagtaatataagagttaaaattaaaagttaaatagtaaaggtataaaattgatttttttataagttttatgtgttgagttattagttgtttaggtatttgtgtatttatatttggaggatttgaattaattttattttttaaaagtaaaattagtatattaaaaggtgttttgtgtttattttttttatgagcgtttttgggtttagagggatttaatagttttttaaattttggagatattaggtatagagagaaaggtaaatttaatttttataagttataaatagtttaaaaagaaaaaaggcgggttaggcgtagtggtttacgtttgtaattttagtattttgggaggttgaggtaggtagattatgaggttaggagattaagattatttttgttaatatggtggaatttcgtttttattaaaaatataaaaaattagttgggcgtggtggtacgtgtttgtagttttagttatttgggaggttgagataggagaatggtgtgaatttaggaggtggagtttgtagtgagtcgagattgcgtcgttgtattttagtttgggtgatagagtaagatttcgttttagaaaaaaaaaaaaggtttttttgattttggaaaataaaatataaagaattagtaatattttaaatttaatttaggattagattttgaggatatttgttaaaatgttaaagttttaaattatttgattaaaatagaatcgtcggtttttgtaaaataataattatttattttataaaagtgataattaaaagattttaatagtaatatagaaagttatatgaatataaagatttaatttttttaaagtttagtttttttaagtaattaaaaatttgataaagataataagaatgaggaattattttgagaaaatgtaaaatttttttttttattttttgagatagggttttattttgttatttaggttaaagtgtagtggtataattatagtttattatagttttgaatttttggatttaagtgattttttcgttttagtttttttagtagttaagattataggtacgtattattatatttagttaattttttttagagatggggttttgttatattgttttggttggttttgaacgagttttaagtgagcgtgagttttttattttatttttttaaagtattaggattataggtatgagttattgttttttagtttaaaataattgttttttaggttagttattaaaaacgtaaagaaaaattttttgtagtgtgattgtttttttttatgggaagtttatttagataatttgtaagttaaatttgatgaaaataatatttgaatgtaattagatatagaaagattgtttaaggttatgagtagttgagtttaagttcgtattatttgttatataatagttaataagtttagagataaggtattgtggtaaggaaagttattttatttagagaattagaaaattaagaagatggtggattagtattataaagaattatttgaagttagtatgaacgttaggtttttttttatgttaagggaaggggaagaagaaggggattgggattaagaggtgattgatgattatagatatttgggtgttagtaagggtttgaggacgttgtaaaattttttttttttaggttaggttataatgtttttatatatttttaatataatattgttatttgtttgtatatttttttatttttttgggggttagtttggggaaaggaattgttattattttttttaaagttgaattgtaagttaaatttttataattagttggtttatgtatagagttaagtagaagtttttagtttaaaggataatatttttgggggttagaggtaaaatggagttagttatgttaagtttttttttatttttttttttttttgagatggaattttatttttattgtttaggtcggagtgtagtggtatgattttagtttattgtaattttcgttttttgggtttaagtaatttttttgttttagttttttgagtagttgagattataggtgtttattattatatttagttaatttttgtagtttagtggagatggggttttattattgttggttaggttggtttggaatttttgattttaggtgatttatttattttggttttttaaagtgttgggataggtgtgagttattatgtttggtttttttatttttataattaaattagttgttgttttttttgttaagaaattagttatgaagatttatttatgttttagatgggaaaattgggttgtagtttgggagaggttagttagggataaagttaaagttaatatagagaatggagtttttagggtataggggttgggtttgggttagggagttggaaatttaggttttacgtttgttttagttttgatgttagttttgagtagtgttgttttttattagtttttgtttgttttaggggttatagggttaagttagatagagggttgttagcgttattggatataagattgtttttttatagttgttttttttttagtttttttgttttttattcggaaatttgggtattttttatttagtttagttttgtttcgtagtgagatttattgttgattgttttgttatttattttagggtaataaattagggtagagtagaattgtaattattttatgtatggagtgtataaaaggggaagggttaagggagttatagaattttagtggattttagagagagttttagattgagggaagtatggatggatggagaaggatgtttcgttggggattgttgttgttgttttggggtttttgtatttttggtttttcgatagatattattatttttaaacggtaattggtaatttaggtagagaaggggtgggaggggtgtagggtttttatttttttaatattttggtttttttatatgcggtgttatttagtttttacgattagttggatagggaagtatggatttgtttagagaggttaagtgatttgtttaataaatgatattagtagttaggtttagaagttgtgatttttgttttttgtttagagtattatgttaattaagtattgtagagaatttagaagtattaggatatgttttttgtatttgaggagtttatagtttgaatattaagaagggtatgggtggttgggcgcggtggtttttgtttgtaattttagtattttgggaggttgagacggattatttgaggttaggagtttgagattagtttggttaatatggggaaattttatttttattaaaaatataaaaattagtcgggtatggtggtaggtatttgtaatttttagttattcgggaagttgaggtaggagaatcgtttgagttcggaaggtggagattgttgagttaagatcgtgttattgtattttagtttgagtgatagaataagattttattttaaaaaaaaaaaagacgggggtcggggtatgggtatagttaattgtattagggaagtagtttgatatcgtggttaaatgtaaggtttatagagttagattgtttttatttaaattttgttttattagtagaataaattaggtttggaattatgggtaagttatttaatttttttaagttttagtttattattttaaataggtatgataataatagtatttatttgatggggttgttttggggattttaggagataaggtatagaaagttgggtacgttgtaagagtttagttattgttagtattataggatagatttttataaatattaaaagtaaggtttggtcgggagtagtggtttacgtttataattttaatattttgggaggtcgaggggggtagattattcgaggttaggagtttaagattagtttgattaatatggagaaattttgtttttattaaaaatataaaattagtcgggcgtggtggtatatgtttgtaattttagttatttgggaggttgaggtaggagaatcgtttgaatttgggaggttgaggttgtagtgagtcgatatagcgttattgtattttagtttggttaataagagtaaaatttagtttaaaaaaaaaaaagaaagaaaaaaataaggttttaggtagtttataattagaaggagaaaattttagtattttttaggtgttaggttttgtgggaataagtgatttattaagattgtagaaggaagttgggtacgcggtttatgtttgtaattttagtattttgagaggttgaggtgggtagatcgtttgagtttacgagtttaagattagtttaggtaatatggtgaaattttgtttgtataaatataaaaattagttaggtgtggtggtgtaaatttgtagttttagttattcgggaggttgaggtgggagtattattttagtttgggaggtggaggttgtagtgagtagagattgatttattgtgttttagtttgggtgatagagttagattttatgtaaaaaaaaaaaaaaaaaaaaaaaagattgaagaaggggaagagatagtatttgagaaaaggttttatagagaaaggggtttttaatttggggatagtagatatgattagtagttttgaaggtagggaggtatattttaataatggtaatagttgttaagtttataaaatgtttagggtgttataggatttttttatatgttttattttaagttatgtttttaataatttagtatttttattttgtagatgaggatattgaggtttagggaggtgatatgtaagaggttaagttttaatatatattgggttttttgttttcgaaattgtttttttttgttttgaggttttcggagagtaattgttgggttgtgagtattgggtaagaggatgggtgttttaaagtagttgtattttaggataaaggtagaggaaagtaaaaatatttttttttgttgttatttaaaagagaaaaagaatggaattgggtaaggggtggagggggaatttagtttttgaaatagtattataggaattttgttattcgttatgtgtagagtattatgcgaggtatttgggatagttgaatgaatgagttttatttttaaggtgaatatgtatatatatatatttataatttatatttattgagtagtggtcgtatggttttatttgtatagtgattttgaggtaggtattattattaggtttattgttagagaggggttaatggagatttagaagaggtttagagaggttaggtagtttttttagaattatataagtggtaaggggatttaggtatgttttttgtaattattgtttttattatcgtacggtattagttttataagttgtatagtgtgggttgtgagatttaaggaaaaatagagttgaggtttacgggaaggtgaggtcggtgtgggttggaggttttggggtaagttttttggaggtgggggtatatgttgggttttggaggattaaagaattggggggaaaaggaagggaagaaggaaaggattttttgaaaaggaaatggtaagaagtaaaggtttaaagtataggttgttgtgagtaaatagtgggaaatgtaatttttttggggttaaatttttgattttttacgtttttagttgtgaagtgggagtaataaaattatttattttatgagagtaaataaaataatgattgtgaaaatattttggtaatagtaatttgtgataggaagataataaattatttttgttataatattatgttgataggtataaaagttgtatttatgtttatgggtaaaatgggggtaagtagaatgtatgggacgtaagaaggatgtaggaaggaaagggtagtgtgagtataggaggattagttattgagaagaaagtagaagaaagagggaatttttgtgtgtatgggaaagtttattgtagagttaatttgggtttttattttgggattttttcgtgaatagttagagatatttttttttgggttttggtagtttttatgtcgggatttaggggattttatatgggaaatagggttagatatatgttttgaatttttgttttaatatttttgagttatttttgtttttgtgagtttttattttttttatttataaaatggatgatagttagtttgttggtgtgattttagtagcggtttagtagagttagttttttaggtttttttaattttgttttttaaaggtgatgggaaaatatttagataagaagttaagggatcgggatatatttttttaaggacgaggtgtatggcgttttgaagatgttggtatttttttaggtttaatttagtttagggggtttattttattatagttttggttgggtgtttgttttttggtattttggagattttgtagttgttgtgggtatttgttgttatttagcggttttttatggtattgttttttcgttagtttttagttttgataggggtattttttggtattaatttttttagagggaatgtttgtgtttgttttttgtttgttttttcgttaggtggagttttttaaaggtagttatgattattatttttttagttttagtgtttagtatagtgaggtataaagtagttgtttagtaggtgattacggaataaatgaatgaacggattaataaataaatagttttgtttaattaaaattaggtaatagaaggaagttattttagggttatttaattttcgggtagttgatttttttaaattgatttttgataagaagtaatttttataaatgttttagaggtttttagcgatagaggtgattgttttatttttgttttttttattttgggttagg

SEQ ID NO: 1578 - DNA, 9084 bp, Artificial Sequence
  chemically treated genomic DNA (Homo sapiens)
  unsure 7074: n is a or g or c or t
tttggtttagggtggaggaggtaaaaatagaataattatttttgtcgttgagggtttttggagtatttataagagttattttttgttaagagttaatttagaggagttagttgttcggggattaaataattttgaagtgatttttttttgttgtttaattttgattagataaggttatttgtttattggttcgtttatttatttatttcgtaattatttgttgaataattattttgtgttttattgtgttggatattggagttagaaagataatgattatgattgtttttaaggaattttatttggcgggaggatagataggaaataggtatagatattttttttgaagagattaatgttagggagtgtttttgttaaaattaggggttggcggggagatagtgttatgggaggtcgttaggtggtagtagatgtttatagtagttgtaaggtttttaggatattaggggataggtatttagttagggttgtggtggagtggattttttgagttgggttgggtttagagagatgttagtatttttagagcgttatgtatttcgtttttggagagatgtgtttcggttttttggttttttgtttagatgtttttttattatttttgagaggtagaattaaagagatttaggaaattgattttattgagtcgttattgaaattatattaataagttagttgttatttattttatagatgagaaaaatgaaggtttatagggataaaggtgatttagaaatgttgaagtagggatttagagtatgtgtttggttttattttttatatagggttttttgggtttcgatataaaggttgttaaagtttagaggaagatgtttttagttgtttacgggaaggttttaggatggaagtttaagttgattttgtaatagatttttttatatatataaagatttttttttttttttattttttttttagtggttagtttttttatatttatattatttttttttttttatattttttttgcgttttatgtattttatttatttttattttgtttatgaatatgaatgtaatttttatgtttattagtatggtattgtaatagaaatgatttgttatttttttattataggttattgttattaaaatatttttataattattattttatttgtttttataaggtggatgattttattatttttattttatagttgggaacgtggagggttagaggtttggttttaaagaggttgtattttttattgtttatttataatagtttatgttttggatttttattttttgttattttttttttagaaaattttttttttttttttttttttttttttttagttttttagttttttaaggtttaatatgtatttttatttttaggaagtttattttaaggtttttagtttatatcggttttattttttcgtgggttttagttttgtttttttttgggttttatagtttatattgtatagtttgtggaattggtgtcgtacggtggtgaagatagtggttgtagggggtatgtttgaatttttttattatttatgtgattttgagaaagttatttaatttttttgggttttttttaagtttttattaatttttttttaataatgggtttaatggtagtatttattttagagttattgtgtagatgaaattatgcgattattgtttaataaatgtaaattgtaggtgtgtatatgtatatgtttattttgagaatggagtttatttatttagttgttttaagtgtttcgtatgatgttttgtatatagcgggtagtaaaatttttataatattgttttaaaagttggattttttttttattttttgtttaattttatttttttttttttttggataatagtaggggaagatgtttttatttttttttatttttattttggagtgtagttgttttgaagtatttatttttttatttagtgtttataatttagtaattatttttcgagagttttagagtaagggaaagtagtttcggaagtaaaaggtttagtgtgtgttgaggtttagttttttatatattatttttttgagttttagtgtttttatttgtaaagtgggaatgttgagttgttgggggtatgatttgagatgagatatgtgaaaagattttgtgatattttaagtattttataggtttagtaattattattattattaaagtgtgtttttttatttttaggattgttggttatatttgttgtttttagattgaaaatttttttttttgtgaggtttttttttaaatgttgttttttttttttttttagttttttttttttttttttttttttttatataaggtttggttttattatttaggttagagtatagtgggttagtttttgtttattgtagtttttattttttaggttgaagtgatgtttttattttagtttttcgagtagttgggattatagatttgtattattatatttagttaatttttgtatttgtatagataaggttttattatgttgtttaggttggttttgaattcgtgagtttaagcgatttgtttattttagttttttaaagtgttggaattataagtatgagtcgcgtgtttagtttttttttatagttttaatgaattatttgtttttataaggtttggtatttaggggatgttaaggttttttttttttaattgtgggttatttaaagttttgttttttttttttttttttttttttagattgagttttgtttttgttgattaggttggagtgtaatggcgttatgtcggtttattgtaattttagttttttaggtttaagcgatttttttgttttagttttttaagtagttggaattataggtatgtgttattacgttcggttaattttgtatttttagtagagatagggtttttttatgttggttaggttggttttgaatttttgatttcgggtgatttgtttttttcggttttttaaagtgttgggattataggcgtgagttattgttttcggttaaattttgtttttgatatttgtaagaatttattttgtagtattaatagtagttgggtttttataacgtgtttagttttttatgttttattttttaaaatttttaaagtagttttattaagtaggtattgttattattatatttgtttaaaatgataaattgagatttggagaggttaaataatttgtttatgattttagatttagtttgttttgttagtgaagtaaaatttaaatgaaggtaatttaattttataagttttgtatttaattacgatattaagttgtttttttggtatagttaattgtatttatgtttcgattttcgttttttttttttttgagatggagttttgttttgttatttaggttggagtgtagtggtacgattttggtttagtaatttttatttttcgggtttaaacgatttttttgttttagtttttcgagtagttggggattataagtgtttgttattatgttcggttaatttttgtatttttagtagagatggggtttttttatgttggttaggttggttttaaatttttgattttaagtgattcgttttagttttttaaagtgttgggattataggtaggagttatcgcgtttaattatttatgttttttttaatatttaggttgtgagttttttaagtgtaaggggtatgttttaatatttttgagttttttatagtgtttagttagtatggtgttttgggtaggaagtaaaagttatagtttttagatttgattattagtgttatttattgggtaagttatttgatttttttgaataggtttatatttttttgtttagttgatcgtaaggattgaatgatatcgtatgtggaaaagttagggtgttgggaaggtgggaattttgtattttttttattttttttttgtttgagttattaattatcgtttaaaggtggtggtgtttgtcgggagattaaaggtataggagttttagagtagtagtagtagtttttagcgaggtatttttttttatttatttatgttttttttagtttggggttttttttgagatttattgaggttttgtggtttttttagtttttttttttttatatattttatgtatggggtgattgtaattttgttttgttttgatttattattttggggtagatggtagggtagttagtaataaattttattgcgggatagagttaggttgggtgaagggtatttaggttttcggatggggagtagaggggttggaggaaggatagttgtgggaaagtaattttgtgtttagtgacgttagtagttttttatttggtttggttttgtgatttttggagtaggtagaggttgatgagaaatagtattgtttagggttaatattaaaattgggataagcgtaaaatttaggtttttagttttttagtttagatttaatttttatattttggaagttttattttttatattaattttggttttgtttttgattggttttttttaggttatagtttagtttttttatttagaatatgggtgaatttttatgattggttttttggtaggaaaagtaatagttggtttaattataagagtagaggggttaggtatggtggtttatatttgttttagtattttgggaggttaaggtgggtagattatttgaggttaggagttttagattagtttgattaataatggtgaaattttatttttattaaattataaaaattagttgggtgtggtgatggatatttgtaattttagttatttaggaggttgaggtaagagaattgtttgaatttaggaggcggaggttgtagtgagttgagattatgttattgtatttcggtttgggtaataagagtgaaattttattttaaaaaagaaagagagtggagggagatttagtatgattgattttattttgtttttgatttttaggggtattattttttaggttaaaagtttttgtttagttttgtatatagattagttaattataggagtttagtttgtagtttaattttaaaaaaaatggtaatagtttttttttttaaattaatttttaaggagataaggaaatatatagataaataataatgttatgttaaagatgtataggaatattgtgatttgatttagaaaaaagaagttttataacgtttttagatttttgttggtatttaggtgtttgtggttattagttattttttgattttaattttttttttttttttttttttttaatataaagaagagtttaacgtttatgttgattttagatggttttttatgatgttggtttattatttttttggttttttggttttttgaataaggtagttttttttgttataatattttgtttttagatttattggttgttgtgtggtaagtgatacgagtttggatttagttatttatagttttgaatagtttttttgtgtttgattatatttaagtattgtttttattaggtttgatttataggttatttaaatgggttttttataagaagaagtaattatattatagaaagtttttttttgcgtttttggtagttggtttaagaaataattattttaggttgggaaatagtggtttatgtttgtaattttagtgttttgggaggatgaggtaggaggtttacgtttatttgaagttcgtttaagattagttagggtaatatagtaagattttatttttgaaaaaaattagttgggtgtggtggtgcgtgtttgtagttttagttattggggaggttgaggcgggaggattatttgagtttaggagtttaaggttgtagtgagttatgattgtgttattgtattttagtttggatgatagagtgagattttgttttaaaaaataaaaggaaagattttatatttttttaagataattttttatttttgttatttttattaggtttttgattatttaggaaaattgagttttagaaaggttaagtttttatatttatgtaattttttgtattgttattaaagttttttaattattatttttgtgaaatgaataattattattttataaagatcggcggttttgttttgattaaatggtttgaggttttaatattttgataaatgtttttaaaatttaattttaaattaagtttgaaatgttgttaattttttatgttttgttttttagagttaagaaagttttttttttttttttgagacggagttttgttttgttatttaggttggagtgtagcggcgtaatttcggtttattgtaagttttattttttgggtttatattatttttttgttttagttttttaagtagttgggattataggtacgtgttattacgtttagttaattttttgtatttttagtagagacgggattttattatgttagtaaagatggttttgattttttgattttatgatttgtttgttttagttttttaaagtgttgggattataggcgtgagttattgcgtttggttcgttttttttttttttgagttatttatagtttatagaaattgggtttatttttttttttgtatttaatatttttaggatttaaaaaattattaaatttttttgggtttaaggacgtttatggaagaggtgggtataaaatattttttgatgtattaattttatttttaaggagtaaaattagtttagattttttaaatataggtatatagatgtttaaatagttgatggtttaatatatagaatttatagaaaggttagttttgtatttttgttatttggtttttggttttggtttttatgttatttaaaaggttttaagggttaatgaatgtttggttattttttttattaaatggtttaaaacgtttaattgattataagttttttggttttgagttttttagttatagggattttattaagggatgtgatggatttggggtatatagttataatatttttagtaataatatggaataaaataaaagtttggttatttatgttgtttttggtatattttggttaaatgggagaatgttaattaaaaataaaatattaagttttttgttgattgaatgantttttttttggttaagggattttagaaaaattttaaaaatttagtttttaggtataatgtgatgggaagttagatacgttttattatatttttttttttttgtggtttagatataataattaattaatattaatgttaaaatagaggttataagattgatataattgaaattttgtggtaataaaatattatattataaataggatttaaggttatgttaggtaagagttaagttatgtatttttatatttaaagaataagttatatttttaatgatataaggtttttttttttttttagtagttaagtaagtattggttttaagataagtaatattaaaataattttaatttatttagtttatagatgttgattaattgaattttagttttattagttataattatagttttgattgaataaaagattgattttattaatttttttttgataataagattgttggttatgaattggttttagttagttatagagattgtgtatttgtatgtttttgtgttttgaaaagattttttgatgtatagggtttaattgtagtatatttaaatgttacgtttttattttaaggtaaatatgggttatatgtaatatgtatgtttgtataatacgtatgtgttaggattatttttataaatattcgtagttttttttgtaatatatatatattgaatatgtatgtttagttaattgttgttatagttttataggagttttgggtaaaattgatagtggggaataaatttattgatttttttattgatataggggtaacgtattttgtagttaatatttatttattttaatttaaagattatttatgatggtgataggagtgttaggggagttgtgatttgtttttttttgaaatttttagattattattttagagattataatttatgggaaaaattgaaaagatgaattatattttaaaaagaagtattgttaaaatatattaagaaattaatttgatttgggataagatgttgttgattgttgttgtggattcgagtggtttttttaagtaggtttaaattgagtttttttgaagtattatttggtagtttattttaggtttttgttttggtgggagaattaattgatgttttaagagatttggtaattattaaatattaagattttaggtattatattaatttttgtttatgagtttgtttttagtaggattatttatttagtagatgtggttttatattttttttaattgggaaattagatttttttaaatatttggaaagaataaggatttgaatattaatttgttgttaagtggataaggttatttgagttgttggtgaatatacgtttattagttaaatttgttggagtaaagttatgtgtatattatatttaggttaaggtagtattattagaagatagtttattaattcggaaattaggaaaatagtgggtttgtgagtatttgaaagatcgaaagttattgttttataaaaagataagtataatgaaaatgtattttttatgtgttttgtatgttttttagagatttttgtttttttggtaagataatttttgagttaggattttttaatttattgttttttttattagtatattatattgttagatttgttattttaaattttgtttagtatatgattattttgattttttagttgtttttgtatatataattttagttatgtagttttttgggtattagatttatagaagttggttttttaaattatatataggatttaattgataattttatatttagaggttttatgttttttttttatgtagtattttattagatattatatgtaaagtaataataaggatttataagtttgtaagtttattttttttttttttttttttgagacggagtttcgttttgtcgtttaggtaggattgcggattgtagtggcgtaatttcggtttattgtaagtttcgtttttcgggtttacgttatttttttgttttagtttttcgagtag

SEQ ID NO: 1579 - DNA, 5359 bp, Artificial Sequence
  chemically treated genomic DNA (Homo sapiens)
aggagtggcgtaaaaggtgattatttatagggtaggcgttttatttttgttagttgcgggttatgttatgtggtattaagagattttgtaggcgggtagggcgtatgtgttttttgttttcgttttgttataatgttgtttacgtatttttttcgttttttttagaaattagtaaagatagttttggtattaagttagttaataagcggtttatgttttttttagaaatgtaagtaggaagtttttttcgggaattttttgagattaggggtggaaatagttgggtttagttttttgttaaatgattgggggtttttaatcggttttgtattagtagggtttttagtggtgtagggtttatattaatttttttttttttttttttgttttttaaggaaatttgttttaaagaaatttaaggtcgatggttagtgagaggaagttgattagtttttggatttttttttagatttttttgttttaggaatattcgttagggtttattttttttatttcgttttagtattcgtattttattttcgcgagtcgttgtttattttttttttttttttttttttttttgtttttaaaataatttaaagaaagtatattttattattgttgttgggaggaagtagaggtagatgggaaagtagagagaggagcgcgttttttttttttttcgttgtcgtttattttggggagagatttttgcggggagggaaggcggagttgaggatagttagtttcgtttttttaaggttgtgcgtttttgagggttaggtcgggggtaggtatggaggggaggaaaggcgttttttttggttttttttagagtggtttttttggtattttggtttgggtgtttggttttgttttttttttttttttttgtgtttttagttatttaattttttttttttaggttttttcggtttattttgtttagtgattttataggaagtttatatatttttttagaggtttttgtgtttttattttttttattttttttttttttttttttattttaaaaaagaaaagaaggaaaaagaaaaaaggggtaaggagtttcgcggcggtttgggtagcgtttgtgtagatttttttgtaggtcgtattgttaattgttgtatttgttgtgttttttaggttgtaattggtgaagtttatatttttattgtaattttagcgtgtggggttttgttttttttttgttgttgttagttgtgtatagaatgtgtaattttttttttttttttttttttttgttttgttttgttttgtttttgtttttttatttttttttttttggttaatttttggtagggatttttttggaggaaaagttggggttagttagggtaggagaggtgtgaaatttgttacgaggggtttgttgtttgttatttagtttaattttttgttgttggtttttgttttttgtttttttgtttgtttttaggtcgttggaataaaggaaggatagtttattttttatgggcgattatttcgtatttatagggtcgagtttaggggagtttgagggagggttggggtttttttgttttggatttttagttttttttatgttttttttttgagtattatcggtatcgttttttaaatagggttgttggttttcgtagttattgttttattttttttaaatcgttatggaaagggtggagaatggaggggaattaggcgtttttggaggtagtttgggagggtgattgtgtagtgttatttataagggaggttagggtaatggagtaggttattagtagtagttgtgtagtatggaatttaggttaggtttcgaggttgggggatttgtttggagttttttgttttttattttaaatttttgtcgaggagtaaggtttgttagtaagttagaaggatttgaatcgagtagttaatttttttagtttttttttatcgatttttgtttggagacgtagtagtttgtgttttttagggtttttggtttgttgtattatagtatatttcgttgtggaaaatgttacgtttagttattttggagtttatttatttggttttgttgttttattttattttttttttcgcgcgtttattgatttgtttttgaggagagtatatcgtttattattgtagagtaatttttgtgatttaatattattatagtgcgatgtcgttttgtgttattttgaataattaaaagattttttttgaaataattattaggtgttttattgtgtttcggtatttttttaggaagtttgagcgggaaggttgagatttgttcgaggtttacgggagttttttggagggagatttgagttttggtgaaagcgtagaaggttttagagtgaggtttttgttgtggttttcggtttttggattaagtcggattagggtttagtaggttgtttggtagttgttttgtagggtaagggttaaagagttttttgggtagttgttgttgattttttgtgtttggggtttagatttttttttttttttttttgtattagaggataggatggggtaagggtttggtaggttattagcggtagtttttttgggtgggttggggggaggtgggttgagttaagtatattacgggtattgtagaggtggatttttttttttggtttttttttaaatgtgagttatgtttttaagggaagaagtaagagtttgtgatttagattgattatttagtagttgggtcggtaggatagttgggatttcgtgggttgaatttgtattaggaggtttagaaagtttcggggtaaggtggtcggagtagtataggtttaggcgggtttgaggggagtgatattttgtttttggggtttggtgtttttggcgtatttgtatttttcgttttttttaagtttttgtcgtttgtttttgttttttttatatatttttattgtttagttttttttttagagtatttaggtatttcgttattagaagtttttggagtaattaaagttttcgtgtttttatttgtggtatgggtgtgtgtgtaaggttttgtcgaatgcgattttttttgggaagtttttgttttgtggggtttgttgtgttatgtgggggtggggggaagtagattggttagggtttgatattaggagttatggttttgttttatttatcgtattaattgtgatttgttttggagtttagtttcgtagaggtttaaggagaggggtgggaaagtgttttttagagtagagcggtaggagttatggttggggttggtggaggttaggggttatatggggttggttttagaatcgaggggttttgcggatttgttatatttttggtaaatggcgttgtgggcgtttcgtttggtgggggtggtataaggtttttttttattttatttttgtagttggtatttgtggggttatttatttttcgtatttttttagtttatttgttttatcgcggttgtattatattttataaggtaagggttatattagttatgtttttggtgtttatttgaaaatatcgcgttttcgtttgagggtattatttagtttggggaggtaggagggaggttggatatgaatgtgaatatgataggtttgtgagtagggtaggtagatatagttcggttgggtataaagtttattttttgagtatgagtcgaggtcgagggtgggtgggagtatatagaggatgtttttttagttgttagggtattagttttattattaagtattttaaaggggaattgtttggggttgggtgggttagtttgtagtagggattgagatagttattgtggtattaaagattagtagtgtagtatttacgtttagaggttggaatttattttgtgtattgttggtttggaaggtaggaattattttagtttagttgttttgtagtattatcgggttagttatagagttatagatagatttgggtagttggaaaataggtttagagaaggggggtgtgggttgttatttgtagttattgtttggttttagagttgtgttatttgtgtaaagaagttagtgttaaggtcgagcgcggtggtttatatttgtaatattaatattttgggaggtcgaggtaggtggattacgaggttaagaatttgagattagtttggttaatatggtgaaaaatcgtttattaaaaaaaaaaaaaaaaaaaaaaaaaaaattagttaggtatggtggtaggtatttgtaattttagttattttagaggtcgaggtaggagaattgtttaaattcgggaagcggaggttatagtgagttaagattatgttattgtattttagtttgggcgatagagtaagattttattttgggaaaaaaaaaaaaaaaattagcgttaatggttgtttattattgattgttgaggtagttggtgataaattgatttaaaagagaggatttgttaggttgggtgcggtggtttacgtttgtaattttagtattttgggaggttgacgtaggaggatcgtttgagtttaggagttcgagattagtttgggtaatattgtaaaattttgtttttattaaaaatataaaaattagttaggtatggtggtttatatttgtggttttatttatttaggaggttgaggtgggaggatcgtttgagtttggtaggttaaggttgtagtgagttgtttgggcgataggatattgttttaaaaaataaagaaataaataataataataataataaaaatagaatttgttttttgtttattttgtgtggtgataggttagagggatttttgtatttaggtttattagttgttttttgttttgttgtatttttgttttataggtttggtagggttaaggtttttagtcgttttgtcggggtttttggtgtagggcggggtgggtggtagtttcgtttttttttattttagatttttcggttattttagttttttttattaagtaggattttgagattagagtttttagtaggggttttggagggattggtttattcgagtggagggtcgcggtaggaataagtgcgggggttttaaagtttcgttttaggtttagcggaattttgaagaggagggggagggtgagtcgggcgcggttgtgttagttgagtgatagttacgggatcgcgattaattttgtttggttttttagaggagtaggagggatgagtaagggttttttagcgcgataggttagtggtggggtgtttggggggagtgttgttttggagggtttcggggatggtgacgtttgaagtttcgtgtagaggtggggagatttttgagggttggttttcgaggttgggggggtttaggttttatgtgggggttgcgtttttaagttttattttttttagg

SEQ ID NO: 1580 - DNA, 5359 bp, Artificial Sequence
  chemically treated genomic DNA (Homo sapiens)
tttaggggaaatggggtttgaaggcgtagtttttatatgggatttaggtttttttagtttcgggaattagtttttagggatttttttatttttgtacggggttttagacgttattattttcgggattttttaagatagtattttttttaagtattttattattggtttgtcgcgttgggagatttttgtttattttttttgtttttttaggaagttagatagagttggtcgcggtttcgtgattgttatttagttgatatagtcgcgttcggtttatttttttttttttttttagggtttcgttgggtttggggcggggttttgaggttttcgtatttgtttttgtcgcgattttttattcgaatgggttagtttttttagggtttttgttgggagttttggttttaagattttgtttggtgggaaaagttgggatggtcggagggtttgggatgagggggaacggggttgttatttatttcgttttatattaggggtttcggtagggcggttgagggttttggttttattaagtttgtggggtaggggtgtagtaggatagggaatagttagtgggtttgaatgtagaggtttttttgatttgttattatatagggtagataggaggtaagttttgtttttgttgttgttgttgttgtttgtttttttgttttttgagatagtgttttgtcgtttaggtagtttattgtagttttgatttgttaggtttaagcgatttttttattttagttttttgagtaggtgggattataggtgtgggttattatgtttggttaatttttgtatttttagtggagatagggttttgtaatgttgtttaggttggtttcgaatttttaagtttaagcgatttttttgcgttagttttttaaagtgttgggattataggcgtgagttatcgtatttagtttagtaagtttttttttttgaattagtttgttattaattattttaatagttagtaatgggtagttattggcgttaatttttttttttttttttttaagatggggttttgttttgtcgtttaggttggagtgtagtggtatgattttggtttattataattttcgtttttcgggtttaagtaatttttttgtttcggtttttggagtagttgggattataggtgtttgttattatgtttagttaattttttttttttttttttttttttttttagtagacggttttttattatgttggttaggttggttttaaatttttgatttcgtgatttatttgtttcggttttttaaagtgttggtattataggtgtgagttatcgcgttcggttttggtattgatttttttatataagtgatatagttttaaggttagatagtaattgtaggtaatagtttatattttttttttttgggtttgttttttagttgtttagatttgtttgtagttttatgattgattcgatgatgttataaggtagttgggttgaggtggtttttattttttaggttaatagtgtataaaatgggttttagtttttgggcgtgggtattgtattgttggtttttgatgttatagtggttgttttagtttttgttgtaggttgatttatttaattttaaatagtttttttttggggtgtttggtaatgaggttgatgttttggtagttggggaggtattttttgtgtgtttttatttattttcggtttcggtttatgtttaggggatgagttttgtgtttagtcgggttgtatttatttgttttgtttataggtttgttatgtttatatttatgtttagttttttttttgtttttttagattgagtggtgtttttagacggaaacgcggtatttttagataaatattagaggtatgattgatgtggtttttgttttgtggagtgtgatgtagtcgcggtgagataagtgagttgaaggaatgcggagggtgggtagttttataggtgttagttatagaagtggggtaggaagaagttttgtattatttttattaggcgaagcgtttataacgttatttgttaaaggtatggtaaattcgtaaggtttttcggttttggggttagttttatgtggtttttggtttttattagttttagttatgatttttatcgttttgttttgaaggatatttttttatttttttttttgggtttttgcgaggttaggttttaaggtaggttatagttggtgcggtgggtaagatagagttatggtttttggtgttaagttttggttagtttgtttttttttatttttatatgatatagtagattttataggatagaggttttttagaagaggtcgtattcgatagggttttgtatatatatttatgttataggtggagatacggaggttttggttattttaggagtttttggtagcggagtgtttgggtgttttgagaggaaggttgggtagtagaggtgtgtaggggaaataaaggtaggcggtaggggtttggagggggcggggaatgtaggtgcgttaggagtattaggttttagaagtagggtgttattttttttagattcgtttaggtttgtgttgtttcggttattttgtttcggagttttttgggttttttggtataaatttagtttacgggattttagttgttttatcgatttagttgttaggtggttagtttggattataagtttttgtttttttttttgggggtatggtttatatttaagaggaagttagaggaagggatttatttttgtagtattcgtggtgtatttgatttagtttatttttttttaatttatttaaggaggttgtcgttggtgatttgttaggtttttgttttattttattttttagtgtaggaggggagggagggagatttgggttttagatataggaagttagtagtagttgtttaaggggttttttggtttttgttttgtaaggtagttattaagtaatttgttggattttggttcgatttggtttaaagatcggaggttatagtagaggttttattttggggttttttacgtttttattagagtttaggtttttttttagggggttttcgtgagtttcgggtaggttttagttttttcgtttaggttttttgagaggatgtcgggatatagtgagatatttagtggttattttaaaaaaagttttttaattgtttaaaatagtataaaacgatatcgtattatggtaatattgagttataggggttattttataatagtgaacggtgtattttttttagaaataaattaataggcgcgcgagagaagggatggggtaaaataataggattaggtgagtgggttttaaggtgattaaacgtgatattttttatagcgaaatatattataatataataaattagaggttttggaggatataggttgttgcgtttttaggtagaggtcggtaggggagggttggaaagattggttgttcggtttaaatttttttgatttgttggtaagttttgtttttcgatagaagtttggggtggggggtagaaaattttaagtagattttttagtttcggagtttggtttgagttttatgttgtatagttgttgttggtggtttgttttattgttttagttttttttgtgggtgatattatatagttatttttttaagttgtttttaaggacgtttggtttttttttattttttattttttttatgacgatttgggggaggtggagtagtggttgcggaaattagtagttttgtttgggaggcggtgtcggtggtgtttagggagggggtatggggagagttggaaatttaggataaggaggttttagtttttttttaagtttttttaggttcgattttatagatgcggagtgatcgtttatgaggaatgagttgttttttttttgttttagcggtttgaggataggtaaaagggtagagggtaggggttagtaataggaagttgggttgggtggtaaatagtaggtttttcgtggtagattttatattttttttgttttggttggttttagttttttttttagaaagatttttgttaagaattagttaagaagaaaaaagtaaaaaaataaaaataaaataaaataaaataaaaaaaagagaaaagaaaaaagattatatattttgtatatagttaataataataaaaaagggataaaattttatacgttaaaattataatgaaagtgtgaattttattaattgtaatttaaaaaatataataaatgtagtagttggtagtgcggtttgtagggaggtttgtataggcgttgtttaggtcgtcgcggggttttttgttttttttttttttttttttttttttttttttaaaatgggaaagaagagggggagggtagaagaggtgggagtataaaggtttttgagaaaatgtgtaagttttttgtggggttattgagtagggtgggtcgggggagtttgaggaagggaagttaggtgattggaaatataaggggaagaaaagaaaatagaattagatatttaggttagggtgttaggaaagttattttggggagggttaagagggacgtttttttttttttttatgtttgttttcgatttggtttttaggaacgtatagttttgggagggcggagttggttgtttttagtttcgtttttttttttcgtaaaagtttttttttagggtgggcggtagcggggaggaaaggaagcgcgtttttttttttgtttttttatttgtttttgtttttttttaatagtaatggtaaaatgtgttttttttagattattttaaaaatagagagaaagagaaaggggagaggagtgaatagcggttcgcgagggtgaagtgcgaatgttgggacggggtgggaggggtgggttttggcgggtgtttttgaagtaggggggtttggagaagaatttaggggttagttagtttttttttattgattatcggttttagatttttttggagtagatttttttggaaggtagaaaaaggaaagagaaagttagtgtgggttttgtattattggaggttttgttggtgtagggtcggttaggggtttttagttatttgataagaggttgaatttagttatttttatttttagttttagaaggttttcgagaggggttttttgtttatatttttggagaggatatgggtcgtttgttggttggtttggtgttagagttgtttttattggtttttggaaggaacgggagagatgcgtgagtagtattgtgatagaacgagagtaaggaatatatgcgttttgttcgtttgtagagttttttggtgttatatggtatgattcgtagttggtaagggtggggcgtttgttttatgggtggttattttttacgttattttt

SEQ ID NO: 1581 - DNA, 7864 bp, Artificial Sequence
  chemically treated genomic DNA (Homo sapiens)
tatttagggttatatttaggggtattggaaagttttatgaaaagagatgggttttggtttttttagtttcgtgattttggggtggagatgttataggaaaggggggttcgatttagagtttaagatagggtttttggatattacgtaagaaagaatttagggtttggtgcggtggtttacgtttgtaattttagtattttgggaggtcgaggcgggtagattacgaggttaggagttagagattagtttggttaatatggtgtaattttatttttattaaaaatataaaaattagttaggcgtggtggcgttcgtttgtagttttagttattcgggaggttgaggtaaaagaatcgtttgagtttgggaggcggaggttgtaattagttaagatcgtgttattgaattttagtttaggtgatagagagagatttcgttttaaaaaaaaaaaaaaaaaaaagaattttaggtgagttcgtaaagtggaagtaaatttgtaaggaataaaagaatggttattttatagagtagtttcgagggttgtatttttttttattttttttgagatggagtttttatgttgtttaggttggagtgtagtggtgtgattttggtttattgtaatttttgttattcgggattaagtaatttttttgttttagttttttgagtagttgggtattataggtatgcgttatacgttcggttaatttttgtattttaagtagagacggggtttcgttatgttggttaggttgtttttgaattttcgattttaagcgatttgttagtttcggttttttaaagtgttgggattataggtatgagttattatatttagttttattttttgatgatatgttaaataaggggtggattattttatgttttttgtttttagtttatataaagtaattttttggcgttgttatggtatttgtaaattgtaatggtgttggtgggagtgtagtagtgaggattagacgttatttttatggttattttggttttggtgggtttgagttagtttttttattgtaatttgttttattagtaaggtttttatttatgtatttttttaaattatttttaaaatttttattttttttgaaatagagttttataatgttatttaggttggagtgtagtggcgcgattttggtatattgtattttttatttttcgggtttaagtaattttgttttagtttttttagtagttgggattataggcgtacgttattatattcggttaatttttgtatttttagtatagatggggttttattatgttggttaggttggttttaaaattttgatttcgtgatttgtttattttagttttttaaagtgacgggattataggcgtgagttattacgttcggcgaggtttttatttttatttatttatttatttatttatttatttatttatttatttatttgagatggagttttattttgttatttaggttggagtgtagtggggtgatttcggtttattgtaatttttgtttttcgggttcgagcgatttttttgttttagtttttaagtagttgagattataggtgtttattattacgtttatttaattttcgtatttttattagaaatcgggttttgttatgttttttatattggtttcgaatttttgattttaagtgattcgtttattttcgttttttaaattgttcggattataggtatgagttattgtatttagttagtaaggtttttatgaattgtattttgcgttgattttttgttttattttgtgattaagaatgttttaattatttaggaatgaagtttagtaggttttagttttattttatttagtttttgtttaagatggagttgttttggtttatacgtttttggtagagagggtatttattttttttttttgggtatttattgtttatttgttaagagcggggagcgttttattttgttgggttcgttgggaattatgtggttattattatttttataattttattttttttggttttagtagaagtttttgtttttagttttgaaggtagtttttttttttcgttttttttttttttttttgagacggagttttattgtgttgtttaggttggagtatagtggcgcgattttggtttattgtaatttttgttttttaggtttaagtgatttttttattttagtttttttagtagttgggattataggtacgtgttattatatcgatttattttagtatttttagtagagataggatttcgtcgtgttggttagattgttttggaatttttgaatttggttttttaaagtgttgggattataggtatgagttattatgatcggtttttttatttggatttatgaggtttgtttcgttttttattatttaggtttattttgtgggatatttttttttagataatattggttatagtatttttttatttttttattttatttttttatgttgtttttaggattttaaggagtttattttataatttatttgtttattgtgtattttattttagaatgtaaagggagttgtttgtttttttttttttttttttttttttttttttttgagatttaggttggattatataattattgtttattgtagtttttattttcggagttgaattaattttgttagttttagtttttagagtagttgggattataggtatatgttattacgtttagttaattgtttttttttttttgagataaagtttcgttttgtcgtttaggttggagtgtagtggtagaattttggtttattgtaatttttttttttcgggtttaagtaatttttttattttagttttcggagtagttgggattataggtatatattattatgtttagttaatttttgtagagacgggtgttttgttttgttgttaaggttggttttgaattttttggtttaagtaattttttttgtttggttttttaaagtgttgggattataggtgtgagttattataaatgaagttatttttttttatttgtatagtttagggttttgtatcgaggaaatataatgttggttgaattaggaaataaatttaggtggagttattttttgaatgttatatagtagggttggtattagattttagggttgtttgagtttgtttttttttttttttgttgttttagggtttatttgggatgagaatgtaaaatttaagagaaggttaaagagtttagttataagataattgatatttaaaatataaaaagtaggtcgggcgtggtggtttacgtttgtaattttagtattttgggaggtcgaggcgggcggattacgaggttaggagatcgagattattttggttaatacggtgaaatttcgtttttattaaatatataaaaaattagtcgggcgtggtggcgagtatttgtagttttagttattcgggaggttgaggtaggagaatggcgtgaatttgggaggcggagtttgtagtgagtcgagattgcgttattgtattttagttttagcgatagagtgagatttcgttttaaaaaataataataataaatttattttaaatataagatttgattttgagtttgtataacgtattttattttaatttttgtgttggcggattttgtttttatttaaaattgtgatgttttgtttattatagatttatttttttttattaatttggatatttaataaatattgaattagaagattatttattttgatgattgagtttttgtttttaagatgtttattttagttcgggttttgtttttgttttttttcgttttgtagtatttagatagttttttgaggaaattgaggtatagaggagcgtatgtgtgggaggtgtgtgtgtgtggcgggggttgtggtgagtttttttgggcggattaagttttttgggttgggtcggggttgatttttgtttatttatcgcggttgaagtcgcgaatgaagtttttcgttttgtagagattttttttaaggcggtcgtatcgtttgcggggtagagatagtcgcggttatttcggtagcggtgatttttttcggttggaggggatcgggaggcgggagaaggcgcggcggtcgcgttgtttggtcggtttgggcggaggaggatgttattttagcgggtgggagttgggatcgaatttcgtcgcggtttttcgtttttatttaatttcgacggggttatgggtagtggggaagggggacgcgcgtttagtgacgttatcgaatttcgagttcggttttcgtcgttgtcgttatagaggggttgcgttgcgttattgtattttttttttgacgttagcgtaagaagttagaaattggtttatcgagcgagagagaagtttggagcggagtttttttttttcgtttttttaatttggtaagatatgtaaagtgtacgtaagagcggattataatttttaatcggttttgcgtgtcgagtatgcgtacggtttttagttagagagcgcggtaaatttttggtagattgacgtttttttagtcgaattaggaggtcggttttatatcggtaaattaatttcgtttttacgagttttatttttttatttttaattagttgtttttttgtcggagtgacgggttcggttgtttttgagggtttagttttttttgatggatatttatattgataaattagatcgtcgggaagtttagagggtgttgaaaagcgtgtatcggaattaatagtttagttgtaaggtttggcgtcgtttaattattttttcggtcgtcgttaattatttcgggtttcgttttcgcgcgtgacgtaattagggtgggtagtaatagttgtttcggtgagggaaacggaggcgttatagttacggtagtcgtggcgattaagtaattcggtaacgcgagttaataataataatcgttcggtcgatttttatttttattttttaggttcggttcggggattttagtacgtttcgttttttttttaatatcgatttcgagattttcgaaaagcgttttcgtagagtagaagtggggagaagcggaggtaattaggggcggtttcggggtggttggtcgggtcggggtgggcggcggggtcggggtagtagtgtttttgtaattatagttcggggggaaggggcgggcggttaaaatggcggcggtattgtttggcgtttagtttatttgtaaaatgggtatgatgatgttttttttatacgattgttaggaggaggtgattttagtggaggggtttgggggtttttggttaattaatagtagttgttttttatttttttttttttttgagggttattttgcggttggagggttatttgggtatatcgtggtatatgggtgttgagtgttagtgtagaagaggttttggtttagttgttagttaggaggtagtattgttcggagttatggttagttgtaggtagggtttttagatttaaatgttttttggggttaggtaggagttataaaagtacggatttggagtttttttttttaattattcgtgtttttgttttattgttttttaaatgttttggatttggggatagggtttatgagtataagggtttttaaattatttgtcgattttttgttatagtggggttgagtcggagggaggttatgtttagtttagtatttgggagaggaatatattttttaatagttaggtttgttttgttttttttttttgttttgttttgttttgagatagggtgttgttgtgttattgaggttggagtgtagtggaataatttcggtttatagttttttgtaatttttgttttttgggtttaagtaatttttttattttagttttttgagtagttgggattataggtgcgcgttattattttcgtttaatttttttttttttttttttttttttttggagatagagtgttattttgttgtttaagttggaatgtagtgataagatttcggtttattgtaattttcgttttttaggtttaagtgatttttttgttttatttttttaagtagttgggattataggtatgtgttattatgtttagttgatttttgtatttttagtagagattgggtttcgttatgttgattaggttggttttgagtgtttgattttaggtgatttagttattttggttttttaaagtgttgggattataggcgtgagttattgcgtttggttaaggtcggcgtttgttttgaagttagtcgtagttgttaggtttttagtgtagtttgggtttgtttttagttttggttatttttggttatagaagggtattgttttattgatgagtttatatttggtgttaagatttataattgtttttagatagagggtttaaaaagtttttgtggttttatgtagtttataggggttttttggatttaaaatatttttttattgggaatgttatttagtcgagaattttaagtttagatggtaggtacgtagggaattggtacgggtttttgggaggtagttttttttatgattttgtttttcggtaataaattgacgagttaggagtatagaatatttagagtttaaatgtagttttgttattattttttcgttgtgtggtttggggtaagtattttaatttttttgagttttagttttttatttagtagatagaatttaaatttagatatggttgttggaaagtttaaaatgaaataggtcgggcgtggtggtttatatttagaattttagtattttttgggaggttaaggtaggaggattgtttgagtttaggagtttaagattagattgggtatgataatgagatttttatttttgaaaaaaatgattatatatatatatatatatatatatatatatatatatatatatatgtatgtatattttaatatatatatataatatatatatatgtgtatatatatgtatatagtgtatatgtgtgtgtatatatatattatatatgtatatatatgtatatgtagattttaatatataagtaaaaaaatatatatatatatatatatatatatatatatatatatatatatatatttagatagagttttgggttttttaggttggagtatagtggtgtaattttggtttattgttattttcgttttttaggtttaagtgatttttttgttttagttttttgagtagttgggattataggtatgtattattacgtttagtaaattttgtatttttagtagagacggggttttattatgttggttaggttggtttcgaatttttgattttaagtgattcgtttatttcggttttttaaagtgttggaattgtaggtatgagttattgtgttcggtttaatagatattttaaaaagatgaattaatatagggaaagtgtttagttttgtgtttggtttataagagtttttaggaagtgtttatttggggtttttagttaaggagatggaggtaagggagggggtagtttttggtagttgagagtgatttagtgagaatcgtattatttttttttgggtgagggtatagagtaattatataggtttaagttttttcgtagtgtggggaaatgcgattttatgtggatgtgggggtttttgggtattagggattgggaaggtaggagttttggtttggggtgagtgggggtgcggagtggggttttagttttggtttatagttggtttttttgtagtgacgggttggatatttttggttattagtttggggatttaattaagttagtgatgaatttaagtatatttttagggaatttagagttgtttttgttttttttgtttgtggattaatttttgttttttttttttttgttttgttttgttttttttttttttattttcgtttttttttttaagg

SEQ ID NO: 1582 - DNA, 7864 bp, Artificial Sequence
  chemically treated genomic DNA (Homo sapiens)
ttttgggaagaaagacggggatgggggagagaaaaataaaataaaataaaagaaggaaaaataggaattaatttataggtagagaaagtagggatagttttgggttttttggagatgtgtttgggtttattattaatttaattaaatttttaggttggtggttagaaatatttaattcgttattgtagggggattagttgtagattagggttggagttttatttcgtatttttatttattttaagttaggatttttgtttttttagtttttggtatttagagatttttatatttatataggatcgtatttttttatattgcgggggaatttgggtttgtgtggttgttttgtgtttttatttagagaaaaatggtacggtttttattgggttatttttaattattaggggttgtttttttttttgtttttatttttttagttgaggattttaagtgggtattttttgagggtttttgtaggttaggtatagggttgggtattttttttatgttagtttatttttttaaaatgtttattaggtcgggtatagtggtttatgtttgtaattttagtattttgggaggtcgaggtgagcggattatttgaggttaggagttcgagattagtttggttaatatggtgaaatttcgtttttattaaaaatataaaatttgttgggcgtggtggtgtatgtttgtagttttagttatttaggaggttgaggtaggagaattatttgaatttgggaggcggaggtggtagtaagttaagattgtattattgtattttagtttgggagatttaagattttgtttaaatatatatgtgtgtgtgtgtgtgtgtgtgtgtgtgtgtgtgtgtgtatttttttatttatatattgaaatttatatgtatatatatatatatatatagtatatatatatatatatatatatattgtatatatatatgtatatatgtatatatattgtatatgtatattgaaatatatatatatatatatatatatatatatatatatatatatatatatatatataattattttttttagagatgggagttttattattatgtttagtttggttttgaatttttgggtttaagtaatttttttgttttagttttttaaaaagtgttgggattttaggtgtgagttattacgttcggtttattttattttaaattttttaataattatgtttgggtttgggttttgtttgttagatagggagttgaggtttagagaggttaaggtgtttgttttaggttatatagcggggaagtggtggtagggttgtatttgaattttgggtgttttatgtttttgattcgttagtttattgtcggaaagtagagttatggggaaagttgttttttagggattcgtgttagttttttacgtgtttgttatttggatttgggattttcggttgagtagtatttttagtgggaaggtgttttgagtttaaaaagtttttgtgagttgtatggggttataggggttttttgggttttttgtttgggagtagttatgggttttgatattagatgtaagtttattagtgggatagtgtttttttgtggttaggggtgattagggttgggagtaggtttaggttgtattgagaatttggtagttgcggttgattttagaataggcgtcggttttggttaagcgtagtggtttacgtttgtaattttaatattttgggagattagggtggttggattatttgaagttaggtatttaagattagtttggttaatatggcgaaatttagtttttattaaaagtataaaaattagttgggtatggtggtatatgtttgtaattttagttatttaggaggatgaggtaggagaattatttgaatttgggaggcggaggttgtaatgagtcgagattttgttattgtattttagtttgggtaataaagtgatattttgtttttaaaaaaaaaaaaaaaaaaaaaaaaaaattaaacgggagtggtggcgcgtatttgtaattttagttatttaggaggttgaggtgggagaattgtttgaatttaggaggtagaggttgtagagagttgtgagtcgagattgttttattgtattttagttttagtgatatagtaatattttgttttagagtaaaataaaataaaaggaaagaatagggtaggtttggttgttaaagggtgtgttttttttttaggtgttgggttgggtatggttttttttcggtttagttttattgtagtaggggatcggtagatggtttggggatttttgtatttataagttttatttttaggtttaaagtatttgagggatagtgggatagaggtacgagtggttaagaggaaaggttttagattcgtgtttttgtggtttttgtttggttttagaaggtatttgggtttgagagttttgtttgtagttggttatgatttcgggtagtattgttttttggttagtaattggattagagttttttttgtattaatatttagtatttatgtgttacgatgtgtttagatggttttttagtcgtagggtgatttttaaaggaaggaggaggtaaaaaataattgttgttggttgattaggagtttttagatttttttattgaggttatttttttttggtagtcgtatgagggaggtattattatgtttattttatagatgagttgagcgttagatagtgtcgtcgttattttgatcgttcgtttttttttttcggattgtgattatagagatattattgtttcggtttcgtcgtttatttcggttcggttagttatttcggggtcgtttttggttattttcgtttttttttatttttgttttgcggaaacgtttttcggaggtttcggagtcgatgttgggaaggggacgggacgtgttggggttttcgggtcgggtttggggggtgggggtgggggtcggtcgggcggttgttgttgttgattcgcgttgtcgggttgtttggtcgttacgattatcgtggttatggcgttttcgttttttttatcggggtaattgttgttatttattttagttacgttacgcgcgggggcggggttcggggtgattggcggcggtcggagaagtgattggacggcgttaggttttgtagttaaattattagtttcgatgtacgttttttaatattttttggatttttcggcgatttgatttattagtatgaatgtttattaaaagaaattgaatttttaaaggtagtcgggttcgttatttcggtagggaagtagttggttaagaataaaggggtaggattcgtgaggacgggattggtttgtcgatgtaaaatcggttttttggttcgattaaagggacgttaatttattaaaggtttgtcgcgttttttggttggaggtcgtgcgtatgttcggtacgtaaggtcgattgggagttgtagttcgtttttgcgtatattttatatgttttattaaattaaaaaggcgagaaaggaagatttcgttttagatttttttttcgttcggtgggttagtttttggttttttgcgttgacgttaggggaggaatgtagtgacgtagcgtagtttttttgtgacgatagcggcgaaggtcggattcgggattcgatgacgttattgggcgcgcgttttttttttttattgtttatggtttcgtcggggttgggtggaagcgggaggtcgcggcggggttcgattttagtttttattcgttggggtgatattttttttcgtttaagtcggttagatagcgcggtcgtcgcgttttttttcgtttttcggttttttttagtcggaaaaggttatcgttgtcggggtgatcgcggttatttttgtttcgtaggcggtgcggtcgttttgggaaaggtttttgtaaggcgggggattttattcgcggttttaatcgcggtagataagtaaaggttagtttcgatttagtttagggagtttggttcgtttaggagagtttattataattttcgttatatatatatattttttatatatacgtttttttgtgttttagtttttttaagggattgtttgggtgttgtaggacgagaagagatagaaatagggttcggattagggtgaatattttgggagtaaaaatttagttattaagataaataattttttaatttaatatttgttaaatatttaaattaatgggaaaaaataaatttatgatgaataaaatattataattttaaataaagataggattcgttaatatagggattaaggtgagatgcgttatgtaagtttagggttagattttgtgtttaaaataaatttattattattattttttgagacggagttttattttgtcgttgaggttggagtgtagtggcgtaatttcggtttattgtaagtttcgttttttaggtttacgttatttttttgttttagtttttcgagtagttgggattataggtgttcgttattacgttcggttaattttttgtatatttagtagagacggggttttatcgtgttagttaggatggtttcgattttttgatttcgtgattcgttcgtttcggttttttaaagtgttggggttataggcgtgagttattacgttcggtttattttttatgttttaaatgttaattattttatgattgagttttttggtttttttttaaattttgtatttttattttaggtaggttttagaatagtaaggggaaaagaaaataggtttagatagttttgaagtttaatgttagttttgttgtgtggtatttagaaagtgattttatttaagtttgttttttaatttaattaatattatattttttcggtgtaaggttttgggttatataagtgaagaaaggtgattttatttatggtggtttatatttgtaattttagtattttgggaggttaagtaaggaagattgtttgagttaaggagtttaagattagttttggtaataaagtaagatattcgtttttataaaaattagttgggtatggtagtgtatgtttgtaattttagttatttcggaggttgaggtaggaggattgtttgaattcgggagggggaggttgtagtgaattaagattttgttattgtattttagtttgggcgatagagcgagattttgttttaaaaaaaaaaaagtaattagttaggcgtggtggtatgtgtttgtggttttagttattttggaggttgaggttggtaggattggtttagtttcggaggtagaggttgtagtaagtaatgattgtgtggtttagtttgagttttagaaaaaaaagaaaaaaaggaaaaaaaagaaagtaaataattttttttgtattttaggatgggatatataataaatagataaattgtaagataggttttttagagttttgagagtaatataagagagtggggtaggagaatgagaggatgttgtagttagtgttatttgaggggggatgttttatagaatgagtttgagtggtgagagacgaagtaagttttataaatttaggtggaggggtcggttatgatggtttatgtttgtaattttagtattttgggaggttaagtttaggagttttagaatagtttggttaatacggcgaaattttgtttttattaaaaatattaaaataggtcggtgtggtggtacgtgtttgtagttttagttattggggaggttgaggtgggagaattatttgaatttgggaggtagaggttgtagtgagttaagatcgcgttattgtattttagtttgggtaatatagtgagatttcgttttaaaaaaaaaaaaaaaaaacggggggagagaattgtttttaaagttgggaataggaatttttgttaaagttaggagagataaggttgtagaggtaataatagttatataatttttagcgaatttagtaaagtgggacgtttttcgtttttgataggtgggtaatggatgtttagagagaggaagtaggtgttttttttgttagaggcgtgtgaattagagtaattttattttgaataggaattgggtaaaatgaggttgagatttgttaggttttatttttaaatggttaaggtatttttagttataggataagataggaggttagcgtaaaatatagtttataaagattttgttggttgggtgtagtggtttatgtttataattcgaatagtttgggaggcggaagtgggcggattatttgaggttaggagttcgagattagtatggaaaatatggtaaaattcgatttttaataaaaatacgaaaattagatgggcgtggtggtgggtatttgtaattttaattatttggaggttgaggtaggagaatcgttcgaattcgagaggtagaggttgtagtgagtcgagattattttattgtattttagtttgggtgatagagtgagattttattttaaataaataaataaataaataaataaataaataaataaataaataaaaataaagatttcgtcgggcgtggtggtttacgtttgtaatttcgttattttgggaggttaaggtgggtagattacgaggttaggattttgagattagtttggttaatatggtgaaattttatttgtattaaaaatgtaaaaattagtcgggtgtggtggcgtgcgtttgtaattttagttattagggaggttgaggtagaattatttgaattcgggaggtggagagtgtagtgtgttaggatcgcgttattgtattttagtttgggtgatattgtgagattttgttttaaaaaagataaaaattttaaaaataatttagaaaaatatataaataaagattttgttgataaaataggttgtagtaaagaagttggtttaaatttattaaaattaagatggttatgagagtaacgtttggtttttattgttatatttttattagtattattatagtttataaatgttatggtaacgttaggaagttattttatatggattaaaaataagaggtatggaataatttattttttgtttagtatattattaagaaataaggttgagtgtggtggtttatgtttgtaattttagtattttgggaggtcgaagttggtagatcgtttgaggtcgggagtttaagaatagtttggttagtatggcgaaatttcgtttttatttaaaatataaaaattagtcgggcgtgtggcgtatgtttgtgatgtttagttatttaggaggttgaggtaagagaattgtttgatttcgggtggtagaggttgtagtgagttaagattatattattgtattttagtttgggtaatatggagattttattttaaaaaaaataaaaaaaaatatagttttcgaggttgttttatggagtaattatttttttattttttataaatttgtttttattttacggatttatttggaatttttttttttttttttttttttgagacggagtttttttttgttatttaggttggagtttagtggtacgattttgattgattgtaattttcgttttttaggtttaagcgatttttttgttttagtttttcgagtagttgggattataggcgagcgttattacgtttggttaatttttgtatttttagtagagatggggttatattatattggttaagttggtttttaatttttgatttcgtgatttgttcgtttcggttttttaaagtgttgggattataggcgtgagttatcgtattaggttttgaatttttttttgcgtgatatttaggaattttgttttggattttggatcggattttttttttttgtaatatttttattttaagattacgaagttggaggaattagagtttatttttttttatgggattttttagtgtttttgggtgtgattttggatg

SEQ ID NO: 1583 - DNA, 6151 bp, Artificial Sequence
  chemically treated genomic DNA (Homo sapiens)
gttgggattataggtgtttgttattatatttagtttatttttgggtttttaatagagatcgggttttattatgttggttaggttgattttaagtaatttatttttttaggttttttaaagtgttgggattataggtatgagttattgggtttggttttaattgagtttttaaaattatagtttaggttatgtatggtggtttatttttgtagttttagtattttgggatgttaaggaaggaggattatttgatattaggagattaagattttgtttttataaaaaaaaaaaaaatttttgtatttagttagttttggtggtatatgtttatagttttagttatttgggtggttgaggtgggagaattttttgaatttaagagtttgagggtgtagtgagttgtgatcgtgttattttattttattttgggcgatagagtaagagttttttttttttttgagacggagttttattttgtcgtttaggttggagtgtagtggtatcgatttcggtttattgtaagtttcgtttttcgggtttacgttatttttttgttttagtttttcgagtatttgggattataggcgtttattattatattcggttaattttttgtatttttagtagagacggggttttatcgtgttagttaggatggtttcgattttttgatttcgtgattcgtttatttcggttttttaaagtgttgggatgataggcgtgagttatcgcgttcggtaagagttttttaaaaaaataattaattgataaaataaaataaaattatagatcgggtgatattttatttattttttattttatttgttttcgtatatatttttgtttaaaattttttatgggggtcgggtaaggtggtttacgtttgtaattttagtattttgggaggttaagggggtcggattatttgaagttaagagtttgagattagtttgattaatatggtgaaattttatgtttattaaaaatataaaaattagttgggtatggtggcgtgtatttgtaattttagttattcgggaggttgaggtaagagaatcgtttgaatttaggaggcgaaggttgtagtgaggtgagatcgtgttattgtattttagtttgggtgataggcgattttattataaaaaaaaaaataaattaaaaaagaaaatgttttggaattagatataggtggtggttgtataatatagtgaatgtattaaatgttattgaattgtttttttttaaaatggtttattttatggtatgtaaatgttattttaatttataaaaatgtgtcgtataaaagtaggattttaagaatttgttatttgttggtttgttttttgttattttgtgtttgttttttgagataattggggttatagttttcgtttttggttagggttgggagcgggaagaggtttagtttagttaaacgggttgattagtagttttaggataggcggttattttatttttcgaggttataatttgagatcgtattattgtattttagcgtgggtttgggcgatatagtaagattttagtttaaaaataaataataataataataataaaagatattttttattggttttttagtttgatcgtgattttttttttacggtttttaataaaatgatggttattatattattttttgatttatttattttatttatttattgtttttttttttttattggttttagttgtgtttaaggatttgttttttgttttttttatattagtttttattttagggatttcgaattttaaattatttttttttgtttttcgttattttaacgttgttttaaatgttagttttttagagagatttagggtgattaatttttttcgttttggggatttttcggttttagtattgaaatttttatattttgggaaattttttagttttgggttaagtaggattgttggatattttagggagattatttttggttgttttatttaaggtaagttttatttatttattttttttattaagttattattgtattattttttttatggttatgggaattttatttattttatttatatttgtgtttttagtatttagtaaatagtaggcgttatttatttatttatttatttatttatttatttatttatttatttattattatatattatatatatatatatatatatgtgtgtgtatatatgtgtgtgtatatatataaatgtatatatatatatattagagataggtttttgttttgtttattaagttggagtttagaggtatagttatagtttattatagtttagaatttttgggtttaagcgatttttttattttagttttttgagtagttgggattataggtgtgtattattgcgtttggttaatttattttatttttatagagataaggttttattatgttgtttaggttggttttgaatttttggttttagacgatttttttgttgagttattgtatttggattttaataaatatttttgattaaattaataattgaatgaaagggattgattattgtagattatttgagtttaagaatttgttatatggttaggcgtagtggtttttgtttgtaattttaggattttgggaggttgaggcgggtggattatttgagattaggagtttgagattagtttggttaatacggtgaaatttcgtttttattaaaaatataaaaattagttaggcgtggtggcgcgtgtttgtaacgttagttattcgggagattgaaataggagaattatttgaattcgggaggcggaggttgtagtgagtcgagattatgttattgtattttagtttgggcgatagagattttgttttaagaaaaaaaaaaaaattagaagatgatgaaattaatttagtaaattatcgttaatattttaattaaaatgaaatagaataggaaatattagagtgcgttaaagtattattttacggtattttagttatagtattatttgttttagttatagatatgtttgtgtggattgagtttttaggtaaaatgtattttttgttgtatgttgtggttaaaaatgtttgaaaattatttatttagtgattaagagtatggattttggtattagattattagggtttcgattttttataagttgtttgatattgggtaaatttatttattttttttgggttttagttttttgatttgaaaaatggggaaaggtcgggtatggtggtttatgtttgtaattttagtattttgagagtttaaggcgggcggattatttgaggttaggagttttaggttagtttggttaatatggtgaaatttcgtttttattaaaaatataaaaattagttgagcgtggtggcgggcgtttgtagttttagttatttgagaggttgaggtaggagaattatttgaattcgggagatagaggttgtagtgagcgagttagatcgtattattgtattttagtttgggtgatagagagagattttgttttaaaaaaaaaaaaagaaaaaataaaataaataaaaacggggataatgtttagtatttttttaaagatgcgattgtaagatttaatgagtttgtatatttaaaaaatgtttagattatttttaggtatatagtaatttaattagtgtttattaatatgattttttgttgaatgaatgagtggggttgaagtttaattttttgtttttttttagtataagttgtttttttttatttttttagttttttgtttcgaataattatatgtttatttttttattttgtttgttgttaatgtttttttattagaataaaagttttatgaggatttgtttgtttttgttttattcgtagttgaatttattagtttgagaggagggttggtgagtttggtaaatattttttgtaaaggatcgtatagtaaatattttaggtttcgcgtgggatatgtcgtttttgcgtaattattttatttcgtttttgtagtgttaaagtagttttttaagttgtttaaggaaatgggcgtggttatgttttaataaagttttatttataaatttaagtaggtagaatttgattcgtaggtcgtagtttgttaatttttaaattagtttaaaatattgggtttaatataataaaagagagttttttattaggtttatattttataaaagttttttttgatagttttttttttttttttttttttttttttttttttttgagacggagtttcgttttgtcgtttaggttggagtgtagtggtgcgatttcggtttattgtaagtttcgttttttaggttcgtattatttttttgttttagttttttaagtagttgggattataggcgtttgttattacgttcggttaattttttgtatttttagtagagacggggttttatcgtgttagttaggatggtttcgattttttgatttcgtgatttattcgttttagttttttaaagtgttgggattataggcgtgagttatcgcgttcggtcgatagttttttttaattatgtaaaaaatatatatatatttaaatttttagttgggggttcgtgaaaaataggcggcgagcgagagtttgttgatttttgattagattgtttttatatgttttatattttttttgtggggtaaacggagttttttgggttttttaaaattggatttttttaaaacgcgttattaatttacggcgtcgcgcgcgcgatcggttcgttaattttttgagtcgcgcgcgtttttcgttaagattcgttttttttcgcggttattggtcgagtttcgtatttttttttaagggggaacgtttttttttttcgatagattttgtagatagttaatggaacgtcgtagggtttcgcgtttcgtttttttgggggttcgttggaggcgagcgtgggcgggtcgttaggaaggtggggcgcggagtttggtaatcgttgtcggtaataacgtttcgtttcgtcgggcgggcgggttgcgcgaggttggttggcggcgggagtcggaggaggagcggtcgtcgtcgttatcgtcgtcgttatagagattgtagtcgtggagattgttatttattaacggggattaatacgtagtagtcgttgtcgtcgtcgcgggagtcgttgttcgaattttcggttcgaattttaggtgatcgatgcgatcgtttcgggtttagttcggtcggggagtgtggggggcggcggggatttcgttcgggggtcggggggcgggtagtacgttttcgtcgtttattttaaacgttcgggtggtgcgttcgcgggattcgttttcgttatttcgttcgcgcgcgcggcggagtttggggggattttggcgacgtttttattttttttattgattgaacgcgggggaggtgcggtgtcgtcgttttattttttataaaattttttgaggttggggcgttcggggattttttttttacgtttatttttaaattcgttgagttgggggcgtttcgggaacgttttttaaattttttaaattttttgaattgggggcgtttggggattttttttttattttaattttttagatttttgagttgggggtatttaaggattttttttttatttatattttcgaattttttgaattgggggcgttaggggattttttttttacgtttattttttagatttttgagttgggggtatttagggattttttttttatttaaattttcgaattttttgaattgggggcgtttggggattttttttttatttttattttttagatttttgagatggggatattcggggattttttttttatttatatttttaaattttttgaattggggttatttggggttttttttttattttattttttaaattttcgaaattggggtgattttagagtttttttgttatttttagtcgtaaattttttgtatcggggggatttcgaagattttttttttatttttattttaaatttttagatttgatttgtttcggggattttttttttaatggatttttagatatattgaatttgggggtatttttggaattttttttttattttttaattaaaagttggtgcgtttgttttggggagaattttttttgttttttttatttttttattttaaatttttcgagcgagttttttcgggaat

SEQ ID NO: 1584 - DNA, 6151 bp, Artificial Sequence
  chemically treated genomic DNA (Homo sapiens)
gttttcggggaagttcgttcggggagtttgggatgaaaaggtgagaagggtaagaggggttttttttagggtagacgtattagtttttagttaaggaatgagaaaaaggttttaggggtgtttttaaatttagtatgtttgggagtttattaaaaagggggttttcgggataagttagatttaggaatttggggtaaaaatgagaagggagttttcgaggttttttcgatgtaagaagtttgcgattaagagtgatagaagggttttggggttattttaatttcggaggtttggggagtaaagtaagaagagggttttaggtggttttaatttagggagtttgagggtatgagtaaaagaggggttttcgggtgtttttattttagagatttggggagtaaaagtgaggagagggtttttaagcgtttttaatttagagaattcgagggtttgagtaaaagaagggtttttgggtgtttttaatttagagatttggggagtaaacgtgagaagagggttttttggcgtttttaatttagaaaattcgagggtatgagtaaaagaggggtttttgggtgtttttaatttagagatttagggggttaaggtgagaagagggtttttaagcgtttttaatttagggagtttgaggagtttgagagacgttttcggggcgtttttaatttagcgagtttgaaggtaagcgtgagaaaggggttttcggacgttttaattttaggaagttttgtaaaaagtgaggcgacggtatcgtatttttttcgcgtttagttaataaggaaagtggggacgtcgttagggtttttttaaatttcgtcgcgcgcgcggacggggtggcggaggcgggtttcgcgggcgtattattcggacgtttggggtgagcggcggggacgtgttgttcgtttttcggttttcgaacggggttttcgtcgttttttatatttttcggtcgggttgggttcggggcggtcgtatcggttatttggagttcgggtcgggagttcgggtagcggttttcgcggcggcggtagcggttgttgcgtgttggttttcgttggtaagtaatagtttttacggttatagtttttatggcggcggcggtggcggcggcggtcgtttttttttcggttttcgtcgttagttagtttcgcgtagttcgttcgttcgacggggcggggcgttgttatcggtaacggttattaggtttcgcgttttatttttttaacggttcgtttacgttcgtttttaacgggtttttaagagggcggggcgcgagattttacggcgttttattggttgtttgtagagtttgtcggaaggaggaggcgtttttttttgaaaaagagtgcgagattcggttaatggtcgcgaagaggggcgggttttggcgggaggcgcgcgcggtttagagggttggcgaatcggtcgcgcgcgcggcgtcgtgggttggtggcgcgttttgggaaagtttagttttaggggatttaagggatttcgtttattttataggaggagtgtgggatatgtgggaatagtttgattaggggttagtaaattttcgttcgtcgtttgttttttacggatttttagttgaaaatttaaatatatatatattttttatatggttaaaagaaattatcggtcgggcgcggtggtttacgtttgtaattttagtattttgggaggttaaggcgggtggattacggagttaggagatcgagattattttgattaatacggtgaaatttcgtttttattaaaaatataaaaaattagtcgggcgtggtggtaggcgtttgtagttttagttatttgggaggttgaggtaggagaatggtgcgaatttgggaggcggagtttgtagtgagtcgagatcgtattattgtattttagtttgggcgatagagcgagatttcgttttaaaaaaaaaaaaaagaaagaaagaaaaaaaaagaaattattaaaaggagtttttgtggggtgtgaatttgataggagatttttttttattgtattgggtttagtattttgaattagtttaaagattggtaaattgcggtttgcgggttaaattttgtttgtttgggtttgtaaataaagttttattggaatatagttacgtttatttttttgaatagtttggaaggttgttttgatattataggggcggagtggagtagttgcgtaaagacggtatgttttacgcgaagtttaagatatttattatacggttttttatagaaaatgtttgttaaatttattagttttttttttaagttggtagatttagttacgagtaggatagaaatagatagatttttatagaatttttattttagtgagggaatattgatagtaaatagaataaagaggtaaatatatagttattcgagataaggggttggaagaataggagaaaataatttgtattgagaaaaggtaggagattaggttttagttttatttatttatttaataagaaattatattagtgagtattgattaaattgttatgtgtttgaaagtgatttaagtattttttaaatatgtaaatttattaaattttataatcgtatttttagaaagatgttaggtattattttcgtttttatttgttttgttttttttttttttttttttgagatagagtttttttttgttatttagattggagtgtagtggtgcgatttggttcgtttattgtaatttttgtttttcgggtttaagtgatttttttgttttagttttttaagtagttgggattataggcgttcgttattacgtttagttaatttttgtatttttagtagagacggggttttattatgttggttaggttggtttggaatttttgattttaagtgattcgttcgttttggatttttaaagtgttaggattataggtatgagttattatgttcggtttttttttattttttagattaggaagttgaggtttagaaagaatgagtgaatttgtttagtgttaaatagtttgtgagggatcggaattttagtagtttagtgttaaagtttatgtttttgattattagatgggtggtttttaaatatttttgattatagtatatagtaggaaatatattttatttaggggtttagtttatataaatatatttataattaaaataaatgatattgtaattaaagtatcgtgaaatgatattttaacgtattttgatattttttgttttgttttattttaattaaaatgttgacggtgatttgttaaattgattttattattttttaattttttttttttttttgagatagagtttttgtcgtttaggttggagtgtagtggtatgatttcggtttattgtaattttcgtttttcgagtttaagtgatttttttgttttagtttttcgagtagttggcgttataggtacgcgttattacgtttggttaatttttgtatttttagtagagacggggttttatcgtgttggttaggttggttttaaatttttgattttaagtgatttattcgttttagttttttaaagttttgggattataggtaggagttattgcgtttggttatgtgatagatttttaagtttaagtggtttatagtaattagttttttttatttaattattaatttagttaaaaatatttattgaggtttaagtgtagtgatttagtaggaggatcgtttgaggttaggggtttaagattagtttgggtaatatagtgagattttatttttataaaaataaaataaattagttaggcgtagtggtgtatatttatagttttagttgtttaggaggttgaggtgggaggatcgtttgagtttaggagttttaggttgtggtgagttatgattgtgtttttgaattttagtttggtagatagagtaagaatttgtttttaatatatatatatatatatttatatatatatatatatatatatatatatatatatatgtgtgtatatatatagtatatgatgatagatagataggtagatagatagatagatagatagatagatagatagcgtttattatttgttaggtgttagggatataggtgtaaataaaatagataaaatttttatggttataggaaaagtgatatagtagtggtttggtgggagaagtgggtgggtggggtttattttagatagagtagttagagatgatttttttgggatatttaataattttgtttggtttaagattaaggggttttttaggatatgggaattttagtgttaaaatcgggaaatttttaaagcgggaagagttggttattttgggtttttttaaggagttgatatttgaggtaacgttggagtaacgaggaataaaggaaaatagtttggaattcgaaatttttggggtgaaagttgatgtggaagaaatagaaagtaggtttttgggtatagttggagttaatgaaaggggaagagtagtgagtgggtggggtgagtgagttaggggatgatatgatggttattattttattggaggtcgtagggaagaagttacgattagattgggaaattaatggagggtgttttttgttgttgttgttgttgtttgtttttgagttggagttttgttgtatcgtttaggtttacgttggagtgtagtggtgcgattttaagttgtagtttcggggagtaaggtgatcgtttgttttggaattgttggttaattcgtttagttaagttagattttttttcgtttttagttttggttagaggcggaaattgtggttttagttattttaaaagataagtatagagtagtaaaagataagttaataggtggtaaatttttagagttttgtttttgtgcggtatatttttgtaaattaaggtgatatttatatattataaaatgagttattttaaaaggaaatagtttagtggtatttagtatatttattatgttgtataattattatttatatttaattttaaagtatttttttttttaatttgtttttttttttatgatggagtcgtttgttatttaggttggagtgtagtggtacgattttattttattataattttcgttttttggatttaagcgatttttttgttttagtttttcgagtagttgggattataggtgtacgttattatgtttagttaatttttgtatttttagtagatatggggttttattatgttggttaggttggttttaaatttttgattttaagtgattcggtttttttggttttttaaagtgttgggattataggcgtaagttattttgttcggtttttatggagggttttaagtaggggtgtgtgcggggataggtggggtggggagtgggtggaatgttattcgatttgtgattttattttattttgttaattaattatttttttaagagatttttgtcgggcgcggtggtttacgtttgttattttagtattttgggaggtcgaggtgggcggattacgaggttaggggatcgagattattttggttaatacggtgaaatttcgtttttattaaaaatataaaaaattagtcgggtgtggtggtgggcgtttgtagttttagatattcgggaggttgaggtaggagaatggcgtgaattcgggaggcggagtttgtagtgagtcgagatcggtgttattgtattttagtttgggcgataaagtgagatttcgttttaaaaaaaaaaaagatttttattttatcgtttagggtggagtgaagtgatacgattatagtttattgtatttttagatttttgggtttaagggatttttttattttagttatttaagtagttaggattataggtatgtgttattaaggttggttaaatataagaattttttttttttttgtagagatagggttttgattttttgatgttaagtgattttttttttttggtattttagagtattggggttatagggatgagttattatgtatagtttaaattataattttaaaagtttagttgaggttaggtttagtggtttatgtttgtaattttagtattttgggaggtttagaggggtggattatttgaggttagtttggttaatatggtgaaattcggtttttattaaaaatttaaaaatgagttgggtatgatggtaggtatttgtagttttagt

SEQ ID NO: 1585 - DNA, 6125 bp, Artificial Sequence
  chemically treated genomic DNA (Homo sapiens)
tgtttatgaaggaaaatggagatataaaagagagattaagtttttattaattggtatgattttatattttaagagttaagtagattagatttatgagtagtaatttgggaataaatagaatatatattaggatttggttgatatttgatgggatatttggttgtgtaggattaggttttatgtaatagtttggatgtggtttataggtatagttggaggtttgatggaaagtttttcgtgattttttagttttatgttttataattattgttttttatttattttattttttttattttattttataagattttttttattaagtagttgataatttttttttttttttttgttttattttaaaaatttattagtttgttttttttatttgtttttgtgtagcgtttgtatggttttcggtaagtgatgtaatatttttgggttttagttaatttatttttaaaataaggaaaattatagttttaatttagtgatatatttattgataaaattattagttttaatttagtgatatatttttagtagtaaaatggtttaaatttgggtattatttttttgtgtaaaattaatataaatgttattaatattgttttaaatttaaaaagtaatttttttttttttttttttgagacggagttttgttttgttatttaggttggagtgtagtggaatgattttggtttatcgtaatttttgttttttaggtttaagtgatttttttgttgtagttttttgagtagttgggattataggtatgtattattatgtttggttaatttttgtattttagtagaggcggggttttattatgttgtttaggttggttttaaatttttgatttcgagatttgttttatttggttttttaaagtgttgggattataagcgtgagttattgttttcggtttttttaaaaagtaattttttattttaatttttatatgtagaaatagatttttgattatttttaaaagagttataaatttaaatgtttatagaggttatttaattgaaaagagtataattatttaaataatttgtttatagaatatataatatgtgtttatttttttaaaatttttagatgttttaagaaattttggaaatttgttttttttttgttttttgttttgagacggagttttggttttgtcgtttaggttggagtgtaatgatgagattttagtttattgtaatttttgttttttaagtttaagggatttttttgttttagtttttatagtagttgggattataggtgtttattattatgattagttgatttttttttttttttttttttaagtagagatagggttttatcgtattgtttagggtggttttgaatttttgattttaggtgatttatttattttggttttttaaagtgttgggattataggtatgaattattgtgttcggtttggaaatttgttttttagtttaaagttttttgatttttaaatgttagtaattaagaattttgtaattattttgagttaaataaaattcgagtggggagttaaatgtagtttatagaaggttaatttttaaatttatgttttttattttttgatatgtttttttaggtggtttattgggagttgttaagaattattttaaaggtagttttaatttttttttttttttttttttttttttattatattttaagttttagggtatatgtgtatattgtgtaggttagttatatatgtatatatggtagttttaatttttaaagagaatttttttttttatatttttgtatgtgtttgatttaaaatagttgatgttaaagtgtgggttatagattaaaaaaagtatgtagagtagtttgtaatataatgtatgtgtaaataagttagattttggaatatttttatttagttttgggggaaataggaggtagatttagtgcgagtgatattattgtaagaaatttatttatttttagttgaatagtttaaaggagaagttataattggtaacgttgttttttttatttgtatattaaattgatagaggttattagttattttggagttgataagagaggttgaaaaagattttatagaagatgatatttaatgtttggtttattttttattttttgtagaaaagtattgttttatttttattaatagtttttttgttatagtataaatggtatataaatgtgtaataaattaaaggattttggtttttgtttttttttttagggattttttttttttgttttttgtttgtggtagaagaaagaggaagaggtatagattgggtttttaatttgtgtattttttttttaaattttgagaattattggttttttagtaatattcgttaggtaagaattttgtgtagtaaaaaatagtgttatttttaaatatttttggttatttttgtggttttaatgttggtttaaagattgtgtgtgtgtgtgtgtttggagattagtattatatttaaataaattattatttgtgagattttatataaaaatttggatttttagtttttttcggaaaatggaaggaagttttttatatatttataatatgttggagttgagtattagttaatttatttaggagtattagttattgaattgattattttttatttattttgtaaatttttagttatttttgttttttgtgtttgaggttttttatttgtaaatgtagattatagttatattaattgtattgagttgttatatggatttatttttaaattaataaatatattaagtatttaaaagaatttttagcgtgtgttgaataattagtgttagttgttattgttatattttttgtatgtataaggtttattgtgttgttttaggggttttattaataaaagaatgagaaaataattttttaaaaagatgttaatgttaaagtgtagaaagaaaattaagtatagagttaaagtgaaaaagtttagttttaagtttatttttgttattttgaataagttttttaatttttttgggttttaggtttttcgtttataaaataagaagaatagatgtattgtttttagaggttcgtttttgaaattgaatatgattgaaggttttgggggaaaattagaagaagttatgttgtgataatagatgttaagaggggttaattttttttttgaaaaattgaatatttttttaaaaattttttagttaaaaattaatgtttattgtattttatatagatttaaattatgatgtagtgttttttttatgttattaattaaatattgttttttttgttttatttttttaggaaagaaaattagaaatttggtttttgtttaatagtaaggaaatttatattttttttattgaatgtataagtagtaaaaggggatgttaaggttaggaagtcggagaaagtatatttgttagagtaaataatggtaggttaggtaaaattgagaaacgtggtatgtttaattgtgaatgagagaaagtatatgtttttgtttataaattttatttatatgatagtagttttttttattttttaattgtattaaatgttatggatttggggttatttttgtataagattataatcgaattttgattttagtattatattatattatatataaaattagttaatttgattttttggttaagtttagggtatattagttggtttttggatatacgttaattgttttagattattaaatagtaagttttaaagttggaaaggattttagaaatgatttattttatttatgtagttaaaagatatatgaaaaaatgtttattattattggcgattagagaaatgtaaattaaaattataatgagatattattttatattagttagaatggtaattattaaaaagttaggaaatagtaggtgttggagaggatgtggagaaataggaatatttttatattgttgatgggattataaattagtttaattattgtggaagttagtgtggcgattttttagggatttagaattagaaatattatttgatttagttatttcgttattgggtatatatttaaaggattataagttatgttgttataaagatatacgaatatatatgtttattgcggtattatttataatagtaaagattcggaattaagttaaatgtttaataatgatagattggattaagaaaatgtggtatatatatattatggaatattatgtagttataaaaaatgatgagttaatgttttttgtagggatacggatgaagttggaaattattatttttagtaaattattgtaaggataaaaaattaaatatcgtatgtttttatttataggtgggaattgaataatgagaatatatggatataggaaggagaatattatatatcggggtttgttgtggggtggaggggaggggggaggtatagtattaggagatatatttaatgttaaatgacgagttaatgggtatagtatattaatatggtatacgtatatatatgtaattaatttgtatattgtgtatatgtattttaaaataaagtataaaaaaaaaaaagaaatgatttattttaaattatattttggtgatattttgatagtttataaaagtgttaagaaagtagaatttatgatatttatatttaggtagggtttgtgttttgagaattaagaatattttgatataattttggatgatagtttataaagggatttaaataatttataataaatgagatagaaggtagtttttaatgaaatttaatttggatagttttaggataagaggtgttaatgggaatttttttaaagaatgtggattagtaattatttataaagtggttagaatgattatatatatgtacggattgttatggtagtatgttgggataagaggtatgagagttgaaagttagttttagtataggattttaagaataattgtaaggaagttagttatgtaggagtgatattttaaattttaattttattttaatttattttagagattattatgtagatattagagattgggtcggatataggttcgatagtgattttataaatatttgtggttagttaagtagtagtgtttacgtaggtggtatagtaagtattagtataataataggtaaggagttgttgtttttagaaaagatgttgttatttttattatgttggttgtttaatatatttgtatttaaaaattatttgaattttattgttttgttatgataggtatattttagtttttaggtttatttagtaaatgttttttgagtattttttggatgtgttaggttttttttgtgttaggttatagggatataaaaatgaatatttaagttataatttgtatttttaaatagtttgttttgatttttaaagtaagttattttttttgatatgattatttaaagtttttttttttttttttttttttattgtttattataattttttattttttttatattgaaatgttagtaatattatattttatttagttggtttatagtagtatttaataggatgtatgtattttttaggtagggattttgtttttgtggtattttagaaagtgtttttgtattaggtggttgataaatattgttgaatgaaaatagaataatttttaaggtttggagatttgatttaagttatttaaaaagttgggagtgaatttattattagatatttattataggttttatttatacgtagggtagttggtttgtttggaaagatattgataaagtaatgttgtttatgtatgtggattgtgaatatattggtttgtgattttttttaaagagtggtgagaatataagtgagaaagattatatgttatataatattattttgagatttaagatttgtttataattttttagtattaaagagattttttagtaaacgttgtttttataattataaataagtggttagggagaaggatatagatgggttatagatgatgaaggatatttttataattgatagatgtaaggttatattttttataggatatagaattgggttgggtagggggtgtgttgtaatcgtatagaagttattggtttttaggataagtaaagatatttgagataatcgttttgtgtttgttttgt

SEQ ID NO: 1586 - DNA, 6125 bp, Artificial Sequence
  chemically treated genomic DNA (Homo sapiens)
ataaaataaatataagacgattattttagatgtttttatttattttaaaagttaatgatttttgtacgattgtagtatattttttgtttaatttaattttatattttgtaaagaatataattttgtatttattaattataaaaatgttttttattatttataatttatttatatttttttttttaattatttatttataattgtaagagtaacgtttgttaaagagtttttttaatattaagaaattataggtaaattttgaattttaagataatgttatatgatatatgattttttttatttatgtttttattattttttagaagaaattataggttagtgtgtttataatttatatatatgaatagtattattttgttagtatttttttaaataagttaattgttttgcgtatgaataagatttgtagtaaatatttgatgatgaatttatttttaattttttaaatagtttgagttagatttttagattttgaagattattttatttttatttaatagtatttattaattatttaatgtaaaggtattttttaaaatattataaaggtaaaatttttgtttggaaggtgtatgtattttattaagtattattgtgagttaattaaataaagtataatattgttgatattttaatatgaaagaaatagaaagttgtgataaataatgaggagagaagagaaggagaaaattttgagtggttatattagaaaaaataatttgttttaggagttaagataggttgtttgagaatatagattataatttgagtatttatttttgtatttttatagtttagtatagaaagaatttggtatatttaagaaatgtttaagaaatatttgttgaatgaatttaaaaattgaagtatgtttattatagtaagatagtaaagtttaaataatttttggatataggtatgttggatagttaatataatgaaagtaatagtattttttttaagagtagtagttttttatttgttgttgtattggtatttgttgtattatttgcgtaggtattgttgtttgattagttatagatgtttgtaaggttattgtcgagtttgtgttcgatttagtttttgatgtttgtatgatggtttttgaaatagattaaaatgaaattaaagtttaaaatgttatttttgtatgattagtttttttataattgtttttaaaattttatattgaaattaatttttaatttttatattttttattttaatatattattatgatagttcgtgtatgtgtatggttattttgattattttataaataattattaatttatattttttaaaaaaatttttattagtattttttattttgagattatttaggttaaattttattgaaagttattttttattttatttgttataaattgtttaaatttttttataaattattatttaaaattatattaaaatgtttttaatttttagaatataaattttatttggatgtaagtgttatgaattttatttttttgatatttttataggttgttaggatgttattagaatataatttagagtaaattattttttttttttttttatattttgttttagggtatatgtgtataatgtgtaggttagttatatatgtatacgtgtgttatgttggtgtgttatatttattaattcgttatttaatattaggtatattttttaatgttatgtttttttttttttttttattttataataggtttcgatgtgtgatgtttttttttttgtgtttatgtgtttttattgtttaatttttatttatgagtgagaatatgcggtgtttggttttttgtttttgtaatagtttgttgagaatgatggtttttagttttattcgtgtttttataaaggatattaatttattattttttatggttgtatagtattttatggtgtatatgtgttatatttttttaatttagtttattattgttggatatttggtttggtttcgagtttttgttgttgtgaatagtgtcgtagtaaatatatgtgttcgtgtgtttttatagtagtatgatttataattttttgggtatatatttagtaacgggatggttgggttaaatggtatttttagttttagatttttgaggaatcgttatattgatttttataatggttgaattagtttatggttttattaatagtgtaaaagtgtttttatttttttatattttttttagtatttgttgttttttgattttttaatgattgttattttaattggtgtgagatggtattttattgtggttttgatttgtatttttttgatcgttagtgatgatgagtatttttttatgtgttttttggttgtataaatagagtaaattatttttaaggttttttttaattttaaaatttattatttggtgatttaaaataattaacgtatatttaaaagttaattgatatgttttaaatttagttaaagaattaagttaattaattttgtgtatggtataatatggtattaaaattaaaattcgattatagttttatataaagatagttttaaatttataatatttaatatagttgaaagatgagggagattattattatgtaaatgagatttgtaaataaagatatgtatttttttttatttataattaaatatgttacgttttttagttttgtttgatttgttattgtttattttaataggtatgtttttttcggttttttggttttgatatttttttttattatttatgtatttaataaaagaaatatgaatttttttgttattgagtaaagattagatttttagtttttttttttggaggaatggagtaagagaaatagtgtttaattggtagtataagaaaagtattgtattatagtttaaatttatatgaaatatagtgaatattaatttttaattaagaaatttttgaaagagtatttagttttttaaggagaaaattaattttttttggtatttgttgttatagtatgattttttttaatttttttttaaaatttttaattatatttaattttagaaacggatttttgaagataatgtatttattttttttattttgtaaacgaggaatttaaaatttagagagattaagagatttgtttaaggtgataggagtagatttgggattgggtttttttattttgattttgtgtttaattttttttttatattttgatattggtatttttttaggggattatttttttatttttttgttagtgaaatttttaaagtagtataataaattttgtatatgtaaaaggtatagtagtaataattagtattgattgtttaatatacgttaagaatttttttaagtgtttgatatatttattaatttaaaaatgaatttatgtaataatttaatgtagttggtatgattataatttgtatttataaatgaggaattttaggtatagagagtagaagtggttaggggtttataaaataaatggaaagtgattaatttagtggttaatatttttagatgggttagttaatgtttagttttagtatattgtgagtatgtgggaaatttttttttatttttcgaaagaaattgaaagtttagatttttatgtgaaattttataaatggtggtttatttaaatgtagtattgatttttaaatatatatatatatataatttttgaattagtattaagattatagaaatgattaaaaatgtttgagaatgatattattttttattatataaaatttttgtttaacgagtattattagaggattaatagtttttaaaatttggggagagaatatataaattaagaatttagtttgtgttttttttttttttttttattatagataggaaataaaaaaaaaaaatttttaaaaaagaaagtaaaagttagggttttttgatttattatatatttatatgttatttgtgttatagtagaggaattattagtaagagtgaggtaatgtttttttgtaaagaataaggaatgaattagatattagatattattttttgtgaggttttttttagttttttttgttaattttaagatggttggtggtttttgttagtttagtgtatagatgaggaagatagcgttgttagttatagttttttttttaagttgtttaattaagagtagatgagttttttataatgatgttattcgtattaaatttgttttttattttttttagagttggatgggaatgttttagagtttaatttgtttgtatatatattgtattatagattattttatatattttttttggtttatgatttatattttgatattaattgttttagattaaatatatgtaagaatgtaaagaaaaaagttttttttaaaaattaaaattattatgtatatatatgtaattaatttgtataatgtgtatatgtattttaaaatttagagtataataaaaaaaaaaaaaaaaaaaaaaaaaaattaaaattatttttaaagtaatttttaataatttttaataagttatttgggagagtatattagaagataaaaggtatagatttggaaattggttttttatggattatatttgattttttattcgggttttgtttgatttagagtgattataaaatttttaattgttaatatttaaaaattagaaaattttgaattaaaaaataaatttttaggtcgggtatagtggtttatgtttgtaattttaatattttgggaggttaaggtgggtgaattatttgaggttaggagtttaagattattttggataatacggtgaaattttgtttttgtttaaaaaaaaaaaaaaaaaaaaattagttggttatggtggtgggtatttgtaattttagttattatggaggttgagataggagaattttttgaatttgggaggtagaggttgtagtgagttgagattttattattgtattttagtttgggcgataagattaaaatttcgttttaaaataaaaaataaaaaagaaataaatttttagaattttttgaaatatttgaaaattttaaagaggtgagtatatattatgtgttttataggtaaattatttaaatggttatattttttttaattgaatggtttttataggtatttgagtttgtgatttttttgagggtaattagaaatttatttttatatataaagattgaagtagaaaattgttttttgagggggtcgggggtagtggtttacgtttgtaattttagtattttgggaggttaagtggggtagatttcgaggttaggagtttgagattagtttgaataatatggtgaaatttcgtttttattaaaatataaaaattagttaggtatggtggtgtatgtttgtaattttagttatttaggaggttgtagtaggagagttatttgaatttgggaggtagaggttgcggtgagttaagattattttattgtattttagtttggatgatagagtaagatttcgttttaaaaaaaaaaaaaagaaaattgttttttgggtttgaaataatattgatgatatttatattaattttatatagaaaagtaatatttaagtttagattattttattgttagaaatgtattattagattaaaattagtgattttattaatagatgtattattagattaaaattatgattttttttattttaaagatgagttaattgaggtttagagatgttatattatttatcgaaggttatatagacgttgtataaagataagtaagaaaggtaaattgatgaatttttagaatgagataggaagaaaagaaaaagttgttaattatttaataggaggaattttatagaatagagtaggggaaataagataggtaaaaaataatggttgtaaaatataaagttagagagttacggagaattttttattaagtttttagttgtatttataaattatatttaaattgttatataaagtttagttttgtataattaagtattttattaagtattaattaagttttagtatatgttttgtttatttttaaattattgtttataggtttgatttatttggtttttggaatatagggttatgttagttgataaaaatttagttttttttttgtgtttttatttttttttatagata

SEQ ID NO: 1587 - DNA, 6127 bp, Artificial Sequence
  chemically treated genomic DNA (Homo sapiens)
aattaatgtttaaaatggattaatgttttttatataggaatagttattagtatagtgaaaaagaaatattaatgtaaacggattttttatttattagatgaaaaatggttttttttagatttttaaaaaagattttgtgattattattatatagatatttaaaattttatattttgttaatttaatatatttaaattttaaaaaagtagttaataggatatttgatattttaatggtttggtaaaattttagggatagaaattaaaattttagttaaaaaaaatattaaaaaagaaatttttagttttaatttatagataatatgttaattatgtaatttattttataagaaagtatttatattatttatttttttttggtattttatgtataaaaagagtgtagtagtaggaatatataataatttttttatttagattttatatttatagttttttattttatagatttaatagttataatattttatttaaggtattttaatatatattagtatttttttaggaaaaaaaaaaaaaattttatgatgtttttgttgttgttttatgaagggtatttagatgtttttgtaaagagggggttattaaatttaagtaggatttgtttgtattggaagaattatatattttatattatatatttggtatatatttggtataaatttaagatagaattatggaattatattaattggaattattaatataaggattggtaaaattattaatttagttataatatatgttaagtattaggtttaatttgtgatttatttttgattaaaatatttatttttttttagtttttgggtatgaaaattatatttttaaaaattaattataatttttaaattttagattatattaggggttaaggagtatagtataaaattttatgaggttatatttttattttgttaaaagaatattttattaattaaataggataaaaaaattttttaaagataggtattatatttttttaaatatatttaataattagggtaataaaagtttttattttttttaattatttattattatatagtatgtaattttttgattttttttttttttttttttaattaatttatttatttaatattttataaggtaaacgataggtttatagtttttagaaatttggaaattaaaatattttattaattgaaaaaagtaaagtatagaataatatatagaatgatatttttgtgtttttaaaagtaagtattttggtttttaaattttttatttttatttatttatttttttatttttaatttattttttttttttaagaggtagggtttttttttgttatttaggttagagggtcgtggtattattatggtttattgtagttttaaagtttttgggtttaagtaatttttttattttaattgattgagtagacggggttataggtgtatgttattatgcgtaggtaatttttttttaatatatttttgtatagacggggtttagttatgttgttaaagttggttttgaatttttgggtttaagtaagtttttttttttggttttttaaattgttgtgattataagcgtgagttatagtatttaatggtttttatatttttaaagtttaagtaggtgagttattttatataaatatttttagttaataggaataggaattaataatttttattaataatggttagtatagagtgggagtagaagggagaagtatgataggggaaatttttattttttataatttaagatacgtaagatatataatataagaattttagatatattatgtaagaaatttgtattttttttttgtttttttttataaatttttaaaaaaatatagaaagtttataaattatttggaaaatttttattattaatttgtttaattaatttttttagtagagggtatggtaggtttaatatagaaaatgtatggttaggttattagttatttttaaattgaggttttgttgtgtaatttttataatttattgtattgtttttttttttattataggatggaaaatatgtgttatttttatgtggagtaattttgtttatttaaaagttagttgtaataataaaaagggaagttattaaagattttagtttttgttttatttatatatacgtaaatatatgtaatgtatatgtaaatatatatgtaatatatattatatatatgcgtgaaatatatgatgtatatatttatgttatatatattatatgtatatgtaaatatatatatattggtttgttttttaaaagatattaatatggtaagtttttgaggaaaaggtttttatagtaggtattgttttaatttttaaaattatatatagatataaaaattataagttgatttatatttagatttattaattaattatataatttttagagaaaaattaattttttgttatttaatattagttattgatttggaagggtttatgaaaaaagtaaagaattatattaaatataaaaatattaagaataatttatatttaaattagttgtttatgtaggtatatgtatatttatttttattaatatattgagatgattaaatttttttggtttggagatatttgaaaagtgtaattaattattattattattttaagagatagggttttattttattatttaggttggagtgtaatggtataattatagtttattgtaatttgaatgtttgaatttcgaatttttgagtttaagttttttatttgttttagttttttaaagtgttgggatttttagtatgaattataatatttagtttgaaaagtttaaatgttaattagtttttttattttttttacgtattatttagtgagtatttattaaatatttataatgagtttaattttttataaatttgtgtattttgtgtatttgtgtatttataaattgaaatattttgatatttaatagtatttatatatttataatttaattacgtttgagttaattttcgtacgattttttttattttgaatagttatgatttgaatatttttttttgttatatatatgtaaattagtaataaattttcgtatagtattttagagtttagaaaagattttttatgtaagagttatataatattttatgaggttggtaagaaaatatatgttatttttattatagatgagaaattgggatttaaagaggtgtgaagttagtgttttaatagttatttagtatttattggataagtttaggttttaattgggttttttgatagaagtttagttttttttttttgttgtttttttgttagaatttttggtttgttagcgaatttaattgtttatgagtaaattttaatatttaaggttttaagtataaaatatattgaggtttatagtggtgagaaaaagtaagtgtttgcgtattatagatagttgataaatacgtattgagttattagaaagtgaaaatagatgtaggattattatgtaaagtataggagaggaagagtatatgtttaagaaaaaatggtatttttagagttaataagtatgttttaaagtatttattattgaaatttatacgatttttttttttataataaagtttataattgttgttttaaataataattgtaggttttgttttttaagttaaatttggagttttaattattggtagtttatcgtaagaatatattaattatttttaatttttttttaagaagtcgaatataaagtagagagaatatttgtagtttggttgtaaagtcgtttaaatattttattggttagttttggtaatattattcgaaattaatttattttgtggttgaggtaatttatttgtttttattaattaagtcgttttaaaatttttaggagtagagatgatatttgaagaattaataaataaaatttaattaaggaaattgttaatttatttttttttttattttttgttagttattaaatgttttggtaaattttaatttaataagaatgatttatgaggaaattttgattttttgaatttattgattttggtgtattatagttatgaaatttttatgtttgtagtttttttttttattataaggaaatttgtgatttttattttggtaggagatgtgattaaggatttttgaggaatgattttatagatagatttagttacgtgtttagtagtgattaaaaatgtaaatttaattaaagtattgttttttgataaagttatttttttttgtttaatttttaatgtttatttttaaagtgttttaagacgttttagtaagttgtagagtagattttattttgtttttgggtaattaacgttttaggttattttttttttaagttaagtggtagagagaaacgggcgagggtttttttattgttttagtttatagattagggggtgtcgaatgagttttatagtaggatagtaaataagaaatgaggcgcggggttagggaacgcgtttaaaaaaggaagaaaaattttattttttattcgaaattaggttattgtatttcggtttcgtggcgggcgatttttttttgttagggaatcgtcgttttggtttcgggttggggagttcgttagggtgggtgagggagcgtcggcgttttcgtcgggtcgtcgttaatttcggtttttttttttcgtcgtaaagttttcgagttcgttcggtcgttacgttttagtaaaaggtcgtgcgtagcggtttatattgaagattttttatttgtttttatatttgttttagttggtcgttgttatgtggttcgagtgcgtaagaagtcggggtcgtagacgttagtagcgtttcggtttcgagatttttcggtagtagtcgtgattgtcgtcggcgggcgttgatttattttcgtgttagtttgtagtcgattaattcgcgtttttttgaggcggggtcggagtcgcgaggtttcgtttttaagtcgaggttttataaatgttgcgacgtacgtttagtcgtaaatagtcggggttttagcgggagaacgataatgtaaagtgttatgtttttggttgtttaatacgattgtagatttatggataagagcgtaggtagtggttataagagcgaggagaagcgagaaaagatgaaacggattttgtgagtatggtttttttttttttttcgttattttttgttttatattgtaagttgtaaacgcggtattttcgggttcgtttttgacgttaggaaattagtttgagtttatgtagggaaaaaaaatcgaaaaggttaatttgttaagtaaggttaaatttgggtgatgttcgggtatagtttaagaatcgagggagatagttgatatgagggcggtggttgatgcgttaagaaattgcgggttggttttttgtttttttgtatttaaaatgatattagaattttgcggttgaagcgcgtttttagtatttatacgttgtatgatgagtttttattagtttatatagttattggaaggtgatgtttttgttggttttgaatatattcgtttaaaatttatttttgttttttaattatagagtagattttatttagttcgaatgtggaataaataattgttatgtagcgtttgtttaaaagaagtgtcgtaggtggggaaggaagagcgtaggggaattagttatttatttttttgtatagtttttggcgtggtttagaattttttgttttaaagagagaagcgtgggtcggttttagatagttttatgtttgttttttttattaaagtgtaaaacgtttcggaattgtaattaattttgtaaataaattgatgttttttgtgagttagaaatagtgtttgttttttgaattaaatttattaataattttttaaaatattttagtgattataggtagttttgtttttagttgtaaaattagtagatacggttagattaatggacgaaattgtttagtatatgaggtttaaatgttaggtggataagatttatttgaagagtttttgttttgttttatgcggtttgtttttagttattgggtgattttatttggtaaaaatgcgtttagttgtagtagtatatttaagtgttgttagttagtaattatttttttaattttttgttttagt

SEQ ID NO: 1588 - DNA, 6127 bp, Artificial Sequence
  chemically treated genomic DNA (Homo sapiens)
attaaaataaaaaattaaaaagataattattaattagtaatatttgaatatgttattgtagttgaacgtatttttattaaataaagttatttagtaattagagataaatcgtataaggtaaagtaagaattttttaaataagttttatttatttaatatttaaattttatgtattgagtagtttcgtttattaatttgatcgtatttattagttttataattaagggtagggttatttataattattagggtattttaaagaattgttaatgaatttagtttaaaaggtagatattatttttggtttataaagggtattagtttgtttgtaaggttaattataatttcgagacgttttgtattttaatgaaaaggatagatatggaattgtttggagtcggtttacgtttttttttttagagtaggaggttttggattacgttagagattgtataaagaggtgggtgattgatttttttgcgtttttttttttttatttacgatattttttttaagtagacgttgtataataattatttgttttatattcggattgggtgagatttgttttataattaaaaaataaaaatggattttaaacgagtatatttagaattagtaagagtattattttttagtagttgtgtaagttgatgagaatttattatgtaacgtatgaatgttggggacgcgttttagtcgtaggattttgatgttattttgaatgtaggaggataaaaagttaattcgtaattttttagcgtattaattatcgtttttatattaattgtttttttcggtttttaaattgtattcgagtattatttagatttaattttatttaataaattgattttttcgattttttttttttgtataggtttaggttagttttttaacgttaaaggcgagttcgaaagtatcgcgtttgtagtttgtagtgtggggtagggggtggcgggagagggaagaaagttatatttatagggttcgttttattttttttcgttttttttcgtttttgtggttattgtttgcgtttttgtttatgggtttgtagtcgtgttgaatagttaagaatatagtattttgtattatcgttttttcgttggagtttcggttgtttgcggttgggcgtgcgtcgtagtatttatgaggtttcggtttgggggcggggtttcgcggtttcggtttcgttttaagaggacgcggattggtcggttgtagattggtacggggatgggttagcgttcgtcggcggtagttacggttgttgtcgaagggtttcgaagtcggggcgttgttgacgtttgcggtttcggttttttgcgtattcgggttatatagtagcggttagttggggtaggtgtgggagtagatggagagtttttagtgtgggtcgttgcgtacgattttttgttgaagcgtggcggtcgggcgggttcgagggttttgcgacggagggagggagtcgaagttggcggcggttcggcgggggcgtcggcgtttttttatttattttgacgggttttttagttcgaggttagagcggcgattttttggtaggaggaggtcgttcgttacgaggtcggagtgtagtggtttgatttcgaatgaagagtgggattttttttttttttttgagcgcgttttttgatttcgcgttttattttttgtttgttgttttgttgtaggatttattcgatattttttggtttgtgaattgaggtaatggggagattttcgttcgtttttttttgttatttaatttaaggaaggagtaatttgaaacgttgattgtttaggggtagggtgggatttgttttgtagtttgttggggcgttttggaatattttgagaatgaatattagggattgaataagagaaagtgattttattagaagatagtgttttaattgggtttgtatttttgattattattaggtacgtggttgggtttgtttatagggttattttttaggagtttttggttatattttttgttaaaatagaaattatagatttttttatggtgggagagaaagttgtagatatagagattttatagttgtaatgtattagaattagtgagtttaaggagttaggatttttttatgagttatttttgttgagttaggatttattagaatatttaataattggtaaaaagtaggggggagaatgagttaatagtttttttgattaagttttatttgttaattttttaagtattatttttatttttgaaggttttaaaacgatttgattggtaaagataaatagattattttaattataaaatgagttgatttcggataatattattagaattagttagtgaaatgtttaagcggttttgtaattaagttgtagatattttttttattttgtattcgattttttaaaaggaaattggaaataattaatatatttttacggtgagttgttagtagttggagttttaagtttgatttggagggtaaaatttgtagttattatttaagataatagttgtggattttattgtggaaaggaaaatcgtgtagattttagtaatagatattttgaaatatgtttgttaattttaggaatgttatttttttttaagtatatgtttttttttttttatgttttgtataatagttttatatttatttttattttttgatgatttaatacgtatttattagttgtttgtaatacgtagatatttgtttttttttattattgtaaattttaatatattttatatttagaattttagatgttagaatttatttatagatagttaaattcgttggtaggttaggagttttgataaagaggtagtagagagagagagttggatttttgttaggagatttagttagagtttgggtttatttagtaaatgttaagtaattgttgggatattagttttatatttttttgagttttagttttttatttgtaataagagtaatatgtatttttttgttagttttataggatattatgtgatttttatatgaaaggttttttttaagttttaaagtattgtacggaagtttattattgatttgtatatgtgtggtaaaaggaaatgtttaaattatagttgtttaagatggaaaaaatcgtacgaggattaatttagacgtaattaggttataaatatgtaggtattattaaatattaagatgttttaatttgtaggtatataaatatataagatatataaatttgtagaagattaagtttattatagatatttaataaatgtttattggataatacgtaggaaaaataaggaaattgattaatatttaaattttttaggttgggtattgtggtttatgttggaaattttagtattttgggaggttgaggtaggtggaaggtttgagtttagaagttcgaggtttaagtatttaagttatagtgagttatgattgtgttattgtattttaatttgagtgatagagtgagattttgttttttaaaataataataataattaattatattttttagatatttttaagttaaggaagtttaattattttaatatattaatgaaagtgaatatatatgtatttgtataagtaattggtttaaatatagattatttttgatgtttttgtgtttaatataattttttgttttttttataaatttttttagattagtgattgatgttaggtggtagaaaattaatttttttttgaaaattatgtggttggttaataaatttggatataaattaatttgtaatttttgtatttatatgtaattttaagagttaaggtagtatttgttatagaaattttttttttaaaaatttgttatgttaatgttttttaaaagataggttaatatatgtatatttatatatatatgtaatatatgtgatatgaatatatatattatatattttacgtatatatgtaatatgtattatatgtatatttatatatgtattatatatatttacgtatatataggtaaaataaaagttggaatttttgatgatttttttttttgttgttgtaattggtttttaggtaaatagaattgttttatataaagatgatatatattttttattttgtggtagaggaagaaataatgtagtgggttgtaaaagttgtataataaaattttagtttgagagtggttgataatttaattatatattttttgtgttgaatttattatgttttttattggagagattgattgaatagattagtggtggaggttttttagataatttatgaattttttatatttttttaaaagtttatagaagaaggtaaagaaaaaatataagttttttgtataatgtatttgagatttttgtattatatattttgcgtgttttaaattatgaagagtaaaaattttttttgttatattttttttttttgtttttattttatgttaattattattaataaaagttattaatttttatttttattaattaaaaatatttatataaaataatttatttatttaagttttagaaatgtgaaagttattggatgttgtggtttacgtttgtaattatagtagtttggaaggttaaggaaggaggtttgtttgggtttaggagtttaagattagttttggtagtatagttagatttcgtttgtataaaaatatattaaaaaaaaattatttacgtatggtggtatgtatttgtagtttcgtttatttagttagttgaagtgggaggattgtttgagtttagggattttgaggttatagtgagttatgatggtgttacggttttttagtttgggtgatagagggagattttgttttttaaaaaaaaaaaataaattaaaaataaagaaataaataaataaaaataggaaatttaggaattaagatatttgtttttaaaaatataaaagtattattttatgtattattttgtgttttgttttttttagttagtaagatattttagtttttaaatttttaagagttgtaaatttatcgtttattttatgaaatgttaaataggtgggttagttaaaaaaaaaaaaggaaaaaattaggaagttatatgttatatggtgatgagtaattggaaaaaatgaaaatttttattattttagttgttgaatatatttaaagaagtataatgtttgtttttaaaaaatttttttgttttatttagttggtgaaatatttttttaatagaatgaaaatatgattttatgagattttgtattatattttttaatttttgatatgatttgagatttaaaaattatgattaatttttgagaatgtaatttttatatttagaagttgagagaaaatgagtgttttggttagaaatgaattataggttaaatttaatatttgatatgtattatagttaagttaataattttattaatttttgtattgataattttagttagtgtaattttatggttttgttttaaatttgtattaagtatatgttaagtatatgatatggagtatgtgatttttttaatgtaggtaggttttgtttaaatttaatagttttttttttataaaaatatttagatgttttttataaagtaataataggagtattatgaagtttttttttttttttttaaaaaaatattaatgtatattgaaatattttggatagaatgttgtagttattaggtttgtaaggtaaaggattgtaagtatgaggtttgagtaagggaattgttgtgtgtttttgttgttatattttttttgtgtatggaatattaggggagaataggtgatataaatatttttttataaaataggttatatagttggtatattgtttatgagttaaagttaggaattttttttttggtgttttttttgattgagattttaatttttgtttttggaattttgttaaattattggagtgttaagtgttttattgattatttttttgaaatttgggtatattaagttaataaaatataaaattttaaatatttatatgataatagttataaagttttttttaaaagtttgaagaaagttattttttatttagtaaataaggaattcgtttatattagtattttttttttattatattgatgattatttttgtgtagagagtattaatttattttagatattggtt

SEQ ID NO: 1589 - DNA, 16918 bp, Artificial Sequence
  chemically treated genomic DNA (Homo sapiens)
aggagggtatggtaggtatttttagggagtttggtgtttatagaaaagttatgattatacgtgaaagttgtgggttttttggtttgatttattatatttgtaggaagtttggttgtttagattagtacgtcgtggatatagtattatttgtttagttttattttcgtaatttaggttgttaggtttgttgataaatttttacgtttgtaataattttgtgaggagattagagtatattttatttgatttataaggaaattgagattgggtgatttagtaatttgggaggtagaattgtaaagtgattagtaatataagttatggtgttagatggatttgggttaggttttatttttgtcgtttattagttgtgtggttttgggtatttacgttatttttttgagtagtagtttttttttttgtaagcgtaatgatgtttatatttataggtttgagaggaagattcgatgaaatagtatatgtaaaatgattggtttcgtgtttggtattttagaaatggtagttgttatttagttaataaatatttattgagtatttattatggatttttttggtgttgaggatataatagtaattatagtagttaaaagtttttgtttttatgttgtttagatttttataggggaaagtagataatgaataaatatacggttagacgtagtggtttacgtttgtaattttagtattttgcgaggttaaggtgggtaagttatttgaggttaggagttcgagattagtttagttaatatggtgaaattttgttattattaaaaatataaaaattagcgtagtgtggtggtttatgtttgtagttttagttatttgggaggttgaggaaggagaatcgtttgaatttaaaaggtagaagttgtaatgagttaagatcgtgttattgtattttagtttgggtgatagagtattttatttaaaaaaaaaatttaaatatataagtaaaaatatagatttcgttagatgttagtaagtgttgtgaaggaaattaaaaggggaatataaggaatttttgttaaggggagtagaaaggggagttgatgttgtttttttaaatagggtaattagaggttaggtatagtggtttatatttataattttagtattttgggagttcgaggtaggtggattatttgaggttaggagtttaagattagttaggttaatgtggtgaaattttgtttttattaaaattataaaaattagttaggtgtggtatcgcgtgtttataattttagttattcgggaggttgaggcgggagaatcgtttgaatttgggaggcggaggttgtagtgagtcgagattgtgttattgtagtttagtttgggtaataagagtaaaattttatttaaaaaaaaaatatagtaaaaaagggtagttagggaaaatttttttgagaaggggatggtggagtatagatttagggaggtgaggtggggagtaagttagtatagttgttttttgattttcgatgaggttatgttttgataaagttatggtaagtaggaaatattgtaagttaaaaatgtatttaatatatttaatttacggaatattatagtttagtgttatttattttaaatatgtttagaacgtttatattagtttacggttgggtaaaattatttaatataaagtttattttatgataaagtattgaatattttatgtaatgtattgagtattgtacggaaagtgaaagacggagtggtgggatgggaattttaagtacggtttttattgtatgtgtgttgttttcgcgttattataaagttgaaaagcgttaagttaaattatcgtacgtcggaggttatttgtatttggtaggaggagtgttttagatagagagaatagtaggtgtaatagagtgttttttttttagtattttattatgaaaaattttaaatatttattaaaaaaagttgaaagatttgtacggtgaaaagttatatattttatagttagaattaataattaatattttattgtatttggtttttgatttatttattttagattttttgtgttttttgtagtaggtgatttgttttgaagatttaaagatagaatatcgggaaatgtagttagaaaatggggttttttataagagttagaggggaagagtaaaaattttgttttcgagaaatttgtcgggagaggttaattgtagggatattttttttttttaatgaaagtatttttgttttgcgaggagcgggatttttttgttaagtagttagtttttgttgtttttttattggggtaggattaggacgtatagggatttggagtgttttggaattaattattatttacgttgtttgttagttggtaaatatgtttgttaggtttaggggttggtattgtttggaaatttttagtgtttattttgttgatatttggtgttttcgggtaggtaggtgtagttggttgtttggtttatagagtttgtattgggtttaggttagtaggggttatatttttttattttattgtgtaggggagtttttttttaggaaatttagtttataagaagtattgattgttagaaatagagtagagattagaattaggaggtaattgtgagaggaatggagatttttgatttttggggattggggtatttttttttttaattgttgttggggtagtagagggtttagaagtttatgtttttagatttttagaattggaagaagatttagaagtaatttaggttgggggtttttaatttttaggttgtggttcgttaggaatttgatcgtatagtatgaggggtaggttagcgagtattatcgtttgagtttcgttttttgttagattagtagcggtattagatttttataggggtataaattttattgggaatcgcgtatgagagggatttaggttgcgtgttttttaggagaatttaattaatgtttgatgatttgaggtggaatagttttatttttatattatttttttaattttatttcggtttatggaaaaattgttttttataaaattcgtttttggtgttaaataggttggggatttttgatttaggttatagttaagtggttaaatatttaggttttgaagttaggttgtttgggtttaaattttagttttattgtttattagttttgtgattttgagtaagttatttagtttttttgtgttttagtttatttatttgtaataaaagtttaatagtatttattttagtgttatgaattaagtttatatatgtaaagtgtttagaatggtgtttagtaagtatttagtaatagttagttttgaaaatgtataaagtaaaattaattaatgttttagtggtttgtagttaatttttttttatgcgtgtgttaatatattattttataagagtgggaatatattgtatatgttgttatataatttgtttttttattaaatagtttattttttgtgttagttttgataaaagcgttttttttttgttttttttgtatatgtttagaattattatattggtagtaagttttatgttttgtagtttttttaattaattttttgttagcggatatttaggttagttttagttttttttttttgtaaataaagttgtattgagtaagaagtgatcgatgttaagtgattagatgattttaggtatgatttttttgggttttggttttttggtttaaaaataaaatgataggattcgattgggtgattaaaattttttttgatttatataggaattgtttttaagatatttttgtatttttttagtgatagggtgtttattattttatgagtattttagtggataattgtaatggttaataaagtatttattttttattttttatttttttgtagtttttggttttggttttattttttggggttttatatatttagtttatatttagtggttagtggttggggttattgtagaaaatgaggaaattttaattttttttttttttttttttttttttatttttttttttttttttatattttttttttttttttttttttttttgatatttattatgtattagattttttgttaggtatatggatgggagtatagtttcgggaagttggttgtagggttagaattaagttttaagtttcgtaaagtttatgttaggggattggattgtttagtattgagggatggggatgttgaggttggtggttttttttagatgtattgtagtgttttaggtagagttttgggttgttttgtgaggaggtgattagaggtagagtaattttattttaaggttggattaggattttttttaggtttttattagagttaaatttatatttttttttttttttgttatttttttttaaaatgtttagaaatatatagatttaaatataagtttaaatgtaagtaattttaattgtgtaattatgaggagttaattttacgtgggttttatttgtattttttttagggtttagttttattttttgtttttatttatttttatttaatatattgttgttaagagtttattgggtgttttttttgttatgtagtaaggttttaaaaagaaagttttttttgagttttagtttttttatttataaaataggagtattgattcgttttttgttttttttataaggatatgttgaagatgattgaagtatagagtaaagaaggattatgtttgggtgttaaaggaatagaatgtttttttttaaattgagtatagtaggaatttgtaataggaatatagtaatttgttgaatgaatgataatattggaaaatatatatttttttttttttttattatagtttttttgttttcgtgttaattttatagataggttagtatagttagttttgtagtttgagataaggtttttggcgggtgttttttttatcgtttttttaagtttttaagtaggtgttggagagaggggtgatgtttggtgttggtggaatttttgtatagagacggatataggatgagttttaagtattcgcggtttgttcggcgttgtttgtttttttgcgttttaatattggaagtagtttttattttttttttttatttttttatttattatgacgtttttttagaggattaaaaggggttcgtggtattttattaaggtgagagtttattggaatagtggttataggagtaaatagtaggggtaggggcgggggaggtttatggttttttaggggtatagatgtttttttttataaaatttcgaggaaaagatttttttattttttttcgtagattgtatcgaaatttagttaataatgtaagtttttttttagaagtagtttgggtatgtttttttttgtgaagtttgttttgattttttagtatagtgagaggtattttttttggtgttttttaaattttttttattaaatggtttttataattttttgtttttttgtttttttttttttttttttagtggtaaggattttttttatttttatagatttaggggatataagtgtagttagtttatgtaagtaattttatgttgttgggttttcgggttttgttttttttttgtggtttttcgtttattttttatttttttttgagatagggttttattttgttgtttaggttgaagtgtagtggtatgattatggtttattgtagttttgattttttagttttaagtaatttttttattttagttttttaagaagttgggattataggagggtattattatgtttggttaaatttttttttttttttggtagagatgtgggtttttttgtgttttttagattggttttaaatttttggatataagcgattttttagttttagttttttaaagtgttggaattataggcgtgaagtattgtgtttagtttttttgtttatatttatattagtttttttttggaagttttagtttgttgttattttttatttttatttttatcgattttagttttttttttatttaggggttgggaagtttgtatgttgtttataaatttagaattagaaggtatggttgaaggggagggtaggatgatggttattttatatttagttaaaaatatttttagattgtgatgagataattgtaaataagatagatgtttataatggtgtgattttgtttttttaaaaatattgaaatgagttttaggtattttagtgggttgataggttgttgataatggatagggtttttttgaagaatgtttttgagataaagttgaagtttgagtttggttgagtgtttgtttgtttttaggttgatatgaacggttagttaattggaagtaaagagaagttattttgggggttatggtagtgataagtaggatttagggagggaagtttttatattatttaaggtgttggtttagagaggagtttttagtgatagataaataagagttggtataattttaatttattttaatttattttaatttattttaatttaatataatttaatgtattttatttatttaattatgtatgatatttaatgtgggatttagatatatgatgattagaattgatatttatgagtatttattatgtattaggtattattttatatgttttatattgaatttttataataatttaatgaggtgggtattattatgattttcgttttttatatgaggaaattaggtatatggatgttgagtaatttgtttaaggtcgtttagttagtaatagtatagcgtatttaaatttagttattttggatttagtttttttatatttaattattatgtattatggttttattttatagtggcgttgagttatttgttatataatttagtaggtgtagtagttattattttaattttgtagattgattttagggtttatgttttttatttttgtatcgtgttattaacgtaggtataaaatgtttttagaaatttattttatatggaagtttagaggagggtttataatttaggtaggggagacgatggtgttaggggaggtttttggagggaggtgtttgtttagttagtttttgaaggtttagtaggaattatttgtgggataaaggcgggttatttaagtgagggtatagtgggtgttattgcgtgtgtatatattagagtagattgagtttgggtttaatattgtattgttttgtagtttaaaaagagaagtaaggggttgggcgaggtagttgatatttgtaattttagtattttgggaggttaaggttggagaattatttgaggttaggagtttaagattagtttggttaatatggtaaaattttatttttattaaaattataaaaattagtcgggtgtggtggtatacgtttgtaattttagttatttgggaggttattatattttagtttgggcgatagagtaagattttattttaaaaaattaaataaaaataataataataataaaaaataaagaggagagtagggattgggtgtggtggtttatgtttgtaattttaaatattttgggaggttaaggcgggtagattatttgaggttaggagttcgagattagtttggtttatatggtgaaattttgtttttattaaaaatataaaaattagtcggatgtggtggtacgtgtttgtagttttagttgtttgggaagttgagggaggagaattgtttgaatttaggaggtagaggtagttgagttgagaatacgttattgtattttagtttgggtgatagagtgggattttgtttgaaaaaaataatagtaataaataaaaataaatagggaagtagtgggtggtagatttattgggttgtatacggagtttggttttagtttgaggttcgaatagtaaataggagcgcgataagtttgggtttgggttatggcggatgttatgttagggttggtgttgggtataggggaaggggtatggtttgagatataagattagcgtggaggttgtagtgtagtattgattcgagggttttaattttttgatggtgtatatattattttttgagtatgtattatggttatatgttatattttaagtattattatattaatatattttgtatgttataataaatatatataaattaggaaaattgaaagagattagaatgaaatatataatatttttaaattattaattataatggtgttaatttttaggtagggtttattgttatagttgacgatagtggatgaaaatttattttttagagtttttttgataatttgaaattgttttgattgatttgttagatttgattagatcgatattttttaaatttcgaatgtgattgatagtttgtataaggagaagttttattttgttttttttttttgtttatttgattgttattatttttttgtttttaatttgtgtttttttgtacgagttggttaagttattattttattttgtgaaagtttgttgagttaaatttaggtaatttaatttgttaatttatttaattgaatttagttttggtaaattataatagattatttaaatttgttaattttaaaaagatattttgagataattaggaaatttgaatatagtatgaatattttacgatatataaggattattgttaattttgttaggtatgataaaagtatggtgggttttttttttgtttttgttttttaaggttttatttgttagagaggtatattgaaatggtatgatatttggggtttgtttttatattagaaaaaagaaaaagtagagaaggattatagaaataagattggttttatgtgataattattagagtttggagatgggtacgtagggttatcgtgttgttttttttgtttttatatatgttttgaaagttttgtaatagttaattaaaaaaaaaaaaaatattttggttgagtatttagggaggttaagtggggaggattgtttaaattaagaagtttaagattagtttaggaaatatagggagattttttttcgttatttttaaaaaaaaaaaaaaaaaattgtaaaatttaatttagtgtggtggtatatgtttgtagttttagttatttagtaggttgaggtgagaggtttgtttgagtttgggagtttgaggttgtagtgggacgggattgtattattttattttagtatgggcgatagagtaagattttgttttaaaaaaaaatgaaaatatttgaggtgaagcgagattgtaataataaatttaaaaatataaataaaatataaaggttgggtgcggtggtttacgtttgtaattttagtattttgggaggttaaggtaggtagattacgaggtttggagatggagattattttggttaatatgatgaaattttatttttattaaaaatataaaaaattagttgggtatggtggcgggtgtttgtagttttagttatttgggaggttgaggtaggagaatggcgtgaatttaggaggcggagtttttagtgagttgagattatattattgtattttagtttgggtaatagggcgagattttattttaaaaaaaaaatgaaaataaaaataaataaaatataaaattttgttattagttgtaatatgaagaatatagagaaatgcgtattaaattttttttattggattaatatttttttagggtattttttaaagttaggagatttaaggttgtatgatattttgagtaagtgaggggtggtttttgggtgaatttgaatattaaatatttgtagaattgaaaattttataaagtatttttagagatagaatagtttagatttatgttttttaaagtgtggtttttagatttgttgttttagtattttttggaaatttagtagaaatgtagatttttaggttttaggttagatttattgattagaagttttgggtttggggtttagtaatttgtgtttttataagttttttgggtgatttttttgtgcgtgaaagttcgagaatttttggagttagattgatttaaattttgtttttgtattttagagattttgggtagattagttaatttttttttgtttttgtttttatttttgttagaggatgatagtatttgttttattaagttgttgaaaggataaatgaattgatatatataaagagtattagtttttattattaaaagttttttttttttgagatagagttttgtttttattgtttaggggagtgtagtggtgcgattttggtttatcgtaattttcgttttttaggtttaagtaatttttttgttttagtttttcgagtagttgggattataggtatgcgttattacgttcggttaattttgtatttttagtagagacggggtttttttatgttggttaggttggtttcgaatttttaattttaggtgatttattcgtttcggttttttaaagtgttgggattataggcgtgagttattatgtttggtttaaaagttttaattttttaattttttaaataaaataaataaaattagaattgtttgtttttttttagttattttggtgattgtattgagtattttttggggtgtgtgttttttgttgtaatgattattggtttggatgatttgtgatgagattagatgggtaggggtagtggaggagattttagagatatttaggagataaagttagttgtatttgatgaaaagagtggggagttaagattggttgtagatgtatgatttggtatagagaggtgttagtttttgaggtgagagatagaaggggagggataggttgtgaggatgaatgaataatgatatgtttattttgggtttggagttaaggggtttatgatatgtttaggggaagtagagagtattaattatttattgttgtataatagttattttaaatttagtggtttaaaatagtaattttttaatttatttatgattatgattttgtggtgtaataattgggttgggtttagttgggtagtttttttgttagttttatttagggttatttatgtatttgtagtttggggtgggatggttttagatgattttatttatatgtttggtaattggtgatttattgggggttattattgtaataatcgtttattaggtagagtttttttaaggttattaaattgggagattattttgggttttgtgttgtggatattatttagttttttatttttattttatattttttaaaggtagagagaggggttattagaagatagaggagtttttttagtgatatgtaaatattttaaattttggtattttttatattgtagttttggtttgtttttttgggaaatttttgtttttttttttaggttgttggaggggtgagagtcgtcggtagagtagaggttgtgggcgaggaggtggcggttttttgaggttgtagtggtttttttaggtagtagtgggagtatagggtggaggttaattttagagtttgggggagtgaagttggttttgtttttagagtttttggtgttgaagtttttgtaggttagagggaggggtaagagtgggagggggtgtagatttagaattatagaggtagttgatcggaggaggtagttgtttaaggggatggatttagaaggttaaagtgttgttatttaaacgaattttttgtaagtggtttttttgtaataggtttgggggagagtagttttgtttaaagttatatcgttaattagcggtcggtacggggtaatagttattaatatttattacgtatttaatgttgggtaaagtgatttgtatgagttagcgagtttaatgtttatggtaattttttgagtagttggtattgttttattttaattttatagtttaggaagttgggatatagaggaagagttaggttttgaatattgataatttgattgagagatttatattgtttattatcgttacgttatatatgttgtatagaaaggtaggatggtataatggttaaatttaggtaggtagggtttgaatttttttgttattatttattagttttgtgatttggattagttatagtatttttttgtgtttttttttttttttttttaaaatggggataataaatcgtattttttatttgaggttgttgtgggttaagtttgtaaggtacgtagaatagtgtttggaacgtggggtattgtttatttgtgtgtttgttgttataataatggtgagtattgttttatttttcgttgttgaattattaggttagatttttttttgtaagttatgaggtttttataaattttttttgaaggtttttcgtagaatgtataatttttttttgggtttaggtatgggcgttcgggtaggatatttattttttattatttttgaatattttagagtttattagtttattaaattagtagttgatgtgagtgtagagtagattgtgagaggtggaggttgatattagtgaggatgttttaagttgggatttagttttgaagcgggagtttagataatggacgggtggaaatgggtttggagtttaagagaggtgggaggatgagggggtagggggaggagaagtttgaaattaaatgttattttttgattagtttggggtgtatgagttttgttaatagtttatggaaattgttgttttaattttattttgttggttgaggtataattttttttttagggatagtgtagagttttggggaggaaggttttgagcgtatatatttggaattagggaatcgggattaggggtagtagttgtgttcgataaagtttttatttaggattttttgatttttttatttttttttttttttgagtcggagttttattttgttatttaggttggagtatagtggtgcgatttcggtttattgtaattttagttttttgggtttaagcgatttttttgttttagttttttgagtagttgggattataggtatgcgttattatgttaggttaattttgtatttttagtagagacgggattttattatgttggttaggttggttttaaatttttgattttaagtgatttgtttattttagttttttaaagtgttaggattataggtataagttattgtgttcggtttttttttttttttttttttttttttttaaaaaaagggtttttttttgtcgtttaggttgttggagtatagtgatgtgatcgtggtttattgtagttttaattttttaggtataagttatttttttattttatttttttgagtagttgggattataggtatttgttattacgtttaagtaattttgtattttttgtagagataaggttttgttatgttgtttaggttggttttgaattttttagtttaagtaattttttttttttggttttttaaagtgttgggattataggtgtgagttattatatttggtttgattttttaatttttagggttttaattttgtttttatttaggtaatttttttttttttattttttattaatttttttggaatattttagagttgtaaaagttttagagagtattaagtttaatttttatgtgttatagatagggaaattgaggtttaaagagggtaatggatttgtttaagatcgtttagtgaggtgagagaagaaagagttagagatagtttagtttgtgtaaggatatagttttaggtatttagagttgcgttttgttgtcggtatgtttggggtttggtagttagtttattgttgaattattaggttagattttttttttttaagttgtggggtttttataaattttttttgaaggttttttttataatgtataatttttttttgggttcggttatgagcgttttttataggttttttttggtttttttttgtaaaatgagaggaaaatggaagaattgttttatttatggaatttttaataagtttggattttatgtatatagtattgttataaaatggtagatgtattttaataatcgtgtttaataaaaggttggatttgtatatttgaagtggggtatgtagtttttaattgaatataagttttattgtttttatatgtgtattgtatttttatatatatattttttgtttggtttttgagggaatttgagtaattttaagaggaatttttgtagaaaatgttttttggttatatatttttatttttaaggatgtaagtaggagatagaaatattttttgtatttttttttttgttgttagaagaagtgtaaagagttgaattttttttaatgtttattttttatttacgttttaaatttttaggtttcgtggaggtttttgggggttttttatattttggtggtgttaggttgatttggaaatgttagtgtttttttttgttttttttggtagattttgggtgtgtgtacgttttaatggaagtgaatttaaatgtattttataaattaaagattttttttgagattttggagagttttagtaatgagagttttttattgttattaaagttagggttggagattagtggtaggtgagtttttattgttgtgattgttatgatgatgttgatgaatagttattatttattgagtgttttttatgtgttaggtattgtattaaatattatttttttcggatgttttagaaattttttaggtggttttaattatttttattttgttgataaggaaagtaagtaatttagaagattatagggttatgaagttgaaatacgtaaattgatattttattttatttatttatttatttatttattttgagatagagttttattgtgtcgtttaggttggagtgtagtggtgcggttttagtttattgtaattttcgttttttgggtttaagcgatttttttgttttagtttttcgagtagttgggattataggtgttcgttattatatttagttaatttttttgtaattttagtagagacggggttttattatgttggttaggttagtttcgaattgttgattttatgatttgtttattttatttttttaaattggtatttttatatgtttaaaagagttaattggtggtaatttagtgaggtttaatttaataggaaatgatagagttgggatcgaatagagttatgtgaatttaaaatttatgtttttttttttattttttcgaaaaatattgtttaggttgggtacggtggtttatgtttgtaattttagtattttgggagacggaggtgggtggattatatgaggttaggagttcgagattagtttggttaaaaattagttaggcgtggtggtgcgcgtttgtggtttttattgaagtataggaggttgaagtataagaattatttgaattcgggaggtagaggttgtagtaaatcgagatcgtattattgtattttaatttgggtaatagagagattttgtttcgaaaaaaaaaaaattgtttatatgttggttgtagaaaatttaaatattaaaattaaaaaagtaaaatattttttaaagttagagataatatttatgatgggaaaaaaaaaattttttaagatttttttttttttagttatttatttatgtgcgaaaatagttggtgattattgataagaagagggagggtagatggtgtggtagtttaaggtataggttttagtagattatttaggtttaaattttggttgtaggttaggttttgtggtttatgtttgtaattttattattttgggaaatcgaggtgggtagattatttgaggttaggagtttgagattagtttggttaatatagtgaaattttttttttattaaaaatataaaaattagtcgggtacggtggtgggtatttgtaattttagttatttgggaggttgatgtaggagaattatttgaatttaggaggtagaggttgtagtgagttaagatttcgttattgtattttagtttgggtgataagagtgaaattttattttaaaattaaaaaaaaaaaattttagttttatttatcggggtaagttatataacgtttttgtgttttggtttttatatttgtaaaatggtgatagtaatagtatttatgttaaagtgtggttgtgagaacgaaataagatagtttatgtaaagtgattaaaatagcgtaggtatatggtaaacgtttaggaaatgtaggttgttataaagtttagagatgttaagtaattagattaagattatatagttagagagtgttatagttttgatttgaatttaaatttgtttcgttttggagtttaagttgttaatttttttttaaaattggaattaaattaaagtgtttatttttcgttttgttgggtttttttttgtttttaggtgtattttttttatttatttgttatagtagtttttgtttagggtttgagattgggaaaggtgagggttatttaggtggttttgatgttttttgttagttagtttattaggtttttcgtagtaggcggtaaagggagggaggtttgttgtgaagattatgtggtttttaataataagagtattgggtttatttttgtttttttttttttgtgtgttttgggataagttatttggtttttgtggttttatttttttatgtgtttagttagggggttggtttttatatgtaataatagtagtaatgatttttattgagtgtttatgtgtattaagtacgtgtattttatatttgtttttattattaggtttaataatagaataattgttatatttattgagtatttattatgggttaggttttgttttaagtgtttaattagttttagtttttttaatttttattttatttttatacggtatgttatgttatttttattatttagttgagaatattgaggtttaaagaggtaaagtaatttgattaaatatttgtaaacgattttgtatgttttttttagttgttatttagtaagattttaattttatattattttaaatttcgtttgtttttttttttttttttttattatttttttatcgagtagt

SEQ ID NO: 1590 - DNA, 16918 bp, Artificial Sequence
  chemically treated genomic DNA (Homo sapiens)
attgttcggtggggagatggtgagaaggaggagggggaagtagacgagatttagggtggtatgaaattagagttttattaaatggtagttggaaggggtatgtaagatcgtttataagtatttggttaagttattttgtttttttgagttttaatgtttttaattgaataatggggataatataatatgtcgtgtggggataaggtaaggattagaggagttaaagttaattaagtatttagggtagggtttggtttataatgagtgtttagtaaatgtggtaattattttattattaaatttaataataagaataagtgtaaagtatacgtgtttgatgtatatggatatttagtaaaggttattgttgttgttattgtatatgagggttaattttttggttgggtatatgagaaaataaagttatagaagttaagtgatttgttttaggatatatagaaaagagagggtagagataggtttagtgtttttgttgttgggaattatataatttttatagtaaatttttttttttttgtcgtttgttgcgagggatttggtgagttggttggtagaaaatattagggttatttgggtagtttttattttttttagttttagattttgagtagaggttgttgtggtaggtgagtggaagagatgtatttgagggtagggaggggtttagtaaagcggagggtgagtattttggtttaattttagttttgaaaaagggttagtagtttgagttttagaacgagataaatttgggtttaaattaagattgtggtattttttaattgtgtggttttgatttagttatttaatatttttgagttttataatagtttatattttttaagcgtttattatgtgtttacgttgttttaattattttatatagattattttgtttcgtttttataattatattttgatatgggtgttgttattgttattattttatagatatgaaaattaaggtatagaggcgttatgtaatttgtttcggtgggtagagttaagattttttttttttaattttgagatagagttttatttttgttatttaggttggagtatagtggcgagattttggtttattgtaatttttgttttttgggtttaagtgatttttttgtattagttttttaagtagttgggattataggtgtttattatcgtgttcggttaatttttgtatttttaatagagaaggggttttattatgttggttaagttggttttaaatttttgattttaagtgatttgtttatttcggttttttaaagtgatgggattatagatatgagttatagggtttggtttatagttaagatttaaatttagataatttgttggagtttgtgttttggattattatattatttgttttttttttttttattaataattattaattgttttcgtatatgaataaatgattggagagagagaaattttgaagaatttttttttttttattatgaatattgtttttaattttgggagatgttttatttttttagttttagtgtttaaattttttgtaattagtatgtagataattttttttttttcgagatagagtttttttgttatttaggttggagtgtagtggtgcgatttcggtttgttgtaatttttgtttttcgggtttaagtgatttttgtgttttagttttttgtgttttagtgggaattataggcgcgtattattacgtttggttaatttttggttaagttggtttcgaatttttgattttatgtaatttatttattttcgttttttaaagtgttgggattataggtatgagttatcgtgtttagtttagataatgtttttcgaaaaggtggaaggggaagtataggttttgagtttatatagttttgttcgattttagttttattattttttattagattaaattttattaaattgttattagttgatttttttggatatataaaaatattaatttaggaggatgaggtgggtagattatgaggttagtagttcgagattagtttggttaatatggtgaaatttcgtttttattaaaattataaaaaaattagttggatgtggtggcgggtatttgtaattttagttattcgggaggttgaggtaggagaatcgtttgaatttaggaggcggaggttgtagtgagttgagatcgtattattgtattttagtttgggcgatatagtgagattttgttttaaaataaataaataaataaataaataaaataaaatattaatttacgtgttttaattttatagttttgtggttttttaagttgtttattttttttattaatagaataagggtaattagagttatttgagaggtttttgggatattcgaaggaaataatgtttagtatagtgtttagtatatggagaatatttaataaatagtggttgtttattaatattattatgataattatagtaataggaatttatttgttattggtttttagttttggttttgataataatgagaagtttttattattggaattttttaaagttttagaaaaagtttttgatttataaagtatatttaaatttatttttattgaaacgtatatatatttagggtttgttagagaggataagggaggatattgatatttttaaattaatttgatattattaggatataggagatttttaaggatttttacgggatttggggatttggggcgtgggtgagaagtgggtattaggaaggatttaattttttgtattttttttgatagtaaggagggaggtgtagggaatgtttttattttttgtttgtatttttaggaatgggggtgtgtgattaggggatattttttataggggttttttttgggattatttaaatttttttaggagttaagtaggaaatatgtatatgaaggtgtagtgtatatgtgggagtagtgaggtttgtgtttagttggagattgtatgttttattttagatatgtaaatttaattttttattaaatacgattgttaaagtgtatttgttattttgtagtaatgttatatgtatagggtttagatttattgaagattttatgagtagagtaatttttttattttttttttattttatagaaggggattagagagagtttgtgaggggcgtttatgatcgggtttagaggagaattgtatattgtaaggaagatttttaggaaaagtttatgaaagttttataatttggagaaagaaaatttaatttggtagtttagtagtgaattaattattaggttttaaatatgtcggtagtagagcgtagttttgaatgtttggaattatgtttttgtataggttaggttgtttttagttttttttttttttattttattaagcgattttaggtaagtttattattttttttaggttttagtttttttgtttgtaatatataggagttggatttgatattttttaaggtttttatagttttggaatattttaaagaagttagtggaagatggggagaggagagttgtttggataagggtagagttggggttttaaagattaggaagttagattaggtgtggtggtttatatttgtaattttagtattttgggaggttaaggaaggaggattgtttgagttgaggagtttaagattagtttaggtaatatagtaagattttgtttttataaaaaatataaaattatttgggcgtggtggtaagtgtttgtagttttagttatttaggagggtgaggtgggaggatggtttgtgtttagaaggttaaggttgtagtgagttacgattatattattatattttagtagtttaggcgatagagggagattttttttttaaaaaaaaaaaaaaaaaaaaaaaaaaaggtcgggtatagtggtttatgtttgtaattttagtattttgggaggttgaggtgggtagattatttgaagttaggagtttgagattagtttggttaatatggtgaaatttcgtttttattaaaaatataaaattagtttggtatggtggcgtatgtttgtaattttagttatttaggaggttgaggtaggagaatcgtttgaatttagaaggttgaggttgtagtgagtcgagatcgtattattgtattttagtttggatgatagagtgagatttcggtttaaaaaaaaagagagatgaggaagttagaggattttgggtgggggttttatcgggtatagttgttgtttttgatttcgattttttgattttaggtatatgcgtttagggtttttttttttaaggttttatattgtttttgagagaggaattgtgttttagttaataagatgaaattagggtagtagtttttatgagttgttgatagagtttatgtattttaaattggttaggaaataatatttgattttaggttttttttttttttgtttttttatttttttattttttttgggttttaggtttatttttattcgtttattatttgggttttcgttttagggttgggttttagtttggagtatttttattggtattagtttttattttttatagtttgttttgtatttatattagttgttggtttgataagttgatgggttttaaggtgtttaggggtgataagaagtggatgttttattcgggcgtttatgtttgggtttagaggggaattgtatattttacggaaagtttttaggaaaagtttatgaaagttttatgatttgtagaaagaagtttaatttggtagtttagtagcgagagataaggtaatatttattattgttgtaatagtaggtatatagatagatagtattttacgttttaggtattgttttacgtgttttatagatttagtttataatagttttaggtaggaggtacgatttattatttttattttagagagggggaaagggaggtatagagaggtgttataattagtttaagttatagagttagtaaatggtagtaggaggatttaaattttatttatttaggtttaattattatgttattttgtttttttatatagtatatatagcgtaacggtgatgaatagtgtgggttttttaattaggttgttagtgtttagagtttggttttttttttgtgttttagttttttgagttgtaaaattgagatgaaataatgttagttgtttagaggattgttatgagtattgagttcgttggtttatgtaagttattttgtttagtattgggtacgtagtgagtgttagtaattgttatttcgtgtcggtcgttgattagcggtgtgattttaggtaagattgtttttttttaggtttgttgtaaagagattatttgtaaagagttcgtttggataatagtattttggttttttgagtttatttttttgggtagttgtttttttcggttagttgtttttgtgattttggatttgtatttttttttatttttgtttttttttttggtttgtagaaattttagtattaagagttttgaaggtagaattagttttatttttttaggttttagggttgatttttattttgtgtttttattgttgtttggaaagattattgtagttttaggaggtcgttattttttcgtttatagtttttattttatcggcgatttttatttttttagtagtttgggaagaaaaatagagattttttaaaggggtagattaaagttgtagtgtggaaggtgttagggtttggagtgtttatatgttattgggaaaatttttttgttttttagtagtttttttttttgtttttgaggagtatggggtggggatgggggattgagtggtatttatagtataggatttaggatagttttttagtttggtagttttagggaagttttgtttggtaggcgattgttatagtaatggtttttagtgaattattaattgttaaatatgtgaatgaggttatttgaggttattttattttaaattgtagatgtatgaatgattttgggtgaaattaatagaagaattgtttagttgaatttagtttagttgttgtattatagaattatgattatgagtaaattaaaaggttgttattttaagttattaagtttggggtggttgttatgtagtaataggtaattgatattttttgttttttttaagtatattataggttttttaattttaagtttagaatgaatatattattgtttatttatttttataatttgtttttttttttttgttttttattttaggaattggtatttttttatgttaaattatatatttgtagttagttttaattttttattttttttattaagtatagttgattttattttttaaatatttttagaattttttttattgtttttgtttatttggttttattataggttatttagattagtagttattatagtaaagaatatatattttagaaaatgtttaatataattattagggtagttggaagaaaataagtaattttagttttatttattttatttaaaaaattaagaaattaaagtttttgggttaggtatggtggtttacgtttgtaattttagtattttgggaggtcgaggcgggtggattatttgaggttgggagttcgagattagtttgattaatatggagaaatttcgtttttattaaaaatataaaattagtcgggcgtggtggcgtatgtttgtaattttagttattcgggaggttgaggtaggagaattatttgaatttgggaggcggaggttgcggtgagttaagatcgtattattgtatttttttgggtaataagagtaaaattttgttttaaaaaaaaaaagtttttgataataaaagttaatattttttatgtgtgttaatttatttatttttttaataatttaatgaaataagtattattattttttgatagaagtagaaatagaggtagaaagaggttgattaatttgtttaaggtttttaagatatagaggtaagatttgaattagtttagttttaggaattttcgaatttttacgtatagaagaattatttagagggtttgtgaaaatatagattgttgggttttaggtttagagtttttgattagtaggtttggtttagggtttgagaatttgtatttttattaaatttttaggagatgttgaggtagtaggtttggggattatattttgagaaatatggatttaggttattttatttttaaaggtattttgtgaagtttttaattttgtaaatatttaatatttagatttatttagaagttattttttatttgtttaggatgttatatagttttgagttttttagttttggaaggtgttttaagggaatattggtttaatgagaaggatttgatacgtatttttttatattttttatgttgtaattaatggtagggttttatgttttatttatttttatttttattttttttttgagatggagtttcgttttgttgtttaggttggagtgtagtggtgtaattttagtttattgaaagtttcgttttttgggtttacgttatttttttgttttagttttttaagtagttgggattataggtattcgttattatatttagttaattttttgtatttttagtagagatggggttttattatgttagttaggatggtttttatttttagatttcgtgatttgtttgttttggttttttaaagtgttgggattataggcgtgagttatcgtatttagtttttatgttttatttatatttttaaatttgttattatagtttcgttttattttaaatatttttatttttttttgagatagggttttgttttgtcgtttatgttggagtgaagtggtataatttcgttttattgtagttttaagtttttaggtttaagtaagttttttattttagtttattgagtagttgggattataggtatgtgttattatattgggttaaattttatagttttttttttttttttttagagatggcgggggggggtttttttatgttttttaggttggttttgaattttttggtttaagtaattttttttatttggtttttttaagtgtttagttagggtgttttttttttttttaattaattattatagaatttttaaagtatatatgaaaatagagagaatagtacgatgattttacgtgtttatttttaaattttgatgattgttatatgagattaattttgtttttataatttttttttatttttttttttttttggtatgaaagtaaattttagatattatgttattttaatgtgtttttttaatagatagagttttaaaaaataaaaataaaaaaaaaatttattatgtttttattatatttaataaaattaataataatttttgtatatcgtaagatatttatgttatatttagattttttgattgttttaaaatgtttttttagaattggtaggtttgaataatttattatagtttattaggattgaatttaattaagtggattgatagattaagttatttaagtttaatttaataaatttttataaaatgaagtaatggtttaattaattcgtgtagaaaaatatagattggaagtagagaaataatggtagttaagtgaataaaaaggaaaggtagagtgaaatttttttttgtataagttgttagttatattcgagatttaaaaaatgtcgatttaattagatttgataagttaattaagataattttaaattattaagaagattttgaggagtgaatttttatttattatcgttaattgtagtaatggattttgtttggagattgatattattatgattagtaatttgaaaatattatatattttattttgattttttttaatttttttaatttgtatgtatttattataatatataaaatatattaatgtagtaatatttaaagtgtaatatataattatggtatatgtttaaaaaatggtgtgtatattattagaaggttgaagttttcgggttaatattatattatagtttttacgttggttttgtgttttaagttatgtttttttttttgtgtttaatattagttttggtatggtattcgttatgatttaaatttaaatttgtcgcgtttttgtttattattcggattttagattgaagttaaatttcgtatgtagtttagtgagtttattatttattgtttttttgtttatttttatttattattattattttttttagatagagttttattttgttatttaggttggagtgtagtggcgtatttttagtttagttatttttattttttgggtttaagtaattttttttttttagttttttaagtagttgggattataggtacgtgttattatattcggttaatttttgtatttttagtagagatagggttttattatatgggttaggttggtttcgaatttttgattttaggtgatttgttcgttttggttttttaaagtgtttgggattataggtatgagttattatatttagtttttgtttttttttttgttttttgttgttgttgttgtttttgtttggttttttgagatgaagttttgttttgtcgtttaggttggagtgtaatggttttttaagtagttgggattatagacgtgtgttattatattcggttagtttttataattttagtagagatggggttttgttatgttggttaggttggttttgaatttttaattttaggtgattttttagttttggttttttaaagtgttgggattataggtgttagttatttcgtttagttttttgtttttttttttaggttatagggtaatgtaatgttaagtttaagtttagtttgttttagtgtgtgtatacgtaatggtatttattgtgtttttatttggatgattcgtttttgttttataggtaatttttattgagtttttaagagttggttgggtaggtatttttttttagaagttttttttgatattatcgttttttttgtttgggttgtggatttttttttgagtttttatataaagtgagtttttgaggatattttgtatttacgttagtagtacggtgtaggggtaaagaatatggattttagagttaatttatagggttggaatagtggttgttatatttattgggttatatgataaatgatttaacgttattgtaaaatggggttatgatgtataatggttaagtgtaaggaaattaaatttagggtggttaaatttaaatacgttgtgttattgttagttgagcgattttgggtaaattatttaatatttatatgtttagtttttttatatgaaaaacgaagattataatagtatttattttattgggttattgtgagggtttaatgtaaagtatgtagaatagtgtttggtatatagtaagtgtttataaatattagttttaattattatgtgtttggattttatattggatgttatatatggttgaatgaatggaatgtattgaattgtattggattgaaatgaattaaagtaaattgaaatgaattaaaattgtgttagtttttgtttgtttgttattgaaggtttttttttgggttagtattttaaatggtataagggtttttttttttaagttttatttgttattgttatggtttttaggatgatttttttttgtttttagttaattagtcgtttatattaatttaggaataagtaagtatttaattaggtttaagttttaattttgttttagggatattttttaaggaggttttgtttattattaataatttattagtttattgagatgtttgaaatttattttaatatttttaaaaaagtaaagttatattattgtggatatttgttttatttatagttgttttattatagtttgggaatatttttagttgaatataaaataattattattttatttttttttttagttatattttttggttttggatttatagatagtatgtagattttttagtttttaagtgagaagaaagttggggtcggtgggggtgggggtggggggtagtaataggttgaagtttttaaaagaaaattagtatagatatgagtaagagagttgggtatagtgttttacgtttgtaattttagtattttgggagattgaggttggaggatcgtttgtgtttaggagtttgagattagtttgggaaatatagggagatttatatttttattaaaaaaaaaaaaaaatttagttaggtatggtggtgtttttttgtggttttagttttttgggaggttgaggtgggaagattgtttgagattaggaggttaaggttgtagtgaattatgattatgttattgtattttagtttgggtaatagagtgagattttgttttaaaaagaaataagaaatgagcgagaggttataaaaaggaaataaaattcgaaaatttaataatatgaaattgtttgtataagttagttgtatttgtattttttaaatttataaaaataaaaaaaatttttgttattaaggagagagaaggggaagtagagaagtagagaattatgaagattatttggtagagggaatttgaggaatattaaagaggatgttttttattgtgttgaaaaattaaggtaggttttatagaagagggtatgtttaggttgtttttaaaggaaagtttatattgttgattgaatttcggtgtaatttacggaagaagatgggggaatttttttttcgggattttgtagaaaggaatatttgtgtttttggagaattataggtttttttcgtttttgtttttgttatttgtttttgtgattattgttttaatgaatttttattttgataggatgttacgagttttttttgattttttaaggaagcgttatagtgggtaaaaaaatagaagaggagaatgagagttgtttttagtgttagggcgtagaggggtaggtagcgtcggatagatcgcgggtatttagagtttattttgtgttcgtttttgtgtaggggttttattagtattaggtattatttttttttttaatatttatttgagggtttgagggagcgataggggagatattcgttaaaggttttattttaggttgtaaggttggttgtgttggtttgtttatggagttaatacggaagtagagggattatgatggggaggggaggaaatgtatgttttttaatattgttatttatttaataagttgttgtgtttttgttataggtttttgttgtgtttagtttgaaagagggtattttatttttttgatatttaaatataatttttttttattttgtattttagttatttttagtatatttttgtaagaaaagtaaggaacggattaatatttttattttataaataaggaaattgaagtttagaagaggttttttttttaaaattttattatatgatagagagggtatttagtgagtttttaataataatgtattgaatgagaatgaatgaaagtaaagaatggagttgagttttggggaggatatagataggatttacgtagaattgattttttatagttatatagttgaaattatttatatttgaatttgtatttaaatttatgtgtttttaagtattttaagggggggtggtagaagagaaaggagatgtgggtttggttttagtaaaaatttggaggggattttgatttagttttagggtgaagttgttttatttttggttatttttttatagggtagtttaggattttgtttggggtattatagtgtatttgaggaaggttattagttttagtatttttattttttagtattggatagtttagttttttggtatgagttttacggggtttgggatttagttttaattttgtagttaatttttcggaattgtgtttttatttatgtgtttggtagaaggtttggtatatggtaagtgttaaggaaggaaggaagagagagagggatgtagggagggaggaagggatgaaagaggaagaaaagaaggaaggaattggagtttttttattttttataatggttttagttattggttattgagtgtaaattgaatgtgtggagttttagagaataaagttagggttaggagttatagggaagtggaaggtggaaagtggatattttattgattattatagttgtttattgaaatatttatgaggtagtgagtattttgttattagaggaatgtagaaatgttttgaaaataatttttatgtagattagaggagattttaattatttagtcgaattttgttattttgtttttagattaagaaattaagatttagagaggttatatttaaggttatttagttatttggtatcggttattttttgtttagtgtagttttatttatagaaggaaaaaattgagattaatttaaatgttcgttagtagggggttggttaagaaaattgtaggatatgaaatttgttattaatatgatggttttgaatatatgtaggaaaagtaagaggaaaacgtttttattaaaattgatatagaggatagattgtttagtgaaaaagtaagttatataatagtatgtataatatatttttatttttataaaataatatgttagtatacgtatagaaaaaagttggttgtaaattattaaaatattggttaattttgttttatatatttttagagttaattgttattaagtatttgttaggtattattttaagtattttatatatatgaatttagtttatgatattgggatgggtattattaagtttttattataaatgagtaaattgaggtatagaaaaattaagtgatttgtttaaggttatagggttagtaagtagtagagttgggatttaaatttaggtagtttaattttaggatttgggtgtttgattatttaattgtagtttagattaggggtttttaatttatttggtattagggacgggttttgtagaagataatttttttatggatcggggtgaggttggagggatggtgtggggatgaaattgttttattttagattattaggtattagttagatttttttaaggagtacgtaatttagattttttttatgcgcggtttttaatagggtttgtgtttttgtgagaatttaatgtcgttgttgatttgataggaggcggagtttaggcggtagtgttcgttggtttattttttatgttgtgcggttaggtttttaacgggttatagtttgggggttggggatttttagtttagattatttttaagtttttttttaattttaaaagtttaggaatatgggtttttaagttttttgttattttaatagtaattaagggggagggtattttaatttttagaggttagaagtttttattttttttataattgttttttggttttgatttttgttttatttttggtagttagtattttttataaattgggttttttgagaaggaatttttttgtatagtgggataaagggatgtgatttttgttaatttgggtttagtataagttttgtaaattaggtagttaattgtatttatttattcgagggtattagatgttagtaagatgaatattaaagatttttaggtaatgttaatttttagatttgataggtatgtttattagttggtaaatagcgtgggtggtggttggttttaaggtattttaaatttttgtgcgttttgattttgttttagtaaggaagtagtagggattgattgtttgataagaggatttcgtttttcgtagaatagaaatgtttttattaaaaaagggaggtatttttgtagttggtttttttcgatagatttttcgaaagtagagtttttgttttttttttttgatttttataaaaggttttattttttgattatatttttcgatattttgtttttaaatttttaaggtaggttatttgttatagaaagtataagggatttaggatagataagttaaaaattaaatatagtaaaatgttaattgttgattttagttgtgagatgtatggttttttatcgtataagttttttaattttttttggtagatgtttgaaattttttataataaaatgttgggaaaaaagtattttattgtatttgttgttttttttgtttgaaatattttttttattagatatagatggttttcgacgtacggtggtttgatttaacgttttttaattttatgatggcgcgaaagtaatatatatgtagtggaagtcgtgtttagagtttttattttattatttcgttttttatttttcgtatagtatttagtatattatatgagatatttaatattttattataaaataggttttgtgttagatgattttgtttaatcgtaggttaatgtaagcgttttaagtatgtttaaggtaggtgatattaagttatgatgtttcgtaggttaggtgtattaaatgtatttttgatttataatattttttatttattatggttttattaggatataattttatcgaaagttaaggaataattgtattggtttgttttttattttatttttttggatttgtattttattattttttttttagggaagttttttttgattgtttttttttgttgtgttttttttttagatgaagttttgtttttgttgtttaggttggattgtaatggtataatttcggtttattgtaattttcgttttttaggtttaagcgattttttcgttttagtttttcgagtagttgggattataggtacgcgatattatatttggttagtttttgtagttttagtagagatagggttttattatattggtttggttggttttgaatttttgattttaagtgatttatttgtttcgaatttttaaagtgttgggattataagtgtgagttattgtgtttggtttttgattgttttatttaaaaggatagtattaatttttttttttgttttttttgataagggttttttgtgttttttttttagttttttttatagtatttattagtatttgacgaagtttatatttttatttgtgtatttaggttttttttttagatggagtattttgttatttaggttggaatgtagtggtacgattttggtttattgtaatttttgttttttaggtttaagcgattttttttttttagttttttaagtagttgggattataggtatgagttattatattgcgttaatttttgtatttttagtagtgatagggttttattatgttggttaggttggtttcgaatttttgattttaggtgatttgtttattttggtttcgtaaagtattgggattataggcgtgagttattgcgtttggtcgtgtatttgtttattatttgtttttttttatgagaatttgagtaatataaagatagggatttttgattgttgtggttgttgttgtatttttagtattagggaagtttatagtaggtgtttaataaatatttgttggttgaataatagttattatttttggaatgttaagtacggaattaattattttgtatatgttattttatcggattttttttttaagtttgtgagtgtaggtattattacgtttataaaagaggaaattgttgtttagagaggtggcgtgagtatttaaagttatatagttaataaacggtagaggtgggatttaatttagatttatttgatattatggtttgtgttgttaattattttgtaattttgttttttaagttattaaattatttagttttaatttttttatgagttaagtaagatgtattttggtttttttatagggttattataaacgtgaaaatttgttagtaggtttggtagtttgagttacggaaatgaagttgagtaagtggtgttatgtttacggcgtgttggtttgagtagttaggttttttgtaggtgtggtgaattaagttagggagtttatagtttttacgtgtaattatgatttttttgtaaatattagattttttgagaatatttgttatgttttttt

SEQ ID NO: 1591 - DNA, 7238 bp, Artificial Sequence
  chemically treated genomic DNA (Homo sapiens)
gtgggggattaggagaaagaaagttaaggaagaggaggaggaggaggagaaggaggagaaggatgttgatttagtagttttttttatagtagttttttttttgtagaggttgaagagcgatttgtgttttgtaagttaagtttttaatttatcgaggtaaaggtaaagtttttagtcgggttttcgagggttgggattcgggtgttttaagatggttgtatttagttattttggtttagaaagttttttatatgttagtttggttaatatttatattatgggtttttttggattgttcgatataaggtgtgggtgttggttaggtttgtgtttaaattttagttttgtagaggaattttgattttgtatattttagattttttagtggttagtggggagttagattttttttatagggggtaggaggagttgtttatttatttaataaatgtttattgaatattttttatgggttgtgagtttagaggtagcgatgaataggttaggttggttttgtattttagaaatagatgggaagttagttaataagtagataaatgaggttaggtgtggtggtatgtttgtagatttagttattcgggatgttgaggtaggaggattatttgagtttaggataggaatttaaggttgtagtaagttatgattgcgttattgtattttagtttgggtaatagagtaagatttatttttaaaaaatatttaaaaattgttttaagaagataaatgagatagtcgttgatggtaatgattgtgtaaaaattgaatatggttgggtgtggttgtttatatttataattttagtattttgggaggttgagattatagttttttaagtggtttttaaggtaggaggattatttgagtttgggagttagagaatagtttggataatatagggagagtttaattttataaaaatgaaaataaattagttaggtatggtggtatatattaatggttttagttatttaggggttgaggtggtggatcgtttgagtttaggaggttgaggttgtagtgagttatgattatgtcgttgtattttaatttgagttatagagtgatattttgttttaaaaaataataggttaggtgtggtggtttacgtttgtaattttagtattttgggaggtcgaggcggatggattatttgagattaggagttagagattagtttggttaatatggtaaaattttgtttgtattaaaaatataaaaattagttaggtatggtagtatatgtttgtagttttggttatttgggaggttaaggtaggagaatcgtttgaatttaggaagaggaggttgtagtgagttaagattatattattgtattttagtttgggtgatagagtgagattttgttttaaaatagttaaatttggtgggggtgtttggtgtgtaggatggttaggggtggtttttttaaggatatgagtgtgagcggagatttgaaggagatttaggaagagattaatattgttagtaataaatatattgattatttataagtatttttaataattttattaggtaggtattattattatttttattttatagagtggagaatcgaagtatattttcgggagggcggggtagttggttgtatttaggttgtgtagttttagtttagatgtaagggtgggtggaaaagagttttgtttaatgagggagaatagtgaaattaaggttatagggtttaaagatttacgaattaggtttttatggagaaagtaggtgaggtttattgtatagatgggtgtgtttttattttatattgaggttttttcgtttgagtaaattgaggtttagagaggggaaggaagtaggattattatggtgatttaaagattagttagaatttagtttttttttttcgaggtttttattgttttacgttaggtttgtgtgatttagtttagggtttttttattattttagttaaatttttttttagttatttatattatggtgtgaatggttggttggttttttttgagagttatttttgatgaggggagggaggtatagttaggtttgggaagatgatattttaggaagtttagttgattgtgtgggttatagtttaggttgttattgatttgtaacgggatttgagtaattttgtagagttaggttttagtttttttatttgtaaaatggatatagtagagatggttagagtaggtgatttcgaatgatttttttagtttattatgagtttgtttttttgaataaagagtattttttgtttaaaaaaaaattttttgggtcggatacggtggtttatttttataattttggtattttgggaggtcgaggagggtggatcgtttgagttaggagtttaggattagtttgggtaatatagcgagattttatttttataaaaaatataaaaattagtggtgtgtatttgtggttttagttatttaggaggttgaggtgagaggatcgtttgagtttaggaggtagaggttatagtgagttatgattgtggtattgtattttagtttgggcgatagagattttgttttaaaatttttttttttttcgttaagttttatagaataaagagtattgttattttagtgatggttgttagttttttattattagggttttatgaggttgtaattgtgaaatttataaaggaggaatttgagatagagaggggaagtattgagattatttaggtttatttttttatttattcgtttatttaataaatatttaggagtattttttaggtgttaggttttggagatatattagtgaataaaatagatattattttatttttttttattataggttaagtattatgttggtttttgggaattttgttgtgagtaagatagatttaggtttatttttgtggatttatgttataggtagggagacgggtataaaatataaataaaaagtttttatgttgttagaagtattatgtaaaaagtaagatgttgaggtattgttaagttgtgtgggatgggggtttagttcggttagggaggggttagttgtgggttagttttgatttaaggtatttaggatattttttttttggttatgagggtttacgttagaattaaatttttattttaattttattagcgttgggtataattattaggttaagcgttttaaattacgagaggttttattttattcgttttgttttagttttgttacgtgtgttaaacgttgttagatttaatattatttaggttaggtagggggttggagtttaggtgggttgtagggaagggggtatttttttgagtagatagatttgggaattttgggtgggaagagagatagtgagagagagattaagggatattttttaggtattagggttttgtatttttaggggttttttcgtttggatgttttttttttgaagtttttttttgttgtttcgtttttagtttaagttttagttttttagagaagttttttgtgttgggagtggttgcgattgaattgtttttattgttattcgtttttttatttgtttgtggtttttgtgtttttttattttataaaaatattggttttttgtgagtaggagtttgttttttcgtgtattttgtgtgtttttaaggattaagtattttgtttgggttatagtaggtgtttaatatatatgttggttggatagtggttattgagcggtcgtacgtcgggtatttttagtatttgtataggtcgttttagatattttattttatttttgggaggtgttattatgttgtttggacgacggggagagggggatttgttagtgttggtttttatttttttttagttatttgtttttaaggttttgattatttttttttttacggtatattttgttattttggaatcggttttcgtggggttatttggtatatggtatttgaggttttcgtggttgattaggttttttttaatagtgttttgtttgttgtttttagggttagttttttttttagattggagttttttgaagggttttgttttttttttgttttggtagttttttttattttttttttttttattttatttttgggggtatttgagttatttttttatattagtgatttgtttaagttattgtttatttttttttggataaagttaggtttttcggtttagcgtttaagatttattataattgtttttagtttagattttttttatttagttatttggtaaattgtttttttttttaaaggtttaaatatggttttttagattgtaatttttaggtagttaggttttgtttttataattttatagttattttggacggaatttgtttttttttatatttgagttttttttagtttttgagtttttttgggtagggttgtttttttttatttttgtatttttaggggtttgtaaataaatgtttaatgaacgaataagagagtgaattttaattttatgtaataaggattgggtttttgggttttaggttatgtgtttggtattagaaacggaagttgtaggttgtagtttttgtttttatggagttttttttgttagaggagtgtggggattggatgattttagaggtaatttgtgggggaacgaataggtaaggggttgtgtgacgagatgagagattgggagaataaattagaaagtttttagttgtttagaggatatagtatagaggtttatggtttttattttaaatttaggttattagattgagttgggattttgggatagataagttatgtagaagttaggggatttttttttttttttttttggattttgagtattttttttttttgattttaggtttttttttagtgttattttggttttttttagaagttaattaggtttttagtttttgtagcggggattaatatgattatgaatatttttaattttttagatgttgatttagttaggagtttaggagggggaggttattttataagggtttgggggggttagaatttagagttatttagttggagttttgagtggttgagtttaggttttcgtagtatttttgggtgggagtagttacgggttagttataagggttatagttatgaatggtatagaaggttttaatttttacgtgtttttttttaatgcgacgggtgtggtacgtagttttttcgagtatttatagtattatttggttgagttatggtagttttttatgttggtcgtttatatgtttttgttgatcgtgttgggtttttttattaatttttttacgttttacgttatcgtttagtataagaagttgcgtacgttttttaattatattttgtttaatttagtcgtggttgatttttttatggttttaggtggttttattagtattttttatatttttttgtatggatatttcgttttcgggtttataggatgtaatttggagggtttttttgttattttgggcggtatgagtcgggtgtgggtggggtgtgtaggagttcgggagtatggaggggtttgggagagtttcgggtttggcggtggtggttgagaggttttttttttttttttgttttgttaatgttatttaaagtttttatatatttagttaataaatattatttatggtgatagtcgggttgttgtttgtgtagggttggtattgaatattgttttgattttatttggagtaatatgcgtttgtttaattttatagtaagaaaattgagttgaggtttaaagaagttaagcgttttgttggggcgttatatagggacgggtgtagagttgagttggaagttcgtatttatttcgggttatgtttgtagtattaagtttttgttttttttggagtagttgtgttgagttagatttaggttgggtattgagggagagttgggtaagttagattttttttttttgggggtttaagtttagggtgggaagtggattttttattttttagttattgggttttttttgtgttgggtaatgggttcggttttttttggtattttttgtttttttttttagtttttgtttttaggtgtttttttagtttttttgtcgcgttttaagttttttggtgttgagaatcgtaagtagtcgttttgaagtagtttttttttgttttagaataatgttttgtatttaataggaaaatagatggggtgttgtagggataatagattttatttaatagagaggaaaattgaggtagggagaggggaagagatttatttagggatgtggttaggtagtaataagagtttaggttttttggttgtgatttaggaatatttttgttgagatgtaggaggagacgttagaagtagttattgtaaagttgggtgacggggagagtttatcgttagttataagcgtttttttgttagttttgttttgttttttttatgtttaggttgttgtttcggttttatttttagggaatttttggttattgttgggtgtttgttgtatttaataattatagattatttagttttggttagaaggtgggtgtgttatttacgggtggttgttttttgtagggttagttttagtttataaatattgttttttttattgttaggaatgttttagtttggttgattaattatatggttattttttttatggaattttatggggtggtgagtaggatagatgtttgaattttattattttttttttttttttttgggtaaaatattgtatattgttttatggtttttaggagaggtttttatatgttcgggttattttatttttcgagaagggagagggaggaaggattgttaattttgggtttttattatttttgtatttttttttaataaggaattttgttttatattaggatgtatttttttgttaaatatatatatatatatatatatatataatatatatatatatatatatatatatatatatataaaattttttatcgggtttttagtttaattttgattttttgatttgattcgtgttttttatgggtttagagcgttaagtaaataattttttttattttttggaatttttttgtttagttttttttagcgtgtggtttttttgttttttttttttttttttagtattaagttttttttttttttaaggtttttttaaattttttttttatttttggttgtttttttagttattttttttttgtttaggggggagtgtattttttttaggtagtggggtttgtgttgatcgtttgttgattgttttgtagg

SEQ ID NO: 1592 - DNA, 7238 bp, Artificial Sequence
  chemically treated genomic DNA (Homo sapiens)
tttgtaaggtagttagtaggcggttagtatagattttattgtttaaggagggtgtatttttttttagatagggagagggtagttaggaaggtaattaggagtgggagagggatttgaggaggttttggggaaggagagagtttggtgttgggaggagggggaaggggtagagggattatacgttgaggagagttgggtaaagaaattttagggaatgggggaagttatttgtttagcgttttgggtttataagggatacgaattagattagggggttaggattgaattgggaattcggtagggagttttgtgtgtgtgtgtgtgtgtgtgtgtgtgtgtgtgttgtgtgtgtgtgtgtgtgtgtgtgtgtttagtagaagaatgtattttaatgtggggtagagttttttgttgggaaggaatgtagaggtggtggaaatttagaattggtagtttttttttttttttttttttcgggaaatgaaataattcggatatgtgggggttttttttaggagttatgaagtaatgtgtaatgttttgtttagaggaagaagaaggaaatgatggaatttagatatttgttttgtttattattttatgaagttttatagggagagtggttatatagttaattaattaaattgggatatttttaatagtgaaagggataatatttgtaaattgggattgattttgtagagaataattattcgtaagtggtatatttattttttggttagaattgagtgatttgtgattattgaatgtaataaatatttaataatggttagagattttttgagaatgggatcgaggtagtagtttggatatgggggagatagggtaaggttggtagagagacgtttgtggttggcggtaagtttttttcgttatttagttttgtaatggttgtttttagcgtttttttttgtattttagtagagatatttttggattatagttaggagatttaggtttttgttgttgtttggttatatttttaaatgagtttttttttttttttttgttttagtttttttttttgttaagtgggatttgttatttttgtagtattttatttgtttttttgttaaatgtaagatattattttaaagtaaaaaggaattgttttagagcggttgtttgcggtttttaatattaggagatttggaacgcggtagggaggttggaggggtatttgaggataggggttgagaggggaggtagaggatgttagaggggatcgagtttattgtttagtatagggaagatttaatgattggagaatggaaaatttattttttattttgagtttgggtttttagagaggaggggtttggtttgtttagtttttttttagtgtttagtttgggtttgatttagtatagttgttttaagggaaatagaggtttggtgttgtaaatatggttcgagatagatgcgggtttttaatttaattttgtattcgtttttgtgtgacgttttagtagggcgtttgatttttttgagttttagtttagtttttttgttgtgaaattagataagcgtatattgttttaaataagattaaggtagtgtttagtgttagttttgtataaatagtagttcggttattattatgaatggtgtttgttgattgaatatatgagggttttggataatattgataggataggagaagggagaaggttttttagttattatcgttaagttcgggatttttttagatttttttatgttttcgggtttttgtatattttatttatattcggtttatatcgtttagggtggtaaagaagttttttaaattgtattttgtgggttcgaagacgaagtatttatgtagagaggtgtagagggtgttggtgaagttatttaggattatgaagaggttagttacggttaggttgagtaggatgtagttgagaggcgtgcgtagttttttgtgttggacggtgacgtagagcgtgaggaagttgatggggaagtttagtacgattagtagaaatatgtaggcggttagtatggagaattgttatggtttagttaggtagtattgtgggtattcgaaggggttgcgtattatattcgtcgtattggagaagggtacgtagaagttagggttttttgtgttatttatggttgtggtttttgtggttgattcgtggttgtttttatttaagaatgttgcgaaggtttgagtttagttatttagggttttagttggatgattttgggttttgatttttttagatttttataaagtgattttttttttttaagtttttggttgaattagtatttgggagattgggggtgtttataattatattaattttcgttgtagaaattgagggtttaattggtttttaagaggggttaaggtgatattaggaggaagtttgaggttagggaggagaggtatttaggatttaggaaaagggaggagaaggttttttaatttttgtatgatttgtttgttttaaggttttagtttagtttggtggtttgggtttgaaatagggattatgggtttttgtgttatgttttttggatagttagagattttttggtttatttttttagttttttatttcgttatatagttttttatttgttcgtttttttataagttatttttggagttatttagtttttatatttttttgataggaggagttttatgagggtaggggttgtaatttgtagttttcgtttttggtgttagatatatagtttagggtttaggagtttaatttttgttgtatggaattggaatttatttttttgttcgtttattaaatatttatttgtaggtttttgggaatataaagatggaaagaaatagttttgtttagaggagtttaggggttgaggaggatttaaatgtgggaagaagtagatttcgtttagggtggttgtgaggttgtggagatagggtttgattgtttgggggttgtagtttgggaggttatgtttgggtttttgagagaaggagtagtttgttaggtggttaggtggggaagatttgggttgggggtagttgtaatgggttttgaacgttaggtcggggaatttggttttatttagaggaaagtgagtagtggtttgggtagattattggtgtagaaaggtgatttaaatgtttttaaagatggagtggagggagggaggatggagggggttattagagtaggggaggggtagaattttttaggggattttagtttgaaggggaggttggttttggaggtagtagatagggtattgttgggggaggtttaattagttacgagggttttaaatgttatgtattaggtggttttacgagggtcgattttagaatagtaggatgtatcgtgagaaagaaagtagttagagttttgggggtagatgattgggggaaaatggaggttaatattggtaggttttttttttttcgtcgtttaagtaatatgatgatattttttaggaatgaagtggggtgtttggggcggtttgtgtaagtgttgagagtgttcgacgtgcggtcgtttagtgattattgtttagttaatatgtgtattgagtatttattgtggtttagataaggtgtttggtttttggggatatatagggtatacgaaagagtaagtttttgtttataagaagttagtgtttttgtggggtgagggggtatagggattataaataaatagaagagcgaataatagtagggatagtttagtcgtagttatttttaatataggaggtttttttgagaagttggagtttgagttgagaacggaataataggaggaagttttaggggaaggatatttaggcggaaggatttttgagagtgtaaagttttgatgtttgggaaatattttttaattttttttttattgtttttttttttatttaggatttttagatttgtttgtttagaagagtgtttttttttttgtagtttatttgggttttagttttttatttggtttgggtggtgttgggtttaatagcgtttggtatacgtggtagggttaaggtagggcgggtgggatggggtttttcgtagtttaaggcgtttggtttggtgattatgtttaacgttaatgaggttaaggtgagggtttgattttgacgtggatttttatggttagaaggagggtgttttggatgttttgggttaagattgatttataattggtttttttttggtcgggttgagtttttattttatatagtttagtagtattttagtattttgttttttgtatagtgtttttgatagtatggaagttttttatttgtgttttgtgttcgtttttttgtttgtaatatgagtttataagggtaagtttgggtttgttttgtttataatagggtttttagagattagtatggtgtttggtttgtagtggaaagaggtgggatgatgtttgttttgtttattgatgtgtttttagggtttggtatttagaaggtgtttttgaatatttgttgaatgaacgagtgagtgggggaatggatttagatgattttagtattttttttttttgttttaggttttttttttgtgagttttataattgtaattttatggagttttggtgatggggaattaatagttattattgaggtgatagtgttttttattttgtaaagtttgacgaagaaaaaaaaagttttgagataaggtttttgtcgtttaggttggagtgtagtgttataattatagtttattgtagtttttgttttttgggtttaagcgatttttttattttagttttttgagtagttgggattataagtgtatattattagtttttgtattttttgtaggggtggagtttcgttatgttgtttaggttggttttgaatttttggtttaagcgatttatttttttcggttttttaaagtgttaggattataggagtgaattatcgtgttcggtttaagaaatttttttttaaataaaaaatgttttttgtttaggaaaatagatttatagtgagttggaagggttattcgaagttatttattttgattatttttgttatatttattttgtagatgaaaagattgaggtttagttttgtagagttgtttaggtttcgttataaattagtgatagtttgggttataatttatatagttaattgggttttttggggtattatttttttaaatttggttatgtttttttttttttattaaagatagtttttaggaaagattagttagttatttatattatggtataaatgattaaagaaaggtttagttggggtaatggaaaggttttagattgagttatataggtttggcgtggggtagtggaagtttcgaggagaggaggttggattttagttggtttttgagttattatggtagttttgttttttttttttttttgggttttagtttgtttagacgaggaagttttagtgtggggtaggggtatatttatttatatagtaaattttatttgttttttttatgagagtttggttcgtgaatttttagattttatggttttggttttattgtttttttttattgggtaaggtttttttttatttatttttatatttggattgaggttatatagtttgggtgtagttagttatttcgttttttcgagagtgtgtttcggttttttattttgtaaaatgggaatgataatagtgtttatttaataggattattgggagtgtttgtaagtgattaatatatttgttgttgatagtattaatttttttttgagttttttttaggttttcgtttatatttatgtttttggagagattatttttgattattttatatattaggtatttttattaggtttagttgttttgagatagggttttattttgttatttaagttggagtgtagtggtgtgattttggtttattgtaattttttttttttgggtttaagcgatttttttgttttagttttttaagtaattaggattataggtatgtattgttatgtttggttaatttttatatttttagtatagataggattttgttatgttagttaggttggtttttaatttttgattttaagtgatttattcgtttcggttttttaaagtgttggggttataggcgtgagttattatatttggtttattgttttttgagatagggtattattttgtgatttaggttggagtgtagcggtatgattatggtttattgtagttttaattttttgggtttaagcggtttattattttaatttttgagtagttgggattattggtgtgtgttattatgtttggttaatttatttttatttttgtagagttgggttttttttatattgtttaagttgttttttaatttttaggtttaagtgatttttttgttttgggagttatttgggaggttgtaattttagttttttaaagtgttgagattataggtgtgagtaattatatttagttatgtttagtttttatatagttattattattagcgattattttatttgtttttttaaaataatttttaaatgttttttagagatgagttttgttttgttgtttaggttggagtgtagtggcgtaattatagtttattgtagttttgaatttttgttttaggtttaagtgatttttttattttagtatttcgagtaattgggtttataggtatgttattatatttggttttatttgtttatttattgattgattttttatttatttttagaatgtaggattagtttggtttgtttatcgttgtttttgagtttataatttataggaggtgtttaataaatatttgttgaatgaatgaataattttttttgttttttatgaagagggtttaattttttattgattattgaggaatttggggtatgtagggttaaagtttttttgtagagttgggatttgaatataggtttggttagtatttatattttgtgtcgggtagtttagagaaatttatggtgtgggtgttggttaagttggtatgtggggggttttttaagttaagatggttggatgtagttattttggggtattcgagttttagttttcgggagttcggttaggggttttgtttttgtttcggtggattaggggtttagtttgtagggtataaatcgttttttagtttttgtaagagaggagttgttgtgagaggagttgttaggttagtattttttttttttttttttttttttttttttttttttttggtttttttttttttggttttttat

SEQ ID NO: 1593 - DNA, 6254 bp, Artificial Sequence
  chemically treated genomic DNA (Homo sapiens)
ttttatatttttttttgtttttatgatttttgtagtgtgatattgtagttttttttattgaagattattaaggttaaagttatttttattttatttaaagtttaagttggttatatgatttgttttggttagtagaaagtggtgaaagtgatagtagattagttttgagtttaggttttaagcggttttttttgttattatttgtttttttatttgttattgttaggggaataagttttggttggtttgttggagaggagaggtatagtagagttaaataattttatttattttagttagtatttagatagtaaggtaaattttagttatgaaagtaaattaagatatattgtagatatatttagttaattattcgagaaatttatttttgtgtgatattgaggtttgttgtttggtttttatgttataatgttagtaatagataggtgatgatttttaatttatttttttatattttatatatattaatttattatgtgttttataatttttatttataaaatatattttaaattttttaattttttttttatatgtattgttttattgtaatttaagtattattattattttatttgaaatgaattgttagtttttttattttttttttagatatttataatttattttttaaatattagtgggagtgatttttttttaaaatataaattagattttttagttatttttttgtttaaagttttgaatatttttttattgtttttagaatttaatttaaattttttattatgatttgtaggttttagttgatttgtttaatattaggatgaaaaagtagtttttataatattttttaaattagtttttttaaagaaatgtggaattagtttttatttagaaatttttgtagaaaggtgttttgttattttaatttatggaatattattttggtaaatatattaaagtatgttaaaataatagttttttaggtagatatagaaattggatataaagatttgattttattaaaagataaaaaattaaggtggggaaggaataaaaggagatgatgaaaagagaagtaataatatattggggattcggtgtattatattgaaattatagaaagataaagttagatttagaaaagaggtttatatttgaggatataggagtaaagaggttaaaattatgttttgaaaggatgtggatatttgatttttaattttatattaatggtagaataagaaaaaaatgggttatttttgaggtaggaagtagtagttagaagattagatatttttaaattttttgagaattgatattaataagtattatttaatatttatatggaatatttttggttaaagaatgtttttgtatattttttttgttttatatttgaggagtttagggtttaatgaaatttaatatatagaaattagtttttattttgaatttttttaagcgtattaatttgatgatttatatggtttacgggtttgtgagtatttttagaatgaattgttatgatttgtatttttaaaagaaatattttttaagaagttgatttttaggatttatacgttgaagtataaaggatattatagacgtaaaataatgtaaaaagtgttaaaattagttgttgtttttaaataatgtggttatagttttagaatattaaaggtagtatagggatatttaagaaaggtatttggtgtagatacgggtattagtaagatcggatttttattttttaggaggtgaatttaaatgtagtttgttaatgtttttttttttaattagtatacgtttttttttcgataaagattttttttttagttttttgtaatgggaggggagaggtgaaaattttaaaaagttgttgggttttgatattagtggaatttttttttaatgaattgatagtgtataggtatgataatatggtttgtagtttttttcgaagagaagagattgttgagaaaataaaatttaataaaaatgttgtaggagaaagtttttttaatatgtttatttttttgtttttttttattttgtatttttttttaagaatgttatttttattttttttttatgttaatattgagtttattttttagatgttaatttatttagtttttttattaggtttttaaatgattataggtttcggggatttttttttttaataaataagtttaaattataattagaatttattttttttgtatttttgaaatattatatatatatatatatatatatatatatatatacggtgtgtattatttgaatgaattgtattagaaattagaaatttatcggtaatttttttttatgttttttatttttttaatatatttattagttttagagttagattaggttttttttgaagtattttttgaattttattattcgtatttattttttagtgtatttgtttataatagttatttttatttgtttgatttgtgtttttttttaatttgttttgtttaaattttttattttagtatattatttataatgtattttaagtcgttttattaaaatgtaaattagattatgttatttttttggataaaatattttagtgatttttttttttttatgataagggtttggatttttgtaaatggtttatgatgttttttttttttttttttttttttttgagatggagtttcgttttgttatttaggttaaagtgtagtggtacgattttagtttattgtaagtttcgttttttgggtttacgttatttttttgttttagtttttcgagtagttagggttacgggtgtttattattatattcggataattttttgtatttttagtagagacggggttttatcgtgttagttaggatggtttcgattttttgatttcgtgatttgtttatttcggttttttaaagggtcgggattataggcgtgagttattgtgtttggtttagtttatgatgttttatataatttggtttatgattatttttagtttagttttatttttagttatttttttattttatgttagtttttagatttttataaataatataagttgtgtttgaatatttttttatttgttttttgattggttaatttttatatatttattttattttagtttagatatttttttttttttttggaggtttttaatgttagtattaatgttttttttgggtggtattatagtattttacggtgacgaggaggaggtggtttagattttttttttttttggtaaagggtggaagtagtgtggatattttatttggtgtgttttgatatttatgtgttattaggtatttgttttttgtgtttttatatttttttttgttgtattttaaagtatttttatagtatatggttttgtttaataaagtatttttatagtaaaaaaaaaagtatggtattgtgtaaataagtgtttattttaaattagtggtatatttattgaagtttaatattgtgtttgtgatatagaagtatttgttttaattttaaataaaaattttatgtttttattgttggtttaagaagatttggattatttttgtattttgaggagaagttttttatttgaaatattttggaaataggttttttaatgtggaaagatagatattaatttttttttttattattttttaagatttaataaaagtgattatattttttaaaatatgatggtagtattttatattattattattttataggtatagggtttttagttgtaaataatggaattaattttaataaagtagaacgtaaatattgtaaatattagagagttaataatttttgggatggttaaaggatggagtttggaggttatttagttagtaataatatttcgggttttattgttgaatggagatattataattgttttggatgggtagagatattatggatgttaagttttaggtgttattattaggatttttattattgtttttaacgggtggagtttattatatgtttatgtttttattgtaaggaaatgaagttattgttgtatattttgggaagtatttggattaattgttatatagttttgttgaagaagatttttagggtaagtagttataattgtatattaaatttaaaattgttaatgagttttttaaaaaaaatgttaaggttgttagttggtatagtatatattttgtttgttttttaaggatttttttgggtagtattttgtttgtgttggtaagtaattgagatttaatgaaagagtattggagatatgaatgaattgatgttgtatatttttagagtgttaaatatatattaatggataagaaggtgaggtagagagtagataggtattagtgataagtaaagatatgtagaattttatttttagtaaattaaaagtttttaatttggttggaagaatattggtattgaatggtattaataaggttgttagagagggttagaggtgtataatgtgtttttataatattttatatttttttaattttagtattaattaaatatggttgaatattttgtttattataatttttatagagttataagatttgtgaagatagggatagggataatatttatttttgtttggtttataggtggtatgtaatagatatttttaaaaataagtgagttaatgaatgagggtgagaatgaaggtatagaggtattagggggaggtgggttttagagaatggtgttaaggtttagtggggtgattgggattagtttaggtttgacgttggttatttttatttagtttttttttttttaatttgtttttattttttttgggaaggattgaggtttttggaaaatagttaaataattgttatgggaatagtaagtttaaataaagttaagtattagggggatttgagagttgaaagtaatttttgtttttttttttttagttgaaggggtggggaagggtttttaaagttataattttttttaagggatttagaaggtataaaaaggtttttggttgagaatttttttttttattttgtagttggtgttagaattttggattttgaattggaagaaaatgtttatttagtaagtatttttgggagatttttttaaaatatttttatggatttatgataaatgtgttattttaagggtttttgaagagaaggtattgattaatgatttgtttaggaaagatttttgaattttggtggggaaatttttttttgtttatgtattaaagtaattagttagaatttaggtttaaattatggggggtttgtgtgatttagttcggggtttggaagtagttttgagtatggggattttagatagatttgggttttattttttgtttagttattttttagtgtgtgattttggataaattatttaattttttaagtttagttttttttgtatatagaaagatgttataatagtttttattttattatgttattgtgagatttaaaagagataatattatgtaaagttttttttatggtatgtaggatatagtaattgtttagtaaaaggtaattattataattgagtttggttagagattttattttttgaagttataatatgaaattgaatagaggatgtagaaagtaaataaaaatatagaatttgaattttttggtttgattatgatgaaaaagtattgtaggttttggggattggtagagaaatgagatgatggggaaaaaattatggtataatatgagtgaataatgaaagatgaggtatttgatttaaaaagttgttattttttaatttttaggaaggagataaatgggtttttttttgaggtaagaaaattaatgatgttgtgagttgagtatgttgatagggtgggagaatattgtgggaaggattttgtttaggaataaattttaggaagtgaattgatggtagtaggattgattgatttgtttttcgaagtaaggaaaaattgtagaggataggattaagtttattgtaattattgatattaaaagagaggttatgttttttgatattagagtagtgatttgggatttttttttatatttgagtagttttttttatttttagttttacgtgtttttttcgtttttattttcgtttttttttttatttttatttttatttagttgagattagatcggtaggagtgaataggttttgagttagttttagagtgtttttttttttgtagttttgtttttatttttgcggattttgagtattaatatgggttttttttttatttttttattattttagg

SEQ ID NO: 1594 - DNA, 6254 bp, Artificial Sequence
  chemically treated genomic DNA (Homo sapiens)
tttgaaatggtggaagaataaggaagaagtttatgttgatgtttaaagttcgtagagatagaggtagagttgtaggagagaaggtattttagggttggtttaaagtttgtttatttttgtcggtttagttttagttgggtgggggtgggggtggggggagaagcgaaggtgagggcgggaggagtacgtgaggttgggggtggggaagattatttaggtatggaagggggttttagattattgttttgatgttaagagatatgattttttttttaatgttaatggttatagtgaatttaattttgttttttgtagtttttttttatttcggaagataaattaattaattttattgttattagtttattttttgaaatttgtttttaaatagggttttttttatagtatttttttattttattaatatgtttagtttatagtattattgatttttttgttttaaggagagatttatttattttttttttaggggttgagagatgatagttttttgggttaggtattttattttttattatttatttatattatattataattttttttttattattttatttttttattaatttttaagatttatagtatttttttattatagttagattaggagatttaggttttatatttttgtttattttttatattttttgtttagttttatgttgtaattttaaagagtggaatttttgattagatttaattataataattattttttattaaataattattatgttttatatattataaaaagaattttgtatggtattattttttttaaattttatagtaatataatggagtaaaagttattgtgatatttttttatatataggaaaagttagatttaaaaagttaggtaatttgtttaaagttatatattaggaaatgattgggtaaggagtggagtttaagtttgtttgaaatttttatatttaagattgtttttaaatttcgggttaagttatataaattttttataatttggatttgaattttagttagttgttttaatatataagtaggaaaaaatttttttattaaaatttaagggttttttttaaataggttattaattaatgttttttttttaggagtttttgaaatagtatatttattatgaatttatgaaggtgttttaaaaaagttttttagagatatttattggatagatatttttttttagtttaggatttagagttttggtattaattgtagaatgaagaaggaagtttttagttaggggtttttttatgttttttaaattttttaaaaggagttatggttttgggagtttttttttatttttttagttgagggagggggaatagaagttgtttttagtttttagatttttttgatgtttggttttatttgggtttgttgtttttataatagttgtttggttgttttttagagattttaattttttttaaggagaatgagaatagattagaaagaaaggagttaggtgggagtggttagcgttaggtttgagttgattttagttattttattggattttggtattattttttggggtttatttttttttaatatttttgtgtttttatttttatttttatttattaatttatttatttttaaaaatatttattatatattatttatgaattagatagagatgggtattgtttttgtttttgtttttatagattttataattttgtaagagttatagtaaataaagtatttaattatgtttgattagtgttaagattggagaagtataaaatgttatggaagtatattgtgtatttttaattttttttagtaattttattgatattatttagtgttaatatttttttaattaggttgaggatttttgatttgttgagaatgaaattttgtatatttttgtttgttattaatgtttgtttgttttttgttttatttttttgtttattggtatatgtttggtattttgagagtatatagtattaatttatttatatttttaatatttttttattaagttttagttgtttgttagtatagataaggtattgtttaaagaagtttttggaaaataggtaagatatatattatattagttaataattttaatattttttttgagaaatttattaataattttaaatttagtgtgtagttatggttatttattttaggggttttttttaataaaattgtataataattaatttaagtgttttttaagatatataatagtagttttatttttttatagtgagggtataggtatgtgatgggttttattcgttagggatagtggtagaagttttaatggtagtatttggggtttagtatttataatatttttgtttatttaaggtagttgtagtgtttttatttaatagtggagttcggaatattgttattggttgggtagtttttaagttttattttttagttattttagagattgttagttttttaatatttataatatttgcgttttgttttattagagttagttttattatttgtagttaagagttttatgtttataaaatgatggtagtataagatattattattatattttggggggtataattatttttgttggattttggagagtaatagaagaggagattaatatttatttttttatattaaaagatttgtttttaaaatattttaaataagaaatttttttttaaagtataaggataatttaaatttttttaaattagtaataaaagtataaaatttttatttagaattaaagtaaatatttttgtattataaatataatattaaattttaataaatatattattaatttggagtgagtatttatttgtataatattatatttttttttttgttatgagaatgttttattaggtaaaattatgtattatgaaagtgttttaaaatgtaataggaggagatgtgaagatataaagaataagtgtttagtgatatatggatattagaatatattaagtaaagtatttatattgtttttattttttattaagaaaaggaaggatttaggttatttttttttcgttatcgtaggatgttgtggtattatttaggaagaatattgatattggtattaggaatttttaggagaaaaaggaagtatttaagttgagatgggataaatatataaaagttagttagttaaagggtaggtagaagagtgtttaggtatagtttgtgttatttataaaagtttagaggttaatataaggtgggaaaatagttagagatgaaattggattagagataattataggttagattgtgtagaatattataaattaggttaggtatagtggtttacgtttgtaatttcggttttttgggaggtcgaggtgggtagattacgaggttaggagatcgaaattattttggttaatacggtgaaatttcgtttttattaaaaatataaaaaattattcgggtgtggtggtgggtattcgtagttttagttattcgggaggttgaggtaggagaatggcgtgaatttaggaggcggaatttgtagtgagttgagatcgtgttattgtattttagtttgggtgatagagcgagattttattttaaaaaaaaaaaaaaaaaaaaaaagaatattataaattatttatagaaatttagatttttgttatgagaaaaggggaattattgaaatattttatttagaggagtgatatgatttgatttgtattttagtaggacgatttagaatgtattgtggataatatattggaataggagatttgggtaagataaattaaagggaggtatagattaaataagtggagatagttgttgtaagtaggtatattgagggatggatacgaatagtgaaatttaagagatattttagaggaggtttaatttaattttgggattggtaaatgtgttggggaaataaaaggtataaaaaaggattatcggtgggtttttggtttttggtataatttatttagataatgtatatcgtgtgtgtgtgtgtgtgtgtgtgtgtgtgtgtgtgatgttttagggatatagagaaaatgaattttgattgtgatttgaatttatttattaaaggagaagattttcggggtttgtaattatttgagagtttaatagggaggttgaatgagttagtatttgaaggataagtttagtgttgatatagaaaaaagatggaggtggtatttttagggaaagatgtagagtgagagaaggtagaggaatgagtatgttagaaagatttttttttgtagtatttttgttggattttatttttttagtagtttttttttttcgagaagagttataggttatgttgttatatttgtatattgttagtttattggagagaaattttattaatattaagatttagtagttttttaaaatttttatttttttttttttattataagaggttgaaagagaagtttttgtcggaaagaaagcgtatattagttgagagagagagtattaataaattgtatttaagtttattttttgggagatgagaattcggttttgttggtgttcgtgtttgtattaagtgttttttttagatatttttgtgttgtttttggtgttttggggttataattatattgtttaagaatagtaattggttttagtattttttgtattgttttgcgtttgtggtattttttatgttttaacgtatagattttagaagttagttttttgaaggatattttttttaaaagtataaattatggtaatttattttaggaatgtttataaattcgtaggttatatgaattattaaattagtacgtttggagaaatttaggatgaaaattaatttttgtgtattaaattttattgaattttgagttttttaggtataagatagggaaaatatgtaaaagtattttttagttagaagtattttatatgaatattaagtaatgtttattaatgttaatttttaggaagtttgagagtgtttaattttttagttattattttttattttagaagtaatttattttttttttattttgttattggtgtgaagttaaagattagatgtttatatttttttaaagtatgattttgatttttttgtttttatatttttaaatgtagattttttttttaggtttaattttatttttttgtggttttagtgtgatatatcggatttttaatgtattgttatttttttttttattatttttttttattttttttttattttaattttttgttttttggtaaaattagatttttatgtttaatttttgtgtttgtttaagaaattgttattttgatatattttggtgtatttattaaaataatattttatgaattaaaatagtaaaatatttttttatagagatttttaaatagaaattgattttatatttttttgaagaaattggtttagagggtattataaaagttgtttttttattttgatattaggtagattagttggggtttgtaggttatggtgaggagtttggattgagttttgagagtaatgggaagatatttagggttttaaataggggaatgattgagggatttgatttatgttttggaaaaaaattatttttattggtatttgaagaatggattataagtgtttagaaaggaagtagggaaattggtagtttattttaggtgaggtgatgatggtgtttagattatagtagagtaatgtatatggaaaaaagattgaaagatttgagatatgttttgtaggtagaaattataggatatatgataggttgatatatatgggatataagaaaatgagttaaagattattatttatttattgttaatattgtagtataaaagttaaatagtaaattttagtgttatataagagtaagtttttcgggtggttggttaggtgtatttgtaatatgttttaatttgtttttataattggagtttattttgttgtttagatattggttgaaataagtgaggttatttggttttgttatattttttttttttagtaggttagttagggtttatttttttggtaatgataaatgaaagagtaagtgataataggagaagtcgtttaaggtttaggtttagaattgatttattgttatttttattattttttattagttaaaataagttatgtggttagtttagattttgagtggggtgaaaatagttttgattttggtagtttttagtgagaaggattatagtgttatattgtagaggttatgaaaatagggaaggatgtagaa

SEQ ID NO: 1595 - DNA, 5710 bp, Artificial Sequence
  chemically treated genomic DNA (Homo sapiens)
atgggtagaaaggagtattttaaatttattattaggaaggaaaggtttgtttaggagaaggtataagatggatatggattttgtatttgttggattgaattttgattttttaagttaatggggtagagtggaaggtttttttgtttttagtttaagtttttttttaagtaaatgatacgtagattttgattttttagggtttttttagtttaaacggtcgaaggttttagttttttacggagttttataagggttaggatgatgggttttgatttttttgtatttttgggatttagtacggggtttggtacgtaggttggttttagtttcgtggataaggttgagtgggttacgaattggagttttaatggtttttaaggttattttttgtttgggttttattttttatatttttatgattgtttttgtttttatattggggtttggtgatatttatatggaattgtatttttggtgttttggatataggtgtggatttgattgtttaaaaaaggttggtttagttttggttgaaatttttatatatggatttagaaggtaataggagtagtatagttttagaacgtattgttcgaggaggaaggttttcggaagagggtttgcgggggatatagttaggcgttttttttttttagattcggtttattcgattggcgtgagttttgtggtttttattatattgtattgtgggaaaggtttagggttttggtatatggatgtgaattgtttgtcggttaaacgttttggttaggagttttgttttgaaatttaggtatggttttattgttaagattagtaagaatttgaaaaagtagaaggtagttttgtttgttggttaggtttaggtaggtaggttttcgttttgtatggggagtttagcgttatttatatttggacgagtaatattttttttttagttcgtagaggttaatggagatttcgtttcgtagcgtgatgagttttcggtcgtattttttttgtagtgtgcgtagttgttggttgcgttggttaatggtttcgtttacggaggggaagttattgaggattaggaattgtttgaggtcggatattagttttattagggattcgtcggttcggatttgtggttattagaattagggcgggtatagggtgaggggggatagcggttttgtttataagtagttgatgttgggtaagggatggtttttttaggagttttagtttttttatttgtaaagtgggattttatttttgatttttataggtttatgtgtgagaattaagtgagaaaattgggatgttagttttgtagggtaggtttttttttttcgttagtttttggtttttatttttgtaggattggtttttagtttaattatgtaggtgtatattttgtttatgaaaaatttaaattttatagataaaattgcgattttattttgttttttgtttcggggtaggattaatatggttgttagttgggtagagtttttgtgggatttttttttatgtattttgagttttggacgtgtatttgcggaattatttgtttgttgtgttttttttgtgattcgaaggaatttaatggcgtttatagttttattcggttgtttgtttttttatttataattgattttaggaatttttgagttagtaggaagggttattttttttttggttattgtacggttataggacgggtatgggtggttttttgtttagtttttttttaagtgttttacgtgaggatagttttttgagaaatgatttgtttttattttattttttaaagttgtcgagtggtgaaattaaagtatttttatatttgtttttttttgttttttttcgggggaagaagattagattagttttagagttttttttattttatttaggaaatttgaggggattgatgtttttggagtttaggtcgtgttttttattttggttatttacgatgttggcggttcgtatatgtatttcgtaattgttttgtttattttgagtggttcgtgatatttgcgtttcgtttttaatttgggggaaaataagaaaatttagaaattaatttagttaaggtatttttatttttggttcggtttagtttagtttacggtaattgttatttatttaggatgtttatattggttataatttgtttgtggtgttatttatagatttaagcgttgttagttagatttttgataaggtttaattttatttttttttgttttggttatgggagataatatgtatttttgtttaagataaatagaggtaatttacgttgtttgttgtattaggtgtagggatgggggtttattttggttcggtttttttgggttgtgggagttttgtttggtaggaatcgttgttatttgtttggtatttggtaaattgttggatgagtgaagggatgatttaagttttttttcgcgattattttttgattattttttaggtgttaggttgtgttatgtatttgattattattaatttatgttagttttatagaagtttggtttgttatttttggtgtataggtggttaagcgaggttggatggggtttttcggtaggttttgtaaaggtttagttcggggtgggtgttaggtatttttagtggttaagatttagatttcgtgggtttaaattttggtttagttagttgtgagttgagtgattttgggtaagttattaagttttttgggtttgggtttttttttgaaatgaagaggataatagtgtttattttatagagtttttatgaagatttagtagaataggtatagataattttataacgtggtttgatatatggtaagtattaagtatatgttagtttttatttttattattatcgtttatggagtttgttaggtttgtagtagttaggagggatttagtttaatttgatgtagttgtagttgtagtggttagtaggtttgtaggttttagtgttgatcgttttatttgtttggaggtttttttttatttttttttttagtttgttttttttttgtttattggttgtgtgttaggtttcgaggtaattgttttatatagataaatttattagttattataaggattttattatgtaggagaaattgaggtattaaaaagtgaaatttttatttaaatttatattgttagtaagggttggacgtgttattatttggtttgtttatttattgattagttttttgtgtattgggtgttttttgtttagaatattatttattcgcgttgtttagtttttggttttttttgtttttatttttttttagattttgttttttttggtgggttattttatttttattttggcggttttgatgatttcggtgaagttgtttatgatggatttaatgtcgttttttagtcgtttgttgtaggattgtagtagcgtttttttgttttggggtagggttttttgttgggttatggtcgagttttaagtagcgtagcggggagatttgggatttagagtgtagtatagatttttgagtgtaggtagagtttattttagttattttttatgttttaattttagtagaatacgtagatttttggggattttttttttgttaaataaagttaattattgaaatatagatgaatttattttattagtagatatcgtagggggtgttaggattggtttcgtttttgttagagtaagtttattttggaatttttggttagttttttaagttttgtttagggttttagtttagattttacgtttaggtttatagcgtgttttagggagttttgtaaatttaatattagtttttcgtttttagtttttggtttaattttttagttcgtcgttattttcgttacgtttttttattcgaagagtttttttaattcgatttttttgtatcgtttatatttacgttttttttttatttttatttaggttgtttcgttttagattttatttttgtattgcgggtttcgttttttttagtttttgcgcggtagggaagaggttttaaaaagtggttattttaatcgggcgcggtggtttacgtttgtaattttagtattttgggaggtcgaggtagggattatttgaggttaggagtttgagattagtttgattaatatggtgaaattttaattttattaaaaatataaaaattagtcgggcgtgatggtaggcgtttgtaattttagttattcgggaggttgaggtaggagaatcgtttgaattcgggaagtataggtcgtagtgagtcgagatcgcgttattgtattttagtttgggcgatagggggagattacgtttttaaaagaaaaaaaaaaggggggtaattttattttttcgtttaatattttttatggtttttcggtgcgtcgggataaggggtttaagtttcgcgtcgcgtttttcggtttttgttttttagtcgtattggacggtttcggcgttggagttgtttggttttggggtcgggtttttgcgcgcggtgtttagggagggttcggggttttttaggttcggagtttggcgtacgatcgagcggatttttggacgtattcgtattgtttgtgtttatttttggcggggtgtgggaaataagttatacgtaggaaaggggattttcgattttagcgtttacgtatttatttatttttattttcgtttatatatttattttttttttatttttattttttattatatttttatattcgttttagcgttcgtatattagacgtcgcgttcgtcgggtcggtttagggcggggtggttaagtgtttttgcgattcgtattttttcgcgttttttttacggtttggttttttcgtcgtagtttttttttttcgtcgcgtcgcggttcgaaaatttagttagtcgtcgtagtttttcggtttcgtttcgatttttagttttataggaatgttgttgttttaaattcgaaatttcgtgtcggtattaattttcgcgattttcgaggtcgtatatatattatttataattttttttttttttttttttttttcgtcgtttaagatggtgagtgagttgtagtttcgtggtattatagttaggtttcggttgtattcgttgttatttttttttaggcgcggtttcggagggttttttgttttttttggcgttaggagagttttattcggtgtggtacggagatatcgaggtggattagagttttatttggtgtggtacggagatattgagatggattagagtttcgggcggtcgagagcggaatgcgttgttttcggtgtcgtagggttgggtgtcgtaggtttggagtatcgtagtgcggggttcggagttttagcgtttttcgggtttgttgggggtcgttttagaggttttgtgagcgacgagttttgagttcgtttttgttgtttttagagtttgtggggtcgcgatttagaggagttatgagttcggggtgttttttgggtgggcgacgcgaagagagcgtggtttcgggtttagttttgttttggttattcggggttttcggggttgtatgtttgtgcggttgaatgtgagatgtttttgtcgaggggtggtgttggggggttgtagaaagttgttcgttagtttagtttaggtaggtgttgttagcgttttttgttttggaggagttagtttgagttttattttcgacgaagcgagtggaggcggcggtttaattgacgttttttttttgtttagt

SEQ ID NO: 1596 - DNA, 5710 bp, Artificial Sequence
  chemically treated genomic DNA (Homo sapiens)
gttgggtagaaagaaaacgttagttaaatcgtcgtttttattcgtttcgtcgggggtagggtttaggttggtttttttaaaataagggacgttgatagtatttgtttgaattaagttggcgagtagttttttgtaattttttagtattatttttcgataggagtattttatatttagtcgtataagtatgtagtttcgggaatttcgagtggttagagtaaggttaagttcgagattacgtttttttcgcgtcgtttatttaggagatatttcggatttatgatttttttgagtcgcggttttataggttttagaagtaataggggcgggtttagaattcgtcgtttataaggtttttggagcggtttttagtaagttcgagagacgttagggtttcgagtttcgtattgcggtgttttaggtttgcgatatttagttttgcgatatcgggaataacgtatttcgttttcggtcgttcggggttttagtttattttaatgttttcgtgttatattaagtggggttttaatttatttcggtgttttcgtgttatatcgagtggggtttttttagcgttaggaggagtaggaggtttttcgaggtcgcgtttggaggaggatggtagcggatatagtcggaatttggttatagtgttacggaattatagtttatttattattttgggcggcgggaggagagagaaaggaaagggaattgtgggtaatatgtatgcggtttcggagatcgcgagagttgatatcggtacgggatttcggatttaaagtaatagtatttttataaagttaaaaatcgaggcggggtcgagaggttgcggcggttgattaggttttcggatcgcggcgcggcggggaagagagattgcggcgggagggttaggtcgtgggagagacgcgggaaagtgcgggtcgtagaggtatttgattatttcgttttaggtcgattcggcggacgcggcgtttggtgtgcgggcgttggggcgggtatgagggtgtggtggggggtggggatggagggggggtgggtgtgtgggcgggagtgggggtgggtgggtgcgtaggcgttggggtcggagatttttttttttgcgtgtgatttattttttatatttcgttaaaaatgggtataaataatgcgagtgcgtttaggagttcgttcggtcgtgcgttagatttcgaatttagggggtttcgggttttttttgagtatcgcgcgtaaaggttcggttttagggttaggtaattttagcgtcgaggtcgtttagtgcggttggagggtagaggtcgagaggcgcggcgcggaatttgagttttttgtttcggcgtatcggggaattatgagggatgttaagcgagggagtggaattatttttttttttttttttttttggagacgtagtttttttttgtcgtttaggttggagtgtagtggcgcgatttcggtttattgcgatttgtgtttttcgggtttaagcgatttttttgttttagtttttcgagtagttgggattataggcgtttgttattacgttcggttaatttttgtatttttagtagagttggggttttattatgttggttaggttagttttaaatttttgattttaggtgatttttgtttcggttttttaaagtgttgggattataggcgtgagttatcgcgttcggttggaatgattattttttaggattttttttttgtcgcgtagagattggagggagcggggttcgtagtgtagggatgaggtttggagcggggtagtttgagtgggagtggaaggaaagcgtggatgtaggcggtgtagaggggtcgaattggaaggatttttcggatgggagggcgtggcgaaggtggcggcgggttaagaagttaagttaagggttggggacggggagttggtgttgagtttgtagggttttttgggatacgttgtgggtttggacgtgaagtttggattggagttttggatagggtttggagggttggttaggagttttaggatgagtttgttttggtaaaggcggggttagttttggtattttttgcggtgtttgttgatggaatgagtttatttgtgttttagtgattgattttatttggtagaaagggaatttttagaaatttgcgtgttttgttaaggttggggtatagagggtggttggggtagattttgtttgtatttagaggtttgtgttgtattttaggttttaggttttttcgttgcgttgtttgaggttcggttatggtttagtagagagttttgttttagagtaaggagacgttgttgtagttttataataagcggttgaaggacgatattaagtttattatggataattttatcgagattattaagatcgttaaggtgggggtggggtggtttattaaggggagtagagtttgagaaggggtggagataggagaggttaggggttgagtagcgcgagtgaatagtgttttaggtaggaagtatttagtgtatagggagttggttagtagataagtaaattaaataatggtacgtttagtttttattaatagtatggatttggatggagattttattttttagtgttttagttttttttgtatggtggggtttttgtgatgattggtgagtttatttgtgtaaaatagttatttcggggtttggtatatagttaatgagtaggagaaaagtagattgaggggagaagtgggggggggtttttaggtaggtggagcggttagtattggggtttgtaagtttgttgattattgtagttatagttgtattagattgggttggattttttttggttgttgtagatttggtaggttttataagcgatgatgatgaggatggaagttagtatgtatttagtgtttgttatgtattaagttacgttgtgaggttatttgtgtttgttttgttgaatttttatgaggattttgtgaggtgggtattgttgttttttttattttaggaggaaatttaggtttaggagatttagtgatttgtttaaggttatttagtttataattggttgagttaggatttgaatttacgaagtttgggttttaattattgagggtatttgatatttatttcgaattgagtttttgtaaggtttgtcgggaagttttatttagtttcgtttggttatttatatattaggggtggtaggttaggtttttgtgaaattggtatgggttaatggtggttaagtgtatgatatagtttggtatttgggaagtgattaggaaatggtcgcgaaaaaaaatttaaattatttttttatttatttaatagtttattaaatgttaagtaagtgataacggtttttattaaatagggtttttatagtttaaaaagatcgggttaagataagtttttatttttgtatttagtatagtaagtagcgtgggttgtttttatttgttttgagtaaaggtgtatgttgttttttatggttagaataagagagggtggaattgaattttgttagaggtttggttgatagcgtttaggtttgtagatggtattatagataggttgtggttagtgtggatattttgggtagatgatagttatcgtaagttgggttgggtcgggttaggggtggggatgttttggttgggttgatttttaggtttttttgtttttttttagattgaggacgagacgtaggtgttacgggttatttagggtgaataggataattacgagatgtatgtgcgagtcgttaatatcgtgagtggttagggtggagggtacggtttgggttttaagagtattagtttttttaggttttttgggtggagtggagggggttttggggttggtttggtttttttttttcgagaaggagtagaaggaggtaaatgtagagatgttttggttttattattcggtagttttaaagaatgaggtgggggtaaattattttttaggagattgtttttacgtggggtatttggaggagggttgggtagagagttatttatgttcgttttgtagtcgtgtagtggttagaaagagggtagttttttttgttaatttaggagtttttaaggttagttgtgagtgaaaagataaatagtcgaatggaattgtaggcgttattggattttttcggattataggagaaatatagtaagtagataatttcgtaggtgtacgtttagggtttaaaatgtatggaaaaaggttttataggagttttgtttagttggtagttatgttaattttatttcggggtaggaggtaaaatgggatcgtagttttatttgtggggtttgagttttttatgagtagaatgtatatttgtataattggattggaggttagttttgtaggagtggaagttagaggttgacgagaggggagggtttgttttgtagaattgatattttagtttttttatttaatttttatatatgaatttgtggaggttaggggtagagttttattttgtagatgaggaagttgaggtttttagagaggttattttttgtttagtattagttatttgtaggtaaggtcgttgtttttttttattttgtgttcgttttggttttgatggttataggttcgagtcggcgagtttttgatgaagttggtgttcgattttaagtagtttttgatttttaatgatttttttttcgtgaacgaggttattgattagcgtaattagtagttgcgtatattgtaggaggagtgcgatcggaagtttattacgttgcgagacgagatttttattgatttttacgagttggaggaggagtattattcgtttaggtataaatagcgttggattttttatgtagagcgggagtttgtttatttgggtttggttagtaggtagggttgttttttgtttttttaaatttttgttggttttagtagtggagttatgtttgggttttagagtagagtttttggttagagcgtttgatcgatagataatttatatttatatgttagggttttgggttttttttatagtgtaatgtgatgaaaattataggatttacgttagtcggataggtcgagtttggagaagggaggcgtttggttgtatttttcgtaggttttttttcgagagttttttttttcgggtagtgcgttttggggttgtgttgtttttgttattttttgaatttatatgtagagattttagttaaggttgggttagttttttttgggtagttaggtttatatttatgtttagggtattagggatgtaattttatgtggatgttattaaattttagtgtggaggtagggatagttatgggaatgtgggggatgaagtttaggtagggaatggttttgaaagttattggagttttaattcgtgatttatttagttttatttacggagttggagttaatttacgtgttaggtttcgtgttgggttttagggatgtagaagggttaaaatttattattttgatttttgtggggtttcgtaagaagttgaaattttcgatcgtttgagttggaggggttttgagaaattagagtttacgtattatttatttagggggaaatttaggttggagatagggaggttttttattttgttttattagtttagaaaattaagatttagtttagtagatgtagagtttatgtttattttgtgtttttttttggataaattttttttttttggtggtggatttaaaatatttttttttgtttat

SEQ ID NO: 1597 - DNA, 5997 bp, Artificial Sequence
  chemically treated genomic DNA (Homo sapiens)
tttagtttttagagtagttgggattgttggtgtgggttattatgtttggttaattttgtttatttttatttgtagatatggggttttgttatgttgtttaggttggttttaaatttttgggtttaagcgatttgtttattttagttttttaaagttttgagattattggtatgagttatcgtatttggttggtaaagttgttttaaaaataagtttaaggttagatgtagtggtataggtttgtaattttaatattattattatgaattgtttatatacgtttattttttttagtaatttgggataggatgttggggacgtgtgttttagttttttttttaaagatttattttttatttttatatttatagaattagaattatgtattttgtgattttatttattatatgttaaagcggtttttataaaataatagaggaaagattatttaatatattatagtaagaatgtcggttagttaatatttggggggaaatataatttttttttatttattttatttatttttattaattttaagttaataaaaaattaaatatatgttattaaatagaattgagtatttaatagatttttgaattgatagtagttttttaagttttgaaggaataagaagagattataagagaaaagattaatagatttggttatataaaattttgaaagtttgtatattgaaaagtataattaaaaagaaaataattaattggtatgataaaggattaatgtttatattttataaagtatttatggaaatttatttaaaaaatatgtttttaaagataaatggttagagatattttatataagaggaaatggaatgagtaaataagtatgtggtaaaatatttaattttattagtggttttttttttttttgagatggagttttattttgttatttaggttggagtgtagtggtacgattttagtttattgtaatttttgtttttagggtttaagcgatttttttgttttagtttttcgagtagttgggattataggtgtatgttattacgttttgttaattttttgtatttttagtagagatggggttttattatgttggttaggttggtttcgaatttttgattttaagtgattcgtttgttttggttttttaaagtgttgggattatagttatgagttattgtattcggtttagttgagattttttagtgtaaattaaaataattatattagtaaaagttaaaaataggtgattattaggttggtacgagtatagtaaaattgtaagaatttttcgagaaaggttttttggtaatatatatatgttattataaaaggatttagattttttgatatagtgttttttttttaagggttattgttaattatttttttgaattaattatagatgtattattttttttatatttgagtttttagtttagattatgcgtttgagtttaggattgggtttataagatatttttaggttgatgttttttcgtatttttagttttgtgttttagatttatttttttattttttttttaagtatatttttttgttttttttttgtttcggtgaatgtattattgagttattaagttagaaatttgggagttattttaattatttcgttgttttttatttttgtatatttattattttttagttagattttgttaatattttatttgtaatgttttttgagtttttgagtttttttttttttagttttagagttataaatttaggttttagtagtttttagttttttgtttgtattgttgatagagatttgatttatgttttttaagttatttatattttttttaaattattttacgtggaggagtttgagttatttttttaaagtataatattgattttgttttttttaaaattttttaatagttttttattgtttatttataggttaaagtttaagattttaaagatttagttgttttttgtattataattcgttttattattattttttttttcgataagttttttttagttttttttttttattttcgtagtttgttttttatattattatttgttttttgagagtaagaattagattttaataatttttgtatttttagtttataatgtagagtttgatatagagtaagtatttaataagtgttggttgaaggaatagatttattttaaggaaaatatttaattgaaggaaaaagttgtttattgtagtaatacgtataatagagaaaaagtatagaaaattaaatgtttaataatagagaatttgtattaattgtgggatatttatttaatggaatatgatatagttgttaaagtagtaattatgaggattatgtagtaatttggaaagtgtttttaatataataaaaatagaatataaaatggtttgtatgttaggattaaaattatgtaaaagtatgtatgtatataagtcgattagaaagagaataggaagaggaataaatgaatatagatgatgtgtttagggtgtttggggaggtattgtttgcgatttatttagttttttttaaattttttttattgttgttagaatgttatttgtgtataaatataaattgagagagagaaatatattgaaaaagatgttttgatttttttaagttttttgataatttatggtataaaaataaattatttatttgggaggtaagagataagtttttttatttttaaacgggttgtgtgattttgattaagtgagatttgtagttttaattagttattttttttattttttttagttggaaagtatatggttatttttttatttttatagtaatttttttattatttttgttaattgtattattatttttttagtgtttttagattaaaaattttagaattaatttttattattttattatttttattttttttttattttttatttttaattaatcgattttttttaataattatttataatatgttttattgtggattgtattttagttttagataaggaggagtttttgtttttttagttaatattgtttgtttggttaatattgtttgtttgagaagagttaataatgttttttttttttgtttttttgtagattgttgaggggtaaagtggatggtatagatagagatttgtgaaatggaattttatgagttaggagtttgattttatggtgggaagaatttaggtataggttggatgtttttagggatagtatagtaggatttggtataataagtgggatgttgatttcgtttatttatttaataagtatttattaagtgttggatatagtgtcgagttttttgtttagtggtaaggggtttgtttagatgaattagggtaggttttattttggaggtgtttagtttggtggaggttaggtaattaaatttgtttttgttatttaatgtgttgtgtgtttttattaagtttgaatataagtttttggggtaagaatgagggatttattttgattgaggggattacgagtttatagaattagagggatttgaattgtgtatttttaaggttgaggtgtgggattaggtggtatttaggaagggggtttggttgtttgtggtagttttaagttaaggaatcgagtttataagtagttttgaaagagttgattttagttaggcgtagtggtttaggtttgtaattttagtattttgggaggtcgaggcgggcggatcgtttgagtttaggagtttgagattagtttaggtaatatggcgaaatttcgtttttataaaaaaataaaattataaaaaattagttgggtgtagtggcgtgcgtttgttgttttagttattcgtgggggttgaagtgagaggatcgtttgagttcgggttgtttgtcgaggttgtagtgagttatgtattatagtttgggtgatagagtgagattttgttttttaaataaataaataaaaagagttgattttttcggaataaattagtttggtggggtttgagttttgaagtttgggattggggagagagagtaatggagttagataaagtttagatttgtttttttacggtaggaaatagagggttaagggtagtttcgaagtaggattagatttatattttagttagatataattagacgatttttaatatttttttttttttttgagtttttataagtgttaaatgcgttgtataggaagtaagggggaggatgttagagtttaagtagagaagtaagagggggttaaaaacgttgttggttttttttaatttagtatgggttgtttggttggtttaagggaatataaaaaagggatagataaaatacgtttaagaaataatattaaatatttattaaaatgtattttattgattatatataagttttttgttttgttttgttttgttttgtttttgagacggagtttcgttttgtcgtttaggttggagtgtagtggcgcgatttcggtttattgtaagttttattttcggggtttacgttatttttttgttttagtttttcgagtagttgggattataggcgttcgttattatgttcggttaatttttttgtatttttttttagtatagacggggttttattgtgttagttaggatggtttcgattttttgattttatgattcgttcgtttcggttttttaaagtgttgggattataggcgtagaattatttgtacgtgagattggaagtaagtttattttgaattttttttgaggttagggatgttgtgtagtttatttttgtatttttagtatttagtatagaataaggtatataagaggcgtttagtaaatatgggaggaggaagggcggaaaaaggggagggaggaaatcgtttttaggagatatttttttttcgcggcggttttttaattcgggatttttgattttttattagtagatggtaagaaagagtttcggcgcgttagtaaagggttgagttgggcggagtagttgaaaattcggcgcgcgtagtttttagttttaatttttacgcgtatcggaagacggaggttttttttttttgtttaacgtagttatggtaagtcgtttagttagcgagtttttaggacgtattcgtttttattttttttcggtcggggttgttcgaggtttcgggatttttattggggatggtcgggtagaggcgaagggattacggttttcgtggtaggtcgggacgggttttagggcgaagggcgaacgttggtttagggttggggaggcgtagatttggtgttgttgttgggaaggtttcggtttttgattcggttatacgttttgatttcgggagaagttgttttttttttcgggtcggagtcgcggttgggttaggagtttagattgcgagttcgaggttggtgggcgttgggggtgttcggcggagaaaggttttttttgttattgtttttttggtacggtttgattttattatacgtggtcggtaagtatttggatatagtattaaaaaggtttttttattttttttaaagtaaaattggtgttagtttttggttttagtgtacgaaggagtagtatatgtgtttgtgcggatgttagaattttgttttatacgtgttaaaaatagacggtaataaattgtgaaaattttagaaatataggtagatttttggtttatttttgttgttgtgcgttttattagtatggtgtttttgaaagattttaatttttaagtagatatagttttaaatagtaatatggaaatattttagtaaggttttgaaagatagtaattagtaaacgttttgaaatatagtaattaagaatattttttgttataataagaaggtttgttgtagtttatggattttacggtgtttgttaaataattgtgtttgtttttgttttatcggaatattatattttaatattgtttatattttgttgaagatgaaattaaattaagagtttagttttatattaggttttataagttgttttgaaatttgattaatagtattgtaatttaaaatttttagg

SEQ ID NO: 1598 - DNA, 5997 bp, Artificial Sequence
  chemically treated genomic DNA (Homo sapiens)
tttgaaagttttagattgtaatgttgttaattaggttttagaatagtttataaaatttagtgtgaaattaaatttttagtttagttttatttttagtaaaatgtggataatattaaagtatagtgtttcgataaaatagaaataaatatagttatttaataaatatcgtgagatttataagttgtaataagtttttttattgtaatagagaatatttttggttattatgttttagaacgtttattgattattattttttagaattttgttaaagtgtttttatgttattgtttgaaattgtatttgtttagaggttagggttttttaagaatattatattagtgaaacgtatagtaatagaaatgagttaggagtttatttgtgtttttaaagtttttataatttattatcgtttgtttttgatacgtatggaataagattttgatattcgtataaatatatgtgttgttttttcgtatattaaagttaaaagttgatattaattttattttaaaaagagtaaggaagtttttttaatgttgtgtttagatgtttatcggttacgtatggtaaagttaggtcgtgttaaaaaggtaatgataaagaaaattttttttcgtcgggtatttttagcgtttattaatttcgggttcgtagtttgagtttttggtttagtcgcggtttcggttcgggaggaaaagtagtttttttcgggattaggacgtatggtcgggttagaaatcgaggtttttttaatagtagtattagatttgcgtttttttaattttaggttagcgttcgtttttcgttttggagttcgtttcggtttattacggaggtcgtgattttttcgtttttgttcggttatttttagtaggaatttcgaaatttcgggtagtttcggtcgggggaggatggaggcggatacgttttaagagttcgttaattaaacggtttattatggttgcgttaggtaaggaaagaggattttcgtttttcggtgcgcgtagaaattggggttggagattgcgcgcgtcggatttttagttgtttcgtttagtttagttttttgttggcgcgtcgggatttttttttgttatttgttggtgggaggttagaagtttcgagttgaggaatcgtcgcggaaagagggtgttttttaagggcgattttttttttttttttttttcgttttttttttttttatatttgttgagcgttttttgtgtgttttattttgtgttaggtgttgggaatataaagatgagttatataatatttttggttttaaggagagtttaaagtgagtttatttttagttttacgtatagatgattttacgtttgtaattttagtattttgggaggtcgaggcgggcggattatgaggttaggagatcgagattattttggttaatatagtgaaatttcgtttatattaaaaaaaaatataaaaaaattagtcgggtatagtggcgggcgtttgtagttttagttattcgggaagttgaggtaggagaatggcgtgaatttcggaggtggagtttgtagtgagtcgagatcgcgttattgtattttagtttgggcgatagagcgagatttcgttttaaaaataaaataaaataaaataaaataaagaatttgtatataattaatagaatatattttaataaatatttaatgttattttttaaacgtattttgtttgttttttttttgtgtttttttgagttagttaggtagtttatattgagttgggaagagttaataacgtttttaatttttttttgtttttttgtttgaattttgatatttttttttttgttttttgtataacgtatttggtatttatagagatttagggaggagagaggatattagaaatcgtttggttatatttaattaaaatgtagatttgattttgtttcgaaattgtttttggttttttgttttttgtcgtaagggagtaggtttgaattttatttggttttattgttttttttttttaattttaaattttaaagtttaagttttattaagttagtttgtttcgagggagttagttttttttgtttgtttgtttgggagatagggttttattttgttatttaggttgtagtgtatggtttattgtagtttcgatagatagttcgggtttaagcgatttttttattttagtttttacgagtagttgggataataggcgtacgttattgtatttaattaattttttgtagttttatttttttgtagagacggggtttcgttatgttatttaggttggttttaaatttttggatttaagcgattcgttcgtttcgattttttaaagtgttgggattataggtttgagttattgcgtttggttagagttagtttttttaagattgtttgtggattcgattttttagtttggaattgttataaatagttaaattttttttttgggtattatttaattttatattttagttttggaaatgtatagtttaagtttttttggttttgtgggttcgtggtttttttagttagggtaaattttttatttttgttttagaggtttgtgtttaaatttggtgagggtatatagtatattaggtagtaaggataaatttagttatttggtttttattaaattgagtatttttaggatggagtttgttttaatttatttgggtaggttttttgttattgaatagagagttcggtattgtgtttagtatttgataaatatttgttgaatgaataaacggagttagtattttatttattgtgttaagttttattgtattatttttgagagtatttagtttgtgtttgaattttttttattatgagattaagtttttaatttatgaggttttattttataagtttttatttgtattatttattttattttttagtagtttgtagaggagtaagagagggaaatattgttggttttttttaagtagatagtattaattaagtagatagtattaattaagagggtaggaatttttttttgtttaaaattgggatataatttataataaagtatgttataagtgattattggaaaggatcgattaattggaggtgaggagtagagagaaggtgaaggtgatgagataatggaagttggttttgaggtttttaatttgagagtattgggaagatggtggtataattaatagaaatggtggagaagttgttgtgggagtggggggataattatgtgttttttagttagagaggataggagaaatggttggttagagttgtagattttatttaattaagattatatagttcgtttggggatgaggggatttgttttttgttttttaggtgagtggtttgtttttatgttataggttattaaaggatttgaggaaattaaagtattttttttagtatattttttttttttaatttgtatttatgtataaatgatattttaataataataaaggaaatttggaaagagttaagtaaatcgtaaatagtatttttttaaatattttaaatatattatttgtatttatttgtttttttttttgttttttttttgatcggtttgtgtgtatgtatatttttatataattttagttttagtatatagattattttgtattttgtttttattatattagaaatattttttaagttgttgtataatttttataattattattttaatagttgtattatattttattaagtggatgttttataattaatataagttttttgttgttggatatttagttttttgtattttttttttattatgcgtgttgttatagtgaatagtttttttttttagttgaatattttttttagaataaatttatttttttaattaatatttattgagtgtttattttgtgttaagttttgtattatgaattgaggatgtagagattattaagatttagtttttgtttttaaggaataaataataatatgagaagtaggttgcgggggtggggagggaaagttaggagaagtttatcggagaaaaaaatggtggtgaagcgggttgtaatatagagggtagttaaatttttaggattttggattttagtttgtgggtagataatggagagttgttgaaagattttaaggaggatagaattagtgttgtgttttaaaaagataatttaaatttttttacgtagaatggtttgaaggaaatgtgagtggtttggaggatatgggttaggtttttgttaataatataagtaagaaattgaaggttgttgagatttagatttgtgattttggggttgaggaggagggggtttaaagatttaaaagatattgtagatggagtattggtaggatttgattgggaaatgatgaatgtgtaggggtgagggataacgaggtaattaggatgatttttaggtttttggtttggtgatttagtgatgtatttatcggaataaggaggaggtagaggagtgtgtttgaggagaagatgaggagatgagtttgagatatagggttgagggtgcgggggaatattagtttggagatattttatagatttagttttgagtttaggcgtatgatttgggttggagatttagatgtgggagaagtggtgtatttgtgattaatttaggggagtggttggtagtaatttttagaaagagagtattgtgttaaagagtttgaatttttttgtagtagtatatgtgtattgttaaaaagtttttttcggaggatttttgtaattttattatattcgtgttagtttggtaattatttatttttaatttttgttaatgtaattattttaatttatattaaaaaattttaattaggtcgggtgtagtggtttatgattgtaattttagtattttgggaggttaaggtaggcggattatttgaggttaaaagttcgagattagtttggttaatatggtgaaattttatttttattaaaaatataaaaaattagtaaggcgtggtggtatgtatttgtaattttagttattcgggaggttgaggtaggagaatcgtttgaattttggaggtagaggttgtagtgagttgagatcgtgttattgtattttaatttgggtgatagagtgaaattttattttaaaaaaaaaaaaagttattagtgaggttgaatattttgttatatgtttgtttatttattttatttttttttgtgtgaagtatttttggttatttatttttggggatatgttttttgggtagatttttatgaatgttttataaaatatagatattaattttttgttatattaattggttattttttttttggttgtattttttagtgtataaatttttaggattttatatagttaaatttgttgatttttttttttgtaatttttttttgtttttttaaagtttagaaagttgttattagtttaaagatttattagatatttaattttatttaataatatatatttaattttttattaatttggggttgataaagataaatagaataaatagaaaaaaattatatttttttttaaatgttagttaatcgatatttttattataatatattgaatgattttttttttgttgttttgtaaaaatcgttttagtatataataaatgaaattatagagtatatggttttagttttgtaagtgtgggaatgggagatgagtttttgaagagagaattgagatatacgtttttagtattttgttttagattattaaggaggatagacgtgtatgagtagtttatggtagtagtgttggaattataggtttatgttattatatttagttttaaatttatttttaaaatagttttattagttaggtgcggtggtttatgttagtaattttagaattttgggaggttgaggtgggtagatcgtttgagtttaggagtttgaaattagtttgggtaatatagtaagattttatgtttataaataaaaataaataaaattagttaggtatggtggtttatattagtagttttagttattttggaggttgag

SEQ ID NO: 1599 - DNA, 5323 bp, Artificial Sequence
  chemically treated genomic DNA (Homo sapiens)
agtttttttagttgttagtgatggtcgtttggtttttgataagggtagtgatattagatttttttgttgaagggaatttgaggtatttttttaattagtttttttaaaggtatgtgttatttttagtgttgagtaagagggaagtttagtattgtgaagtgacgtgttcgggtttaaggtttttgtttttttttggttttatgtttagattgtatttggttatttggatagattgtagggtttagattttggtttagttggttaggattatttttttagggggagtattttttttgttttagttttattttttgaagataaatggtaatattaagaagtagtgtttaattttattttatttttattgaggtttagatatgattgtgggtagagaagttttagtagggattttggttattttgtagatttgtttttgagggtttgttgatagtattgagtttattttaagagtggaatttagtcgagggttttatatttattatttagttagttttttatttagttttatgtagtaattgttatttttttttttttttttttttttttttttttgagatatagaatttcgttatgttgtttaggttggagtattgtggttattcgtaggtatgattatagtatattatagttttgaatgtttgggttttagggatttttttgttttagttttttgaatttttgggattgtaggtatgtgttattatatttcgtttgttattttttatttttaattttcggataggaaatgggtttttagaataaatgtagttagatttttattatttatgcgttttatatttatgggtataattcgttgtggatcgaaaatgtagttaggtttaggatgattgtgtttgtattggatatgtataaatttttttttttgttgttattttttaaataatgtagtttaataataatttatatagtatttatattgtattaggtattatagtagtaattcggagatgatttaaaatatatggaagaatgtgtagaggttaaatgtagatattgtgttattttatataagagatttgattttagttattgaagttgagtttaaaaaataaagtaaaaaaatatatgtaaaggagttaagtatttatggattttgggatttatggggattttggagttaattttttgtggatattaagggataattttaatttattttttaagatatttagtcgggtacggtggtttatatttgtaattttagtattttgggaggttgatgtgaggatcgtttgagtttagtattttgaggtaagtttgggtaatatagtaagattttgtttttaaaataaaatgtgtgtgtgtatttagtggggaatggtggtgtatgtttgtggttttagttattcgggaggcggaggtgggaggatcgtttgagtttaggaggttgaggttgtagtgagttatgattgtgttattgtatttcgttttgggtgatagagtaatattttgttttaaaaaaaaaaaaaaatttatagttagggagtaaaggaggttttgagtagtttgataggtgttgtgtagttggtagggggcgtcgttgtttatagaaggggttaagtttattttgaattttaatttttattgtttttatttagtttatttttaggagggagtggtttcgttatttaatgattaagaggaggtgttggatttggttatttaagattagagaggtgaagttattagtttttattgtttagagtttttttatttgtgagggggatagttatggtaattatttgggattgtttttgggagatttaaatgggtttaggtttagttttgatgatttaggtattgtatttcgtatagatgaggaagttgagggttttagagaggtagagtgaatagttgagttttagggagttttttcgagttgaaggttttatattttacgacgtgtgtattttttgtcggatagtttttgtttgaggtggttatggtgtttgtgttgagttggggatgaagggagttatgggggcggtaggtgtgattgagttatttggttggtttttttggtagttaggttatggtgggtgagggatattaaattgtttatgttatagttgatatattagatagtttttttgttatttttgatttattagtgtttggtttttggttgtttgtagggttattatttgtgtattttgggttagtgtttagggaattttttggaattttagatgttatttgaggatataagggtataggggatggtgaagtttgaggtttttgaaattttttattaggtatgtttggttttgttgtttttggtttgtgattttttaggttttggttattatgtttataaaatgggaataataaattatagttgagtttgatttagggattagatgatatgtatgaatatgttcggttatgtttatttttgtttattattttgtttttagtataagggtttggtatatagtaggtatttagtataggatcgcggaatgaatgaatgtattgggttttagaatatagtagaggttttggggtttgaaggttgtggtgtgaggagggggtggggatattgaagtttagtttagttttttttgtagtattttgttatttgagggacggggaagagtgtggggttttatagagaggagatatgggtatggggttaggggagaggtatttgtattgtttttgagatttttgttttatttttggatagattattattttggagagagtggagtagaaataggagagggattataaatttatttaatttgttttatttaacgaaggatgattatgataaacgtgtttttagtgagatattattgtgtgttcgatttgagttaattattgtgtttttgtattttatgtttgttttgttttataataattattaggaagaggtgatttttgttttatattggagaaattgaggtttagtttagataaatggatataggtgaaatagttagtaaggagtatagttgggatttgaagttcgggcggatttaggagtggttttagttttagtttattttttttgggtagttatgtttagtttagagagttgggagaattaggtggtgggagtgggggtgttttaaggttgtgttttggtgttaatttttggggtttttggttatatttagtttgtggtgagtgtttttggtttgttggagtagttattggaatgtttggggtttgagtggttttttgtggttgtagtttttttggtaatgaagaaatattgttgaggttaagagtttagattgttagaggggaaatttagttttttttttttgtatggttttttgttgggaagggttatagttattttttattttcgttttttgttagatatttagaggaggttttttttagtggtatagttatggggttggagggggtataggtagtttagttaggattttttatgggaagtgtgtggtggttttttagatttgtttgttaacgggaggttttgtttataattttttttttttattggagttcgtttaggaagttagaattagtatggggatgtttaggtttttaagattttttaggattatgggtaggttattttttagtttagtttttgtttattttgaagattttaaggataagagggttttaattttatcgagttaggttttttttaatttaaggtttttttaggcgttgttaaggaaattgatgtagtagttaaagagtttggtttaggtttttatgataatttattatagtttattagggtttatttatttgtgatgttatttgagttttaaatggatgtttttttatttttattatatttgttataattagatgttatagtttgatagtaggtttttgttataaaatattttatagtttgatttgtaatttttagatttttgagagatgagtagggagttaagatattttttatgttttgattatattttgtgtttatgttttttttgggtgggggtttgaatttttaggttttggatgtgttttgggtggttggtttagtttatagttagagggaagaagggagattttgacgattcgaagtggttggtttttgttggtatttaatatttattggtttggatttttttaattttgggtaatttttagtttaggagtagaataattagagttacggttagggttagggttggggtagattatttatttttagtagagttgttggtagttgtttggtgggtgttgggaggtgggatggggattgagtttaatttttttttttttttgggttggggtattttttttagggtttaagtaggtatttttatttgtaattttgttagagttgtttttatttttaatagtttttttagggtttttaggggtttatggggtgatattaatttttatattgaaggttaggtttattagggagaatttttaattttaggatggggagtggaaaggattttgtgtgaatttaggatattttttaaattttagtttagatttgagtttatggggagtgggtgttatgggtagagaagggggatttttgtttagtttgtaattagtttatttgttaaaaggacgagtcgggatttggggagaggaaagggagaatttagttttacggggttagatcgaatttttttttagagggtagttgttgtttttggttgattgggtttatttcgttgtttgtttttttattacgtatttttttcgtaatttcgtttttttttttttttttatatatatttttagtttcggatttcgtttatcggttagtttttttatttttagatagttatcgttatttttttggcgggtagggcggggtgtcggggatgtaaggttcgaggaagagggtgggggatttttttggtgggggtggatagatacgttagttttcgtagtagcgtggatcgggggcgggagcgggggcgggtggaggtttaaataggcggttttggagttagagtttagtgcgggttgagaaggcggtggttgtagtagtagcggcggcggaaattttaaagttcgagttcggattacgagtgcgtggttttttaattcggattttagttttgagcgtgtttgtgtgcgagtgggtgagtgttttggcggagcggggtcggggcggttgtagatggatgcgttaggttcggaggggtttcgggtgagggcgtcgcgatttgggggttgggggagggttgcggcgggatttcggtcggagtatttcgtttgatttcgggttgggtaggtgcgtttcgggtttcgtttttttcgcggtttatacggttattcgggtttttgattttttaga

SEQ ID NO: 1600 - DNA, 5323 bp, Artificial Sequence
  chemically treated genomic DNA (Homo sapiens)
tttaggggattaggaattcgagtggtcgtgtaagtcgcgagggaggcgggattcggggcgtatttgtttaattcggagttaggcgggatgtttcggtcgaggtttcgtcgtagtttttttttagtttttaggtcgcggcgtttttattcgggattttttcggatttggcgtatttatttgtagtcgtttcgatttcgtttcgttaggatatttatttattcgtatatagatacgtttaggattaggattcggattaggaggttacgtattcgtagttcggattcggattttagggttttcgtcgtcgttgttgttgtagttatcgtttttttagttcgtattgggttttggttttagagtcgtttatttaagtttttattcgttttcgttttcgttttcggtttacgttgttgcgggggttgacgtgtttgtttatttttattaggggaattttttattttttttttcggattttatattttcgatatttcgttttattcgttaggggagtagcggtagttgtttgggaatagaggggttgatcggtaggcgaggttcggagttgagggtgtgtgtgagaaggagagagagagcgaggttgcggggggagtacgtgatggggaggtaggtagcggggtaaatttaattagttaaaagtagtaattgttttttggagaagaattcggtttggtttcgtgagattgaatttttttttttttttttttaagtttcggttcgtttttttagtaagtaagttagttataggttggatagagattttttttttttgtttatgatatttattttttataggtttaggtttgagttagaatttagggggtgttttaaatttatataaaattttttttattttttattttggagttgaagattttttttaatgagtttaatttttagtgtgagggttggtgttattttatgagtttttgggggttttgagagggttgttgggggtgggggtagttttgatagagttgtaggtggagatgtttgtttgaattttggggaggatattttagtttagaagagggaagggattaaatttagtttttattttattttttagtatttattaggtagttgttagtaattttgttaaaaataaataatttgttttagttttggttttggtcgtggttttggttattttgtttttggattggaagttgtttagagttggggaaatttaggttaatgggtgttgaatgttagtaggagttagttatttcgagtcgttaaggtttttttttttttttttagttgtaggttgagttagttatttagggtatatttagggtttggaggtttaggtttttatttaaaaggggtataaatatagggtgtggttaaggtatgaggagtgttttagttttttgtttattttttaggggtttgagggttgtaggttaggttgtgaggtattttgtgatagggatttgttattagattgtgatatttgattgtgataagtgtggtgggggtgggagggtatttatttggggtttaggtgatattatagatggatggattttggtgggttgtggtaggttgttatggagatttgggttaggttttttggttgttgtattagtttttttggtaacgtttaagaaggttttggattgaggagggtttggttcggtaagattagggtttttttgtttttgaggtttttaaagtaggtaaaagttgggttgaggggtggtttgtttatggttttaggggattttggaggtttgagtatttttatgttggttttggttttttgaacgaattttagtgggaagaggaagttatgggtagagtttttcgttagtaggtaagtttaaagagttattatatattttttatgaggaattttggttgggttgtttgtgttttttttaattttatgattgtgttattggaaagagttttttttgggtgtttggtagagggcgagggtggggggtagttgtggttttttttagtagggggttatgtaaagaaggagggttgggttttttttttggtaatttgagtttttgattttagtagtgtttttttattgttaagggaattgtaattataaagggttatttaagttttaggtattttagtggttgttttaataggttagagatatttattataagttagatatggttaggggttttagggattaatattaggatataattttgagatatttttatttttattatttggtttttttagttttttgggttgagtatggttgtttaggaggaataaattgaggttagaattatttttaggttcgttcgggttttagattttagttgtgttttttgttagttgttttatttgtgtttatttatttaggttgagttttagtttttttagtgtagaatagggattatttttttttgatggttattataagataaaataaatatgaaatgtagaggtatagtagttggtttaagtcgggtatatagtaatattttattaagagtacgtttattatgattatttttcgttggatggggtaggttaggtgaatttgtggttttttttttgtttttgttttattttttttaggatggtggtttgtttaggagtggggtagaggttttaggaataatgtagatattttttttttagttttatatttatgttttttttttgtaggattttatattttttttcgttttttaggtgataagatgttgtagagggaattgggttgggttttagtgtttttattttttttttatattatagtttttaggttttagagtttttgttgtgttttaaggtttaatgtatttatttatttcgcggttttgtattaaatatttattgtgtgttaggtttttgtgttgggggtaggatgatgagtaaaaatagatatggtcgggtatgtttatatatgttatttaatttttgggttaaatttagttatgatttgttgtttttattttgtagatatggtaattaaagtttgaggagttataggttagaaatagtagagttagatatatttggtggagggttttaggaattttaaattttattattttttgtatttttgtgtttttagatagtatttggggttttagaaagttttttgggtattggtttaggatgtatagatggtggttttgtaggtagttaggggttaggtattgatgagttaagagtgataagagaattatttgatatgttagttgtggtatgagtagtttggtgttttttatttattatggtttggttgttaggaaggttagttaaatgatttaattatatttgtcgtttttatgattttttttatttttagtttaatatagatattatggttattttagatagggattgttcggtagaaggtatatacgtcgtagggtgtgaggtttttagttcgggaaggttttttggggtttagttgtttattttgtttttttggagtttttagtttttttatttgtgcgggatatagtgtttagattattagagttaggtttagatttatttaaattttttaagggtagttttaagtggttgttatgattattttttttatagatgaagaagttttgggtaataggggttgatggttttatttttttgattttaggtagttagatttagtatttttttttggttattaggtggcgaggttatttttttttaagagtgagttgagtgggagtaataggagttggggtttaggatgggtttagttttttttgtaggtaacggcgttttttgttagttgtatagtatttattaagttgtttagggttttttttattttttagttgtaagtttttttttttttttgagatagggtgttgttttgttatttaggacggagtgtagtggtataattatagtttattgtagttttaattttttgggtttaagcgatttttttattttcgtttttcgagtagttggaattataggtatgtattattattttttattaaatatatatatatattttattttagagatagggttttgttatgttgtttaggtttgttttaaaatgttgggtttaggcgatttttatattagttttttaaaatgttgggattataagtgtgagttatcgtgttcggttagatgttttgagaagtaaattagagttgttttttggtatttataggggattggttttaggatttttatgaattttaaaatttatgaatatttaatttttttatatatatttttttattttgttttttaaatttaattttagtggttgagattaagttttttatataaaatggtatagtatttgtatttaatttttgtatatttttttatatattttaagttattttcggattattattgtaatatttaatataatgtaaatgttatgtaagttgttgttagattgtattgtttagggaataataataagaaaaaaagtttgtatatgtttagtatagatatagttattttaggtttaattatattttcgatttatagcgggttgtatttatggatgtagaacgtatggataatggaggtttgattatatttattttagaagtttattttttgttcgaaaattggggataaagaatagtaagcgaggtgtgatggtatatgtttgtagttttaagaatttaggaggttgaggtaagagaatttttggaatttaggtatttaaggttgtagtgtgttataattatatttacggatagttatagtattttagtttgggtaatatagcgagattttgtgttttaaaaaaaaaaaaaaaaaagagagagagaggatagtaattgttgtatagggttggatggagaattgattagatagtaagtgtaaagttttcgattgaattttatttttaggataggtttaatgttgttagtaggtttttaagaatagatttgtaaaatggttaggatttttattgaggtttttttgtttataattatatttgggttttagtagggatgaggtggggttgggtattgttttttaatattgttatttatttttagagaatgagattaaagtaggaaggatgttttttttgggaaagtgattttaattagttaagttaaggtttaagttttatagtttgtttaggtgattaaatgtaatttgggtatagggttaaggggaggtagaggttttagattcgagtacgttattttatagtgttgagttttttttttatttaatattgggggtgatatatgtttttgggagggttgattgagagggtgttttaggttttttttaatagagaagtttgatgttattgtttttattagggattagacggttattattaatagttggaaaagtt

SEQ ID NO: 1601 - DNA, 12138 bp, Artificial Sequence
  chemically treated genomic DNA (Homo sapiens)
tttttttggttagtagacgtttaaatattttttttaggttttttttttgtttttgttgaggtttttaggtttttaggaaggtagaaggaggatttaggattggtagagagagtatttttatatttatttttttgtttgtagagtaggaggagtggtatttggaattgatttatggttttagtaattattagttttttaaagggttttaagtttttagattagtttgtgtgtgtgtatgtttagtgtgcggtggtatgtttttataatttagttttgtaaagaagttttttgcgatcggttcgtatataggttttttagtttggtaggttttattatttttatttttataataatttttatatttttaagtgttttgttagtatatttgattttttaaatagttttgtaagataaattgaattggtattatttttattaggttaaagttaaggattagtaagtttagatgatttgatttgtttaagattatataggagtttagattttttttgaattattgttttttaaaggttaatattttgtttttttatgtttttttatatttttcgttagtagagttttgaaagagattttattttttttgtcgtattatagattttggtttgaattttgtaatatttatttatgattttttttgaattttatgagatggttagaagaggtagtattttggttttttggggtgggtgaaggattatttgtaaggttgttttaatttttttatttttagtttgggttaggtttattgattgtatgtgttttgttttttggggtttggtttagattggataatattttaaggtgtgataggagtaagtggggaaggaaggtatggaaaatggtgattcggagtaggttgtaggttttgtgttagtttgagttttaggaaatatagttagttatgagaaggtagagattttattgaggatgtcgtttgtggaatttaagtttatggttgtattagtttagagttagagtatttattattggtggggtttaggtattggaaaattatttgttagatagatgatggtatgatgatatttgtttttgttttttatttgttttttttttttttattattttttttttttttgttttttttttttggtttttttttttatttgtttatttttttgtttttttttttttataattttatttttttttttttgttttttttttaatttatttttattttttttttttgtttttttttttattttatatttatggttgtttaatttttgtttatttttttttttttttttttttttatttgtttgtttattttattttttttttttgtcgttttatttttatttttttattttgtttttgttttttcgtgttgtttttttttttttttcgttttttttttattattttatttaatatatgtttttttttttttttttgttttatgttttgtagggatttgatttatttcgattcggagttttttttttatatgagtgatcgttagcgtgtggtttttaaatttttttagatgagtcgtgttgtagacgaggtttttaatgttatgatttttaatggtagttatcggttgatcgagggggtttatttagggtttttggtggagaaattgtttgatagttttgttttggttaagaaggtattattggcgttgaattatgggttggataaggtttatagtttgatggagttgagttttttagttttatttggtggttttttatatttggatttttttcgtttttatagttttagttttttagatttagatatattatttttagttggggatagtcgagttttgtaagttagtcgaaatatacgtattttttatttggttggtaagaaggttgtggttgaggaggataatggttttattggcgaggaaatagattttagtttaggtcggaagaagtttttttttaaaatttttaagaagttttttaagaagtaggtaggatggggtggtagtaaagggatagtttgtttttttttgggtgttttgtttttttttttttttttttttttaagataattggttttaagagtggggtatgggaagggttggtttaggggtttgggtattgtatatatttgtttttttatttttgggttttttattattatttattaattgattattatggtttgtttgttttgttttcgttttaattatgggttgttgttgttattttttttttattttagtgtatgttttagttgttgtttttttagtttttagttttatttttggggtttagtttttgtttttgttgttttagttttgaggtttggttttttgtttttgttttttgttttcgggttttttttttttattattttttaattttttttagtagttgtagggaagataggacgagtagtttttgatatgtgtgttttagatttgttttattttatttatagtggttttgtttgttttagattggggttagggtttaatttttgaagtttgttttttggtattgatgtgggttagaaggagttttattttaattttatttaggtttttagggatttatgggggagtgaaattaatttttagagaataatttattagagatttttaaagagaggttaggtttgggaatgggttgggagaggtatttgtttattggagtatgagtggatgttagaattgtaggttataaggtagttattttttttttttatttttatttatatttgttttttttttatttttgtttttttatattgtaggaggatttgtttttaagaggtgttgttttaaagttttttaagtattaatatttttagggtttaggataagtggtttttttggttaggagagttatagttatgatatagggtttttatggagttttggagttgttgggtaaggatgttgttattttttgaattaaaagataaataggttaaaaggaaaaaaagtaatttgaattttttaagtgtttacgttgtatattttttttgttagattttatttttatgttattttgtagttttggttagaggtttaaaaaggatataattagtttggggaaggggtggttaaggaagatggtataggtgaaggcggttgtgtgattatttttttttattttttttattttttagataatttttttttttatttgtttttgttatggttgtaaaggtattttttttttgttttattttttgttatatttttattttgggattttattttgggtttggggtgggtatatttggggttggttttaggagggtgttaggttgtagattgttttgtattttttggatatttttaaatggggttttttgtgttattttataaaattttttgaagtttaataaagtatgtaggagattttaattattgttggttttgatttttattgtgttttttgtgttgtggtatgatgggataaagagataattttttttttgtttagggaaaatgaaatttgaatgtatatgtttagaagttttgtgggtagggttattagataaatgtaggatgattagttaaatgtgaattttagataaatagtttttaaagtataatttttttttatgtagtatttgggatatatttttatttgttaaattgggaaattttatgtttgggtaaatttgattttatttattttataattttatttacgatttttaaaaaatatatttatttaatttttttttttttttttttgttttttttgagacggcgttttatttttttgtttaggttagggtgtaatggcgcgattttggtttattgtaatttttgtttttagcgtttaagcgatttttttgttttagttttttgagtagttgggattataggcgcgtgttattatgtttggttattttttgtatttttagtagcgggggggttttattacgttggttaggttggtttcgaatttttgatttcgtgatttgttcgttttggttttttatagtgttgggattataggagtgaagtatcgcgttggtttattttttttattttttgtagaaatggggttttattatgttgtttaggtttattttaatatttggttttatatgatgttttcgttttagttttttaaaatgttgtaattataggtttatttacgattttttatgatttttgaaattattttatagggagtttgggtagtttttggagggtagtgagaaattaacgaaaaggttttagggaaaagatgttatagatgaaattttataaagatcgttttgggtgtagtttaaattagaagtttttatattagttttatatattacggtttttatttatttttattttttattttaagttattaagtttattttatttttataaggtaaatattttgtttttgttattatttattgaagaattttaaaagtaaatgggtattgattttgttttgtttaaaatttttttagggttttgatttgcgttaggataaaatttaaacgttatcggttttgcgcggtttttttttagttttagagtgttagttttttggtcgatttaaaagttttggggttttaagttgtttacggttgtggagtttgggttggagtttatagcggacggtagtgttaggattattataataaatgttagagtaagaaaaacgttttcgtcggttaggttttgttattttaaaaataaattaatcgtttttttttcggcggagacgcgtaggtgagagggcggcgtttgatttagcgggttttaggtgttacgttagggtttcgagggtttcgaattcggtttgtttatataaaatatggtagtaggagagtagtattttcgtcgggtatgtttatatttaatggggtttatgggagaggcgtagttttttgggttttgtttagatttaatatggcggttatacgtcgtttgttagtttgtgaagtttatttcgggcgtgggtcgtagcgtcgagtaacgttattcgaatttcgtcgcgtttttttgtgcgttacgggtggcgggcgcgggaaggggatttggattgttgcgtttttgttttgaagaaagtgttgtttggttttaattttagtttttttttttgagtagcgtttggaatttaattttttttattttgttattttttcgatttcgtcggcgttttagagtcgtagtttagttttggattttttagagttttagttattagttgcgatgtatgtgattaagtaaggtaaggggggataaggtgggcgagaaggaaggttaagggatgcgggttgtcgtcgtcggagttgatgtttagttcgttcgtcgttttcgttgtttttcgtttttttcgtatttttcgtcgcggtttttcgttttgttagttcgttcggttttttgtttttagttagtttgtttcgaatttttttcgggtttttaggttgcgttttttcggttttgttattttgtcgttttttaaaaggataatatttatttcgtatcgagtagtgattgcgtacgtcgagtatttgttaggtattattttatttttttttgtaagtttttgagagatgattagtttattatagatgaggaaattgatttaaagttatttataggtgataatatagtttgatttgaaaatcgtggggttggtgagttgttttaggtatagggtcggggggtagttaggaaagaaggagggggtttttttatttttcgtaggtatttgttagtttattgattttttttgtggggtgaggataggagtgtggcgtggaaaaaatagattttagatagatagtattttcgagtttttttttttttatgggaagagatgttgaattagagaagggtggttgagatattttttgataagatggggattgggaagagttaggaattcgtatttttttttaatagtttttttttattagatttgttaagtgttcgttttgtgtttagttttttgtttggttttgtgagattgtaggaggagatagtttttgttttgggaataggttttatcgggttggaaaaataagagtaatatatttttaataatcgtatgagatacgtatgaataagttttgagttgaatttatttgtttttgttaaagtaatataatgattttaaaattgtaggtatttagtaaatattggttaatcgattggttgtttttattttgttttttaggttgtgaatattttaaagatggagatttgtttgagatagagttttgttttgttatttaggatggaatgtagtggtgtaattatagtttattgtaattttgaagttttgggtttaagcgatgtttttgttttagttttttaagtagttgggattataggtatgtattattatgagtggttaatttttaaaaatttttggtagtaaaggagttttgttgtgttttttagtttggttttgaatttttggttttaaattatttttttttttttggttttttaaagtgttgggaatataagtaagatggagatttttttgtttacgtttagtataggatttgatatgaatagatttttaaagaatgaatgaaaatagttgtattaaaatgtaggatacgatgaatgttgtgaataagtaggtagttgatttggtttaattatagttaatgtttagattggtttaattatagagaagagttggaaaggtggatagtagtggttttttttgtttttggtattttgagaatattattttgtgaatttttttagtttatattttagttgattaaagagtaaaataatatagtgtatttttattgatttatttataagagtgagagttgagtatttatttttgtatttttatttttttatattattatttatttgtatttttttagagaaggagtttcgttatgttgtttaggtttgttttgaatttttgggtttaagtattttttttattttagttttttaaagtgtttggattatagtgttgggagttatcgtatttggtttgagtatttattttttaaatttttagatatgggagagatgttaggatggtttatgataagttagtaataaagatgaattgaaaatgtatggatttagatgattagaatgggtaaaatttaattttgtgttgaattttgaatttttagagtttatttttaaatattttcgtttaaaaagtgttattttggtttggcgtggtagggtatggtggtttacgtttgtaattttagtattttgggaggttgaggtgggtggattatttgaggtgtggagtttgagattagttgggttaatatggtggaatttcgtttttattaaaaatataaaagttagtcggacggtagtggtttgtatttgtaattttagttatttaggaggttgaggtaggagaatcgtttgagtttgggaggtagaggttgttgaaatcgtgttattgtattttagtttaggcgatagagtgatattttgttttaaaaaaaaaaaaaaaaaaaaaaattttaattgttagttataattagttttaaaaagtagagtttatttttttatttttttatagagtataatttgatttaaatggtttatgttgtaaattttgttattgtagtatttagtaagatttaatatataatatgtatttagatttgtttgtttttttttttttttatatttttatgtttttatattttaatgttttttaatatgtatagggtttttggttttttggattttttttgtatttttttatttttggtatgttagtggaatagtagattaatttttatagtttttgttaattttttttgaaatggggttttgttttgttatttaggttggagtgtagtggtgtgattttagtttattgtagtgtttgttttttgggtttaagagatttttttgttttagtttttttagtagttgggattatagatgtgtgttattacgtttggttagtttttgttatttttaataataagggtaattggaagttgattttgaagtatttattgaatatgttaatgttttgttaaatattgtgagggtagtaatggagaaggtagttttatttttaaagaatttaaaattgttagggatttaggaataatttatatgagaattattagatagaagagaatagtagatgagttttttttatttgttattttgagttattttttttaatgggagagtattattttttaaggagattatggttaaaaaaataaatattgagaattattgtagtaaatgataaagtagttaattgagttgtaaattgttttggaatttagtgtagtatttttaaaattttggattgtaatttatagtaaaaaataaaatattttatagatatgtgtatatatgtggatatatataaaatgatataaaagtttacgaaataatgtttttgaaagtagtttatttgtattttaattttttttttattttagattttttttttatttttgttttttttttttttttttttttttttttttttttttttttttttttttttttttttttttgttttttttttttttttttttttttttttttttttgtttttttttttttttttttttttttttttttttttttcgttttttttttttttttttttttttttttttttattttatttatagtttgttatattattttataattttgtggatatcgtgttgtttatcgggattgtagtgatgagtaggtagatatggttttagtttttaaagattttataattaattgagaaagatagataaataaagaagtaatatgataaaatatgataaatattttgataggtaaagtataggtagtagaggttatttatttagttatttataaagtatttatttagtatttttttgtgttaggaatcgttgtaggtattagagattttgtagtgaataaagttaaattatattttttattgagttgatattttggtgtgggtgggagtggtaagtgtatataagaaataagaagtaaatataataattagttaattttagatattgattaatgagatgatagtaaaataggattatgtgataaagatgaatgagaaaataattttggattgggtagttaggaaaggtttttttgagaagttaatatttgagttgaattttaaatagtattaagagttagtaatgtgagatttgtggtttgaatattttcggtagagggaattagaaagtttgtattttgtggaaaaggtacgtatttttggttttataggattagggaagtttttttgaagagagaagaatgaaagatagtttatagttaagaggaaattatattagtatgttagaggattttttaattttattttttattttttgagacggagttttgttatgttgtttaggttggagtgtagtggtgtgattttggtttattgtaatttttgttttttaggtttaggtaattttgttttagtttttcgagtagttgggattatagtatatttagttaatttttttttttttttttttgtatttttagtagagatggggttttattatattggttagattggtttcgaatttttgattttaggtgattcgtttgttttggttttttaaagtgttaggaatataggttgagttattatgttttgttggttagaggattttaaaagaggaaaaggttagtgtgagttaaaagtggttgaggtaggttttatggaggtgtgagatttggagggtgagtaggagttagatgtatggaaaggtggaagaggaatttttaggtagagtaaggtataagtaatgatgtggatatgggaatgggaagtttttttgggatttatattttatagggaatagttgaagagatttggggttaaattaagaaaggttttgtttgagagaagaggataatgtaggtagtgagaagtagggattagtgatgtgataaaattaatatttggtttgaaaaattaattaagtggaatgatagaatagagaattgtgtgttattggatttttagatttttagtttgttttttatttttaagtgtgagttaagataattattaatgtatttttttttttttgttagttttttgattgattttagaatttttggtagttgtagaattttttttttgttaagttgtttttttttttttattgtatgtataattgtagaacgttaatgttgttttgtagttatttgtttgtttagttatttaattgttagagtattgaggttttagttttagtgttagttagttaatttattttattttagagttaaatgttgtagatgtgagtttgatgagaaaattattataatggtgattagaaagagaggggttaatatattagtgtagaagaaaaagtaatttgttttagtgataatgggttaatagtgatgttttattgtttatttattttttattaaatgtttgagaatttgttttgttttaggtattaaatttgagaatatagatgtgaattagagggttaaataaatgtaaatatatttagtatgttttttattggttattttaggttgagtattttttatttaaaatgtttgggtttagaagtgtttcggattttggatttgttttagattttggaatattcgtattatatttattggttgggtatttttaattagaaaatttaaaatttgaaatggtttaaggaatattttttttgaatattgtgttggtattgaaaaagttttggattttggagtgttttggattttggaattttggattaaggatatttagtttatagttataatggattgtagggtataaaagagataaaaattaaattagtgtgagatattaatatttattgagtgtttattgtgtattatatattgtgatttttttttttttataggagtagttttattttataacgaggtatagttgtaattatgttaaagttgttataataaaagtattttttattttatttaattttattgttatagtaaattgattaggtaagtaaaatagatataataattaatttttttttataaatgaagatttgtgaaatgattgattgtgttttgtggtttgtttaaggttaaggttgtttggtggttggatatatttattatttttggtaagaataaataaaggtcggatgagttattatttgaggttaaattaagagtagtaagatttttttgtttagaaggataaagatataatttaagtttaaaattatgaaaaatattaggtaaaatatatagtatgttagatggggtaagtgtaatggagaaaaagtatagaaggggaagggggataagaagagtaagggttttatttggggtattgtaatttaaaatggaattattagggaaagttatattgagaaggtgatgatattgagtaaaagatttaaaggagatatatagtaagaaggttaagttgttaaggtataataggaaggaaggtgggagagttggaggtgaaattgggaagtgggtgtataggataagtggtataggattttgtggatttttttttttttttagttggagttttatttttgttgtttaggttggaatgtaatggcgtgattttagtttattgtaattttcgttttttgggtttaaataatttttttgttttagtttttcgaatagttgggattataggtttttgttattatgtttagttaattttttgtatttttagtagagacggggttttattatattgattaggttgatttcgaatttttgatttttagtgatttatttttttatttcgtttttttggttttttaaagtgttgggattataggtgtgagttattaggtttggtttgtggattgttataataattttgatttttattttggagattataagttattattaggagttttgaaggaggtaatgatatgattttgagtttaatttttaaagggtaattttggttgttatgtgggatgggggaaaaatttaggaaattattcgtaaacgtttgtttgtatagaatttatattttttgaaggtgatattagagaagataatttttttatgaattttttgagggggttttaattttttttgtgaaatagtattttatgttggttaatttatatgttaattatatttgattttttgatattgtagttttaataattgttaatatgaatttaataattgttgatatgatttgattttttaga

SEQ ID NO: 1602 - DNA, 12138 bp, Artificial Sequence
  chemically treated genomic DNA (Homo sapiens)
tttaaagaattaaattatgttagtaattattaaatttatgttagtaattattaagattataatgttaaagaattaaatgtaattaatatgtaaattgattaatatgaagtgttattttatagaaaagattgaggtttttttaaaagatttatgaagagattgttttttttgatgttatttttaaagagtatgaattttatatagatagacgtttacggataattttttaaattttttttttattttatatggtagttaaaattattttttaaaagttaaatttagaattatattattattttttttaaaatttttaatagtggtttatgatttttagaataaaagttaaaattgttataataatttataggttaggtttagtggtttatatttgtaattttagtattttgggaggttaagggagcggggtgggggggtggattattggaggttaggagttcgagattagtttgattaatatggtgaaatttcgtttttattaaaaatataaaaaattagttgggtatggtggtaggggtttataattttagttattcgggaggttaaggtaggagaattgtttgaatttaggaggcggaggttgtagtgagttgagattacgttattgtattttagtttggataataagaatgaaattttaattaaaaaaaaaaaaaaatttatagaattttatattatttgttttgtgtatttattttttaattttatttttaatttttttatttttttttttattgtattttgataatttggtttttttgttatatattttttttaggttttttgtttaatgttattatttttttaatgtggttttttttgatgattttattttaaattgtaatgttttaaataggatttttgttttttttattttttttttttttttgtgttttttttttattgtatttattttatttgatatattatatattttatttaatattttttatgattttggatttagattatatttttgtttttttagataaaaaagttttattatttttagtttaattttaaatagtagtttattcgatttttatttatttttattaggaatagtgaatatatttaattattaaatagttttaattttagataagttataaaatataattagttattttatagatttttatttgtagaaaggggttaattattatatttattttatttgtttaattagtttattgtgataataaaattagataaggtaaaaagtgtttttgttgtaataattttggtatagttataattatatttcgttataaaataaagttgtttttatgggggaaaaaaaattatagtatgtgatatataataggtatttaataaatgttagtgttttatattgatttagtttttgttttttttgtgttttataatttattgtaattataggttgagtatttttaatttaaaattttaaaatttaaaatattttaaaatttaaaatttttttaatgttaatataatgtttaaagaaaatgttttttggattattttagattttggattttttgattagggatgtttaattagtaagtataatgcgaatattttaaaatttgaaataaatttaaaattcgaaatatttttgggtttaagtattttgaataagggatatttaatttgaagtaattaataagaaatatgttaaatatgtttatatttatttggttttttgatttatatttgtatttttaaatttagtgtttagaataaggtaagtttttaaatatttgatgaagaataaatgaataataagatattattattaatttattattattagaataagttgtttttttttttatattgatatgttagtttttttttttttgattattattgtgataatttttttattaggtttatatttgtagtatttaattttgaaatggggtaaattaattggttggtattgggattgaaattttagtgttttagtaattggataattaagtaggtaggtaattgtaaagtaatattagcgttttgtaattatatatgtagtgggggggggaaagtaatttagtaaaaagaaaattttataattgttagaagttttgaagttaattaggaaattgataaaaaaaaaaaagtgtattggtaattattttaatttatatttgaaaataggaggtagattaaagatttaaaggtttaatgatatatagttttttattttgttattttatttggttagttttttaagttagatgttgattttattatattattaatttttgttttttattgtttatattattttttttttttaagtaaagttttttttagtttggttttagatttttttaattgttttttgtgaaatataagttttaagagggttttttatttttatatttatattattgtttatattttattttgtttaaaggttttttttttatttttttatatatttaatttttatttattttttaaattttatatttttataaaatttgttttaattatttttaatttatattgattttttttttttttaaaattttttagttagtagggtatggtggtttagtttgtatttttagtattttgggaggttaaagtaggcggattatttgaggttaggagttcgagattagtttagttaatatggtgaaattttatttttattaaaaatataaaaaaaaaaaaaaaaaaattagttgggtatgttgtaattttagttattcgggaggttgaggtagaattgtttgaatttgggaagtagaggttgtagtaagttaagattatattattgtattttagtttgggtaatataataagatttcgttttaaaaaataaaaaataaaattaaaaaattttttagtatattagtgtgatttttttttggttataaattgttttttatttttttttttttaggaagatttttttaattttgtaagattaaggatgcgtgttttttttataggatataaattttttaattttttttgtcgagaatgtttaggttatagattttatattattagtttttaatattatttagggtttagtttaaatgttggttttttagagaagttttttttggttatttaatttaaggttatttttttatttatttttattatatgattttgttttattattattttattaattagtatttgaaattaattgattattatgtttattttttattttttatatatatttattatttttatttatattaagatgttaatttaatgagaaatgtaatttagttttgtttattgtagaatttttaatgtttataacggtttttagtataaagaggtgttgaataaatgttttatgaataattgaatgaatggtttttattgtttatattttatttattagagtatttattatattttattatattatttttttatttgtttattttttttaattgattgtaggatttttggaagttggaattatgtttgtttatttattattgtaatttcggtgaatagtacggtatttatagagttgtaaaataatatagtaggttgtgaatggaataggaaggaaggaaggaaggaaggaggaagggacggagggagggggagagggaggggagggagggaggagggtaggaaagaagggagggagaaaggaaggaaggaagtaaggagggagggaaggaagggagggaggaagaaagggaggaaggaagggagggagggaggtagggatagggaaagaatttggaataaaagaaagattagagtgtaaatggattgtttttaaagatattatttcgtaaatttttgtattattttatgtgtatttatatatatatatatgtttgtaaaatgttttgttttttattgtgagttataatttaaagttttgaaaatattatattaaattttaaaatagtttataatttagttagttattttgttatttattgtaatggtttttaatgtttatttttttaattataatttttttgaggaatgatatttttttattaggaaaaatagtttaagatagtagatgaaaaaaatttatttattatttttttttatttaataatttttatatggattgtttttaaatttttaataattttaagttttttgaagatagagttgttttttttattattgtttttatagtgtttagtaagatattagtatatttagtaggtattttaaagttaatttttagttgtttttgttattaaaaataataaaaattagttaggcgtggtggtatatatttgtagttttagttattgaggaggttgaggtaggagaattttttgaatttaggaggtagatattgtagtgagttgagattatattattgtattttagtttggatgatagagtaagattttattttaaagaaaattaataaaaattgtaggagttagtttgttattttattgatatgttaaaaataagggggtataaaaaaagtttagaaaattaaaaattttatgtatattaaaaaatattaaaatatagaaatatagaaatataaaaaaaaaaagaaataaataaatttaagtatatgttgtatattaagttttgttgaatgttataatggtagaatttatagtatgaattatttggattaaattgtgttttatgaaggaatgagaaaataagttttgttttttagagttagttatagttagtaattggggtttttttttttttttttttttttgagatagagtgttattttgtcgtttagattggagtgtaatggtacgattttagtaatttttgttttttaggtttaagcgatttttttgttttagttttttgagtagttgggattataggtgtaaattattatcgttcggttaatttttgtgtttttagtagagacggggttttattatgttggtttagttggttttaaattttatattttaaatgatttatttattttagttttttaaagtgttgggattataggcgtgagttattatgttttgttacgttaggttaaggtagtattttttaaacgaaagtatttagaagtagattttaaaagtttaaaatttaatatagggttgaattttatttattttggttatttaagtttatatatttttaatttatttttgttattgatttattatagattattttaatattttttttatatttaaagatttaaaaaatagatgtttaagttaggtgcggtggtttttagtattgtaatttaagtattttgggaggttgaagtgggaagaatgtttgagtttaggagtttaagataagtttgggtaatatagcgagattttttttttaaaaaaatataaataaataataatgtaaaaaaataaaaatataaaaatagatgtttagtttttatttttatgaatggattaataaaagtgtattatgttattttgttttttggttagttaaaatgtgagttaggaaaatttatagaatgatgtttttaagatattaaaaataagaaaggttattattgtttatttttttaatttttttttgtagttaaattaatttggatattggttgtagttaaattaaattaattatttgtttatttatagtatttatcgtgttttatattttgatataattatttttatttattttttaagaatttgtttatgttaggttttgtgttaaacgtgaatagaaaagtttttattttgtttgtatttttagtattttgggaagttaaggaagggaggatggtttgaggttaggaatttaaggttagattgggaaatatagtaagatttttttattattagaaatttttaaaaattagttatttatggtggtgtatgtttatagttttagttatttgagaggttgaggtaagagtatcgtttgagtttaggattttaaggttatagtaagttatgattatattattgtattttattttgggtgatagagtaagattttgttttaaataagtttttatttttgaaatgtttatagtttagaggataaaatagaaataattagtcgattaattagtatttattaagtgtttataattttgaaattattgtattgttttaataagggtaagtaggtttaatttaaaatttgtttatacgtattttatgcggttgttaaaagtatgttgtttttgtttttttaattcgatgaagtttgtttttaaggtagggattgtttttttttataattttataaagttaagtaaagggttgggtataaagcgggtatttggtaagtttaatgaaaaagaattgttgagaaagaatacgagtttttgattttttttagtttttattttgttagaagatgttttagttatttttttttgatttagtatttttttttatgaagggaaaggaattcgagggtgttgtttgtttgggatttgttttttttacgttatatttttatttttattttataaaagagattagtaaattgataagtgtttacggagggtagagaggtttttttttttttttttagttgtttttcgattttgtgtttaagatagtttattaattttacggtttttaaattaaattgtattgttatttatgggtgattttgggttagtttttttatttgtaataagttaattattttttagaggtttgtagggaggaataaaatagtgtttggtaagtgttcggcgtacgtagttattattcgatacggggtaagtgttatttttttgaaaggcggtaggatgataaagtcgagggggcgtagtttgaaggttcgaaggaggttcggggtaggttgattgaagatagaaggtcgagcgggttgatagggcggaaggtcgcggcgggaaatgcgggaaaggcgggaagtagcgaaggcggcgggcgggttgggtattagtttcggcggcggtagttcgtattttttaattttttttttcgtttattttgtttttttttattttgtttgattatatgtatcgtagttagtggttgaggttttgaaggatttaagattggattgcggttttaaagcgtcggcgggatcgagaaggtgatagagtgggaagggttaggttttaggcgttgtttaggggaaagaattggagttggagttagatagtattttttttagagtagaggcgtaataatttaaatttttttttcgcgttcgttattcgtgacgtataaaggggcgcgacggggttcgaatgacgttattcgacgttgcggtttacgttcggggtaggttttatagattgataggcgacgtgtagtcgttatgttgagtttgggtaagatttagaagattacgttttttttatgggttttattggatatggatatgttcggcggaaatgttgtttttttgttattatgttttgtgtgggtaagtcgagttcgggattttcggggttttggcgtagtatttagagttcgttgggttaggcgtcgtttttttatttgcgcgttttcgtcggaggaaaggcggttaatttatttttgaaataataaaatttaatcggcgggaacgttttttttgttttgatatttattataataattttaatattgtcgttcgttgtgggttttagtttaggttttatagtcgtgggtagtttggagttttagggtttttagatcggttagaggattgatattttggaattggaagaaaatcgcgtaaggtcgatggcgtttggattttattttgacgtaaattagagttttgagagaattttaagtagggtagggttagtatttatttgtttttagggttttttagtggatggtggtagagatagggtatttgttttgtggaggtaggatggatttggtgatttagagtggagaataagaatagatgagaatcgtaatatgtaaggttggtgtagaagtttttgatttgggttatatttaaagcgatttttatgaaattttatttgtggtattttttttttgaagttttttcgttggttttttattgttttttagaagttgtttaggttttttgtgaagtaattttaaaaattatggaaagtcgtaagtgagtttgtaattgtagtattttgggaggttaaggcgggagtattatgtgaggttaggtgttgagataagtttgggtaatatagtgagattttatttttataaaaaatagaaaaagtaggttagcgcggtgttttatttttgtaattttagtattatgggaggttaaggcgggtagattacgaggttaggagttcgagattagtttaattaacgtggtgaaattttttcgttgttaaaaatataaaaagtagttaggtatggtagtacgcgtttgtaattttagttatttaggaggttgaggtagaagaatcgtttgaacgttggaggtagaggttgtagtgagttaagatcgcgttattgtattttagtttaggtaagagagtgagacgtcgttttaaaaaaaataaaaaaaaagaaagaaaaattaaatagatatgttttttaaaagtcgtaagtgaagttataggatagatagggttaagtttatttagatatagggttttttaatttagtaaataaaaatgtgttttagatattgtatgagagaaaattatattttaaaaattgtttatttgaaatttatatttaattggttattttgtatttatttggtaattttgtttatagagtttttgggtatgtgtatttaagttttattttttttgggtaaaggaaagattgtttttttattttattatgttatagtatagagaatataatgagagttaaagttagtagtggttaaaattttttatatgttttattggattttaaagaattttatgaaataatatagaaaattttatttgagggtgtttagggagtataaggtagtttgtagtttagtatttttttaagattagttttaggtatatttattttaggtttaaaataggattttaggataaaggtatggtagggagtggggtagaggaaaaatatttttatagttatagtaaaaataggtaagggagagagttgtttagagggtgggaagggtgggggaaagtggttatatagtcgtttttatttatattattttttttagttattttttttttaaattggttgtgttttttttgagtttttggttaaggttataaagtaatatgaaaatgggatttaataaggggaatatgtagcgtaggtatttgggaaatttagattattttttttttttttaatttgtttgttttttggtttaaaaaatgatagtatttttgtttaataattttagggttttataagagttttgtattatggttgtggtttttttggttaggggagttatttgttttgagttttaggagtattgatgtttggggagttttggggtagtattttttagagataaatttttttgtagtgtgggggagtaggggtaagagggaggtaggtgtgggtgggagtagagagaaaaagtgattgttttataatttatagttttggtatttatttatgttttaatgaatagatgttttttttaatttatttttaagtttggtttttttttaaaagtttttggtgggttgttttttgagaattggttttatttttttatggatttttggaggtttgagtgagattaggatgaggttttttttgatttatattaatattaaagaataaattttaaagattaggttttagttttagtttggagtaaatagaattattgtgagtggggtggaatagatttgaggtatatatgttagaagttattcgttttattttttttgtaattgttaggggaagttggggagtggtgggagggaggagttcgaaagtaagagatagaaataagaaattaaattttaaaattgggatagtagagatagaagttgaattttagaggtggagttgggagttgagggaatagtaattaagatatgtattgaagtggagagggagtgatagtagtagtttatggttgggacggaggtagggtaggtaggttatggtggttagttaataaataataatgaaggatttaaggatgagggggtaggtatgtatagtgtttagatttttggattagttttttttatgttttatttttggggttagttattttgaaggaagggagggaaggagagatagaatatttagggaaggataagttgtttttttattgttattttattttgtttattttttaagaggttttttaaagattttgaggggaaatttttttcggtttgggttggagtttgttttttcgttaatagagttattattttttttagttatagtttttttgttagttaggtggggaatgcgtgtgtttcggttggtttgtagggttcggttgtttttaattggagatggtgtgtttgggtttggggagttggggttgtgagaacgggaagaatttaaatgtggagagttattaggtggggttgaggggtttagttttattaggttgtgggttttgtttagtttatggtttagcgttagtaatgtttttttggttagggtagggttgttaggtagtttttttattagagattttgggtggattttttcgattagtcggtggttgttattggaagttatggtattgagagtttcgtttgtagtacggtttatttgaggaggtttgggggttatacgttggcggttatttatgtggagggaggatttcgaatcggaatgggttaaatttttgtaagatatggggtagagaggaagaaagggatatatattggatgaggtgataggggaaaggcgaagaggagagagggataatacgagaagataaggatagggtaggaaaatggggatagagcggtaggagagagaaataggatgaataggtaggtgggaaggagagaggaaagaggaatagatagaagttgagtagttataagtataggataagagaggaggtaggaggagggaatgaggatagattggaaaagagataggaaaaggagagtagaattgtagaggaagaaaagtaaaaggataagtaggtagaaagaagggttaagagagaaagataagaaagggaaaagtgatagggagggaagaaatagataagaaataaaaataaatgttattatattattatttgtttggtaaatggttttttaatatttgggttttattagtggtgaatgttttggttttgaattggtgtagttataggtttaaattttataggcggtatttttaataaaatttttgtttttttatagttggttgtattttttgggatttaagttaatatagaatttatagtttgtttcgagttattattttttatgttttttttttttatttatttttgttatattttaggatattatttagtttgggttaggttttaaggaatagggtatatgtagttagtggatttgatttaggttggagatgagaaggttagaatagttttgtaaataattttttatttattttaaaaggttaggatgttgttttttttaattattttataggatttaaaggaggttatagataggtattgtagagtttaaattaaagtttgtggtgcggtaggaagggtggggttttttttagaattttgttgacggagaatgtagggaggtatagaaagataggatgttggtttttaaagagtagtggtttagaagaggtttggatttttgtgtgattttggataagttaagttatttaaatttgttagtttttaattttggtttaatgaagataatattaatttaatttattttataagattgtttggaggattaaatatgttggtaaagtatttggaaatgtagaaattattgtgggaatgaagatgatgaggtttgttaagttgaaaggtttatgtacgggtcggtcgtaagaggtttttttgtaaggttgagttatggagatatgttatcgtatattggatatgtatatatataggttagtttaggaatttgagattttttaaggagttggtggttgttaagattatgaattaattttagatgttattttttttgttttatagataaaaaggtagatatggaggtgttttttttgttaattttgaattttttttttgtttttttagaggtttgagaattttagtaaaagtagaggagagatttaagggaaatgtttaaacgtttgttagttaaagggg

SEQ ID NO: 1603 - DNA, 6236 bp, Artificial Sequence
  chemically treated genomic DNA (Homo sapiens)
tacgttttttatttataggtgagttagagatgtggaatgagttaggagttttaaggaggggtttttttttttatattatttggttggttgatttcgtttaatttaatttgattttttttacgatgttattgatgttgatgatggaattacgataattattggatattagggtttgtgttgtagtttgagtgattaggaaggtgttttggcgggaaagggtaataagggagaaaagattagttggggtgatagtttttttttaattttttttttaggttaagggggttaaacgtcgtaggtttagagatcgttattttgaggttgatagttatgattttgttttagttatttttagatatgtgtagtagaaatttattttgggtgatgttcgtataggatataacgatagatggtgggcgagaaaagtaggtttatgggagggggaggttacgtattaaaaattttttataaaaagtcggggtagtggaggtaatattagagttttagagggggaaagtggtttagcgtttatttgtatttgttttagtaggtatttggcggttttggttttagatacgttagtttggaaggtagtatggttttttcggggcggtttttttttgttttttggttcgtttagtagtcgtatcgttttttgtgtcgttgttcggtttaggtcgtaggtagttacggtggtttttttttcggttaggcgtatattgatcgttcggtcgatgtcgtttttcgtatttgaggtaggatagaatacgtcggatcgggtacggggaggagagggtagggattagaggttatagggtagaaagtaaaatgtgggtaaggggttagaggttatagcggtcgcgtattttaagggtacgtttttgattttattttaatattttaaatcgttcggggaaagaatttttttaatttgtgattaaggttagtgcggagcggagtcggttttggagttgagacgttatggcgggttgtgggtgggtgggaattttagtattaagttaattttagcgtagaggggcgtggtaagggtaaagtcggggttaattaaaggttcgttagttttaggttatttgcggttattagcgtaggtcgattttttatcgagggggcgtggttcgatattgttgtttaggggtttcgggtgtggagaagataaggggttttattttttttaaaaagataaagattgtatgtggggcggaagatcggaggtttttattttcggttattatttttttttttcgatttaaatatagtgatataaaaggaatagaaataaaaaaaattaggttatgagaatattaattaatttttttttattttatttttttaattatttttaaattaggatatacgattgatgtttgatgtttattttcgattttttttgttattttttttgtttaggattttggttttttttgaagtttttattaattggtgggagaaaggaaattggattttggagaattttttgtgtagtaatttggtttttcgagaataggtggggtaggggatattaggtaggttgttattattttttgttttttttagttttttttatggttttatttagttttttaaatgtaatatggttagatagtgtttaatattatggtttttttggttttttatttttatcgttttagtttttgtaagattgttagtttttgaaggttttaatgttaaagtaattatttttttaggttatagtttttttttttggtagatgtttttggttagggtttttaatttttacgtatttttgatttggagttaggggtagaggtttggggtaggggtagtttatttattttttatttaaggtgggtaattagtattattatgataattttttttagtagttttagtatttttagaagtgattgtaatggtgatgttttttttagtagttcgggtaatatagatattgttgttacgtagataaagttatttgtagtaaatggtaggatttagttaggatttgtattatttgtaattttattgtttattgttttttttttagtgagaagggtataggttgtgtttgttagtgtttttattgttgttagtagttgtagacgtatcgtttgatgggtagaaaagagaaaaaggtatttattaatagttaaagattattagtggtttagaagtggttggtggggtataggtataggggatatggatttggaaattaaatattaaaataaaaagagaagagggagtagtttagaatagataatttttgaaaaattttaagagattagaggttttttttatagattttttgattgagtaggcgtgtgtgtgtaagattttattaaattatttagatggtttatagattagtttaagaaatattgagttaaaggataaagtaattagaatttttttttttttatttttagaggatttgttaatgatagtatgaattgtttggaattaataagaggttgtttgggtttagggtgagtgaggagagataaagggtttgaggtagttgtgtttggtagatattattaatttgttttttgttgtagttagattggattaagatggtaaagttttcgatttcgtggggtattttatgtagtaggatagttattgtggttaggatttttagttttcggttttttcgaaaggaagttttaatggttagattattagtgaagttgtgtgttaagttagtagttagatttaggtatttcgatatacgtaggttttgtataggataagaagagaaaatgattagaggtttttattattatttgttttagttttggttagttatttttatatttttttttagagattattttatatttagttttttagtgttttttagatatttgttattatttatagtatatattttatgtgatttgtgatgatgttttttgtttaaatttattattaattttggtttttatttaagtttttttttttttttttagcgttttgaggttttattggtttatttttgggtattgtgtttttttttcgttttttttgaattttttttgttttttttttttttttttttgagttttgtttttttttggtagaacgttttgagggaagaaaagagttggttagagtggagaatagattttttaatatgtttttttttttttgagggttataagatgaggagattttgaggtaggtaagttagtttttaggaaagttgtttttgggtttattttgttttttatgtttatgatttttacgtgtatgattgtgagcgtgtttatgtttatgattgtgattatgttttttttttatatgttttataaatttttttacgataagaaaggtaataattttattgagaatttatagttttatagatagaatggggttttggtttgggaatggaggtattgagatattaagggagatgtgtattttagattttttttttttaagtgcgggaggtgaggaatagggagagacggattttttttagtattttaatttttatttttatttgttttttttttattattgtgggagtgtttatgttcgggttgttttagagtgtggtgagaatgaggttttggaagaaggggggaaaattagatgagggaatatttgatataatgagtgtgtatttgggggaatatcgaaaggttagggattataaaggagaaagaattttttttttttaaagaacgaaataggttagatttgaggtagaagttagaggttatttattaagagtatgaggaatgaggtgtaggaaagtattttttaggagtttatcggaagtaaaattgagtaagatttgaagtagagagcgatgtcggggagagttcgattttacggggataaggaagaggataaaaaatggagttgttgagattagtattgtggtttttagtgtttggtgagggagagttaaggttaagtattgtggagttttttaataatttagaattagttttttttttttttattttttggagatttatataagtttagagagtgatagtatttaggttttgtttgatgtttggagttttagattttttatagtttttatggttatgtttatggttatgtttatgttttttgtggtagaggtttttatgggagtagttatggttatggttatggtgtaaatttttatgtgaatgtttatggtcgtgatcgtgggtatgtttatgttagatgttttcgtgagtgtggttatggttatgggtatggttgtggttatggtggaaatttttatgtgagtgtttgtggttgtggttatggaagtttttttgtagatcgtcgtgtaggtcgttatgattttcgagtttagttattagaagttttaaggtcgtttaggttagtagttttacggttatttagtggggggtttttaggtttttggttattacgttgattagagggatagaggtagtgattttatttgatttaattttatatttatatagggttcgttttattttaatcgcgtttttcgtttatttttatgggtcgtttttttatttttttaagtttttatttatattgtttttaagattagttttttttatttcgaattatttttcggatgtagggttttgggatattaattttttattagttattttatagattttttgggttttcgtttttacgatttattaggtgaggaaaaggtttggaaaggatggtagagaaaaaatagagaatttttatcggtttcgggatttttttttttttcggtttgtttggacgtggtagtttcgtttttagatttcgcgagaataggaagtttcgttttattttcgttttaatgtttttattaatatggcggtatttcggtagcgacgaatttattttgtattgatacgtatgcgcgagtgtggaggtgatttgaggggagggtgggcgaggcgggttaataggtcggaggagatcgttttttcggtttttaattagacgagggggcgggaattcgcgtcgagatttttcgtttgtataaagatggttgttatattggcgttgttattttggtattgagtagagcgacgggtttaattcgatttaatttaggttagagttttttttttaggggttttttcgtgtttagttaatttttcgattaatttttgggaatttttgggattttttcggtatttttatttttagttagggattatgttttgggtcgttcgttcgtttttttttttttagcggtatgtcgtagggtagtgtgggtcggtgggggtgcgaaaagaaatgtattgtggggtcgcgtttcggtggcggcggcgacggttttggttggatttcgtagcggcggcggcggcggcggtggtaggcggagaataataaatttcggagtcggagttaggggaggttggacgggacgggatgggcgatagcgggcggggtgagtgttttagtagaagggtaggcgagttagtgatcgttttatttgcgattttttttttatattttttttcggtgtttttttttttgcgttttcgtttttttgtttgtaaatacgcgttttttttttttcgagggttttagtattttttttttcggggcggggcggggaaggggagttttcgtttttttagttgtgatcgtttgaggttttgggtatcggaggtcgcgggtttgggaagggtacgattttttttaaattttaggattttgggcgtttataggtagattttgcgttttaggaggggttttttttgtttgttttttttttttgtacgttttggttatttggttttacgttgggaatagaggggttcgatggtttattttacgtgttgttttatttacgagataggtgtggttttgggatgatttggtatttatttaaatggattggttggaaaattttttttatttgaattatttttttttttttgttaattttttttttttattataatgaggagttacgttgtttttgggtttttttagttagttaaatatagtagtgggaggttgtatattaattttagtgatataaatgttaataagttttgataatttattattatcggattagtcggagttatattgttgtttgatagtagggtgtttttgaatttggggatgggtggagtgggttgggttcggtacggtggggtattagagaattaaagtttttagttggatgtttgaagatttattttttttttttgttttttttgttttttgtgtgtttgtgtgtttgtatatattttttttttaga

SEQ ID NO: 1604 - DNA, 6236 bp, Artificial Sequence
  chemically treated genomic DNA (Homo sapiens)
tttgagggaggggtatgtataggtatatagatatataagagatagaagagataaaaaaagaaaatgagtttttaaatatttaattagagattttaattttttaatattttatcgtgtcggatttagtttattttatttatttttaagtttagagatattttgttgttaaataatagtgtaatttcggttggttcgatggtagtgggttattagaatttattaatatttgtgttattaaaattggtatataattttttattgttatatttgattggttaaaaaaatttaaaaatagcgtaattttttattgtggtgagaggagggagttgataaggagaggaggatagtttaggtgaggaaaattttttaattaatttatttgaatgaatattaggttattttaaagttatatttgtttcgtgggtggggtagtacgtggggtagattatcgagtttttttatttttagcgtaaagttaggtagttagagcgtgtaagggaaagagataggtaggagagattttttttaagacgtaggatttgtttgtaaacgtttaaagttttgaggtttaagaggaatcgtgttttttttaggttcgcgattttcggtgtttaaggttttaagcggttatagttaggagggcggaagtttttttttttcgtttcgtttcgggggggagggtgttaaggttttcgggagggaggggacgcgtgtttataaataagggggcgggagcgtaaggaaaagagtatcgggggagggtgtgggggaggggtcgtagataaagcggttattggttcgtttgtttttttgttggggtatttatttcgttcgttgtcgtttatttcgtttcgtttagttttttttggtttcggtttcggggtttgttgtttttcgtttgttatcgtcgtcgtcgtcgtcgttgcgggatttagttagggtcgtcgtcgtcgttatcgggacgcgattttataatgtattttttttcgtatttttatcggtttatattgttttgcggtatgtcgttgagggaggaagggcgggcgagcggtttaagatatgatttttggttgagagtagggatatcgaagaggttttagggatttttaaggattgatcggaggattagttgagtacgaggaagtttttgagagaaagattttggtttggattgggtcgaattaagttcgtcgttttgtttagtattaaaatgatagcgttaatgtggtagttatttttgtatagacgggaagtttcggcgcgagttttcgttttttcgtttagttggaaatcgaggaggcggtttttttcggtttgttagttcgtttcgtttattttttttttaaattatttttatattcgcgtatgcgtgttagtgtaggatggattcgtcgttatcggagtgtcgttatattggtaaaggtattagggcgaaggtggaacggaattttttgttttcgcgggatttaaaggcgggattgttacgtttaagtaaatcgggaaaggagaggatttcggagtcggtgagaattttttgttttttttttattattttttttaggttttttttttatttaatgagtcgtagagacgagggtttagagagtttgtaaagtggttggtgaaagattagtgttttagggttttatattcgggaggtggttcgggataaagagaattagttttgggaataatgtaggtgggaatttaagggaatgggagagcggtttatagaggtggacggagggcgcgattggagtaaagcggattttgtgtaggtatagagttgagttaagtggagttattgtttttgtttttttggttagcgtgatggttagaggtttgggggttttttattgggtggtcgtgggattgttgatttgggcgattttggggtttttggtggttggattcgggggttatgacgatttgtacgacgatttgtaagaggatttttatggttatagttataggtatttatatgaagatttttattatggttatagttatgtttatggttatggttatatttacgagagtatttggtatggatatatttacgattacgattatggatatttatatgaggatttatattatggttatagttatggttatttttatgagagtttttattatagaggatatggatatgattatgagtatagttatggaggttatggggagtttggggttttaggtattaagtaggatttggatgttgttattttttgggtttatgtgagtttttaggggatgggagagagaagggttggttttggattgttgggaaattttatagtatttgattttgatttttttttattaggtattgggggttatagtgttgattttagtagttttattttttgtttttttttttattttcgtggagtcgaatttttttcggtatcgttttttattttagattttgtttagttttgttttcggtgggtttttgggagatgtttttttgtattttattttttatgtttttggtaagtaatttttgatttttattttaaatttaatttatttcgttttttggaggaaaagggtttttttttttttatgatttttgatttttcgatatttttttaaatatatatttattgtgttagatatttttttatttggtttttttttttttttttagaattttatttttattatattttggagtaattcggatatggatatttttatagtggtgaggaagagatagatggggatgggagttggggtgttggggaaggttcgtttttttttattttttatttttcgtatttgaggaggaggagtttggaatgtatattttttttaatgttttaatgtttttatttttaggttagggttttattttgtttgtgggattgtgggtttttagtggaattgttgttttttttgtcgtggagaaatttgtgagatatgtgaaaggaggatatggttatagttatggatatggatacgtttatagttatatacgtggaagttatggatatggaagataaggtgagtttaggaataatttttttgaaagttgatttgtttgttttagaatttttttattttatggtttttaggagggagaggatatgttggaagatttgttttttattttgattaatttttttttttttttagagcgttttattaaggagaagtagagtttagaggaagaagaaaaggaaataagaggggtttagaagaggcgaggagggagtatagtatttaaagatgggttagtgagattttagaacgttgaagaagaaaaaagaggtttaggtaagggttagagttggtgataaatttgggtaagggatattattataaattatatggaatatgtgttgtgggtaatggtaggtatttgagaaatattaaaggattgggtgtaaagtggtttttgaggggaggtgtgagaatagttgattaagattggaataagtggtgatggaagtttttgattattttttttttttgttttgtataagatttgcgtgtgtcggggtatttgaatttggttgttgatttggtatataattttattgatggtttggttattggggttttttttcgagggggtcggggattagggattttgattataatgattgttttgttatatgaagtgttttacgaggtcggagattttgttattttggtttagtttggttgtagtaaaaagtaggttggtgatgtttgttaaatatagttgttttaaattttttatttttttttatttattttaaatttaaatagttttttattagttttaaataatttatattgttattgataagttttttagaaatgagggggaagaagttttggttattttgttttttagtttagtattttttaaattggtttataaattatttgaatggtttagtggagttttatatatatacgtttatttaattagaaagtttgtggaaaggatttttgattttttaagattttttagaaattgtttattttagattgtttttttttttttttttattttgatgtttagtttttaaatttatgttttttatatttatattttattagttatttttaaattattgataatttttagttattggtgagtgttttttttttttttttgtttattaggcgatgcgtttgtaattattgatagtagtaggggtattggtaggtatagtttgtgttttttttattgaaggaggagtagtgggtagtgaaattgtaggtggtgtaggttttggttgggttttgttatttattgtaggtggttttatttacgtagtaatagtgtttgtgttgttcgagttgttgagggaggtattattattgtaattatttttggaggtgttggggttgttggggggagttattatgatggtgttgattgtttattttgagtgaggggtggataaattatttttgttttaaatttttatttttaattttaggttaggggtgcgtagaggttgggggttttggttagggatatttgttaaaggaaggaattgtagtttgggagaatggttattttggtattagggtttttaagggttggtagttttatagaggttggagcggtgagaatgagaggttagagggattatagtgttgggtattgtttgattatgttgtatttggaaggttaaatggggttatgaagaaggttggaagggatagggggtgatggtagtttatttggtgttttttattttatttgttttcggagaattaagttgttatataggaagttttttaaggtttagtttttttttttttattagttggtggaggttttagggaagattagagttttggatagagagggtaataggaggagtcggggataaatattaaatattaatcgtgtgttttgatttgggagtgattggggggatggggtgggagagggttagttggtatttttatggtttgattttttttgtttttattttttttatattattgtgtttgaatcgagggggaggggtggtaatcggaaataaagattttcgatttttcgttttatatgtagtttttgtttttttggggggaatggggttttttgttttttttatattcggggtttttaagtagtagtgtcgggttacgttttttcggtgggaggtcggtttgcgttggtggtcgtagatggtttaaggttggcgggtttttgattggtttcggttttgtttttgttacgtttttttgcgttgggattggtttagtgttgggatttttatttatttatagttcgttatggcgttttagttttagaatcgatttcgtttcgtattggttttggttataggttgagggggtttttttttcgggcggtttggggtattggagtgaggttaggggcgtgtttttggagtgcgcggtcgttgtgatttttggttttttatttatattttattttttgttttgtgatttttgatttttgttttttttttttcgtgttcggttcggcgtgttttgttttattttaggtgcggggagcggtatcggtcgagcggttagtgtacgtttggtcggagagggggttatcgtagttgtttgcgatttggatcgggtagcggtataggagacggtgcggttgttgggcgggttagggagtaaggaggggtcgtttcgagggaattatgttgttttttaggttgacgtgtttgaggttagggtcgttaggtgtttgttggaataagtgtaggtgaacgttaggttattttttttttttaaagttttgatattgtttttattgtttcggttttttgtggggggtttttgatgcgtaattttttttttttataggtttgtttttttcgtttattatttgtcgttgtgttttgtgcgggtattatttaggatgagtttttgttgtatatgtttgaggatgattgggataaagttatagttgttaattttaaggtggcgatttttgaatttgcgacgtttggtttttttagtttggggagggagttggaggagggttgttattttagttgatttttttttttttgttattttttttcgttagggtatttttttagttatttaggttgtagtataagttttggtgtttaatggttgtcgtggttttattattaatattagtagtatcgtaggaaaggttaggttgagttggacgaggttagttagttaagtggtatagagaggagaatttttttttgagatttttgatttattttatatttttgatttatttataggtggggaacgtg

SEQ ID NO: 1605 - DNA, 12046 bp, Artificial Sequence
  chemically treated genomic DNA (Homo sapiens)
attttaagttaagtgagttatttatataagaggattatatgttttagattgtaaaaaaaagataaatttatagtttttttgttttttttttttatttttatttggttttattaatttgattttttttttttaattaagattttatagtagggtttttttttgttattaaggttggagtgtagtggcgagattttagtttattgcggtttcggatttttgggtttaagttatttttttattttagttttttgagtggttaggattataagtgtatattattgtgttttgttaattttttttttattatttttttgtagaaatagggttttattttgttgtttaggttgatttcgaatttttaggtttaagtaatcgttttttttatgtttttaaattgttgattttttaggcgtgaattattgttttcggttttcgtgatttattgattaatttttttgtgatggatatttgagttgtttttaggttggggttgttgtgattatttgagtatttgatttttgatgaatatagagtgtattatattgtagggtagtatttaggagtggaataaatgggttatagtagttattgtgattttattaaatatagtatgttagtaatttattgaaatcgtttttttagaagtatatttttttatttttttttttattaaaagaaagaatcgtggatgtatattttttttaatgtagaatatttagatagttattgaattcgtcgtttttagtttttttattacgcgatgttattatagttttagattttttttttttgttcgtttttattttttttttttttggttttatggtgttttgtttgatttttttagattattttttgtagtatttgtattttgaatgtgatttaataattttggttgagtagagatttcgtagtgtggtagtgtttttaggttttggggatttagaaaagttttaaggaggaggttagaaattttggtatttgtttttattgtatataggtagttttagttttcgggttggttaagaatatttataatattcgtgttgatgattataaaggaagggatttttgaattaaattatagaaatttttaaggtagaaaaatgatggatatgataatatgtaaatatagattttttttttttgttgttgttttttttttttttttttttaaattttaaagatggggttttgttatgttgtttaggttggttttaaatttttgggtttaagggatttttttatttagattttttaaagtgttgagattataggtagatttttttttaacgaagatattatgggataaatgttagatgatagaaggggaaaaggtgtttgtaatatttaaaaattaatgagatattaatatttagaatataggttaggtgtagtagtttatgtttttaattttagtattttgagaggttgaggcgggtagattatttgagattaggagttcgaggttaatttggttaacgtggtaaaatttcgtttttattaaaaatataaaaattagtagggtgtggtagtgggtattgttttgttatttcggttatttgggaggttgaggtatgagaattagttgaatttaggaggtggaggttgtagtgagttgggattgagttattgtattttagtttgggagatagaatgggattttatttaaaaaaaaaaaaaaaaaaaaagaatataaaaggaatagttgtaaattagtaagcgaaaaagatagtaattataatagaaaaatggtcgggtttagtggtttttgcgtttataatgtaagattatatgtttgtaattttagtattttgggagatcgaggtgggtagattatttgaggttaagagtttaagattattttggttaatatggcgaaatttcgtttttatttaaaatataaaaattaggttgggtatagtggtttacgtttgtaattttagtattttgggaggttaaggtaggcggattggttgagtttaggagttcgagattagtttgggtaatatagtgaaattcgatttttattaaaatataaaagaaattagttaggtgtggtagtatgcgtttgtagttttgggggtgttgaggtaggagaattgtttgaatttaggaggcggaggttgtagtgagtcgagatggtgttattgaattttagtttgggcgatagagtaagattttgttttaaaaaaaaaaaataaaaaaaagtgagtagggattataatgagtagataataaagaaatttaaaattttgataggtatttgagaagatgttagaaattgttggtaatttattagggaagtggaaattaaaatgatagcgagtttaggcgcggtggtttttgtttgtaattttaatattttgggaagttgaggtaggaggattatttgagattagtagtttaatattagtttgggtaatatagtaagattttatttttataaaaaatttaaaagttagttgggcgtggtggtataagtttgttgttttagttgttcgggaggttgaggtgggaggattttttgagtttaggagtttcgggtagtagtgaattataattgcgttattgtattttagtttgggtaataaagtgagattttatttttaaaaataaaatagagaaaataaattaaaaaatagtgagttattttatataaatttggtaaaaattagttaagttggaaatgttatatgagggttggggatatggggattcggggatttttatgtattggtagtgagtagttatttcgagggttatttagtattatttatataaatggtgcgtatggatatgttatttagtaattagtttttgggtacgtataataaaatatttttttttagttttttgggggattaatatatagatgttttttttagtattatttcgggagagttggaggtagtttgggtgttcgtttttagtaggggtaggtggaaaaatagaagggattagttattagagaattttgtaaagttattattgttatatattaggtgtttatagagtaataagggtaggttttaaaatatataatgatgattgataaaaataagaaatattattaatattttatgatataatgtttaatgatatagaattattttatatttatataaagttttagggaaaaataatatttaatatataattatgcgttggataatgtataatagatataatatagaattgtattgtattgtataattatattagtttaaatatataattatataattatatattatataatgttaaattatataattttataatatgatataaatttttgtgttatttattgtagttgtgttaatattagtatttaattatggaatatttagaaatttgttatattttgaagaacggtttttatgtaattttgtttaattatgggatattgttttatataatttattgtatattattatatgttaataaaaaaaatttttttttttttttttgaggtggagttttgttttgttatttgggttggagtgtagtggtataatttcggtttattataatttttgttttttgggtttaaatgatttttgttttttagttttttaagtagttgggattagagtcgtgtgatattatgtttagttaatttttgtgtttttagtagagttagagttttattatgttgattaagttggttttaaatttttggttttaagtgatttgtttgttttggttttttaacgtgttgggattataggtatgagttattgtgtttggtttagtaataattttaatagggttggacgtggtggtttatatttgtaattttagtattttgggaggttgaggtgggcgaattatgaggttaggagttcgagattagtttggttaatatggtgaaatttcgtttttattaaaaatataaaaattagtcgggtgtgttggtaggtgtttgtaattttagttatttaggaggttgaggaggagaatcgtttgaatttgggaggtggaggttgtagtgagttaagattttgttattgtattttagtttgggtaataagagtaagagttcgttttaaaataaataaataaataaataaataataataatagtaatatttatattatattaattaggtattggtattgttttaagttttattttatttaattaattattttatttaatttttttaataattacgtgaggtcggtattattaatattttttttattggatggggaaatcgaggtatagagaagttaagtggtttatttatgtaatttaaggaagtggtaaggttgggtgggatttagatttagattatttggtttggagtcggagtttttgttttttttttttttttttttagacgaagtttcgtttaggttggagtgtagtggtttaatttcggtttattgtagtttttgtttttcgaatttaaggagtttaagtaatttttttgttttagttttttaagtggttgggattataagtatgtgttattacgtttggttaatttttgtatttttagtagagacgggggttttattatgttggttaggttggtttcgaatttttgattttaagtgatttatttatttcggcgttttaaagtgttgagattataggggtgagttattattttcggtcggagtttttgtttttaattattatgtttggtgttttttaaagttaggagatttggtgtatatttttgttttgttgcgtgatattttgtaagaatttttttatttagagttttagtttgttttttgtgaaatgggagaatgatggtacgttatttatcgtggtggggagaaagcgtaggtattttttagatatttttttttttattttattttcggcggttaacggttaagtaaatttttagttaagatttggggtatgtgggtagggtttcggcgaaggggagtggtcggggagttttggtttaatggggttcgggggcggggatttttttttatttttgtttagtatgcgtgtatttttcgtagttttatttatttcgcgggtgtttttggtgtttttagaggttttcgattttagttcgtttttagttttttcgtttagttcgtagttttttttttttgtttttcgattttagattttgggttttcgatttcgatattatgggtgacgtagaaggcgaagacgaggtttagtttttgcggacggtgcgtatttttgggttaggggtttgtggggttattttttggggttttttgagggtttttttgtttttgaatgtttttgttcggtttgttggtggtttttgagattcgaggtttttttttatgttattttgagtgattgttattttgttttttagttttttttattttttttattatagagaattagtaggattggggattttagaatgggaaagggattttcggttgtttttttttttgattttagcgatttgttttttataagaaggattttcgagggagtatatttttatattattttggaagtaggtatttggggaaggtggttttaatttttgggtttgatttagttatttttttatttttattttagttttaattttttttttgttttagattttgatttatttaaatttttgagaagggagttggagtgagttggaggatatagttgtttttaatttttagtttttgagggttttgtgggggagggattttttgggttttgggttttttttttttttttcgttttgggtaggagggttgtttttaatggttgttaatggttttgtagggtttttgggtggtgtttttttttatttgtttttttgggtgtttttatgtttttgtttttttttttattttagtttttttgtttttgttttttagtttaaggttttttgattttcgttgtttttttagttgggttattttttgtatttgagttttagttgggggtagggatgggaattggaataataggtgttttttttagaatagtcggtttttttggggtttgggtaggggatggggaggggatgagagggaggaggggttgttatttttttgttttttttattttttttttttagtggtttcgtagggtgtggggtcgtaaatatgggaggggacgtttttttttttgggttaggtttgttgattagacgttagtttcgttttttttttcggggttttggagttatataggaaatgttgatatagtatttttgttttagaataggattttggcgagtcgggttcggttttttgggagagaggaataaatagttggggttggtagtgaaggatggggatagttgggaaggggtttagttttagtcgagattttttttttagttttagttttttagtagatattatgggtcgggttttttttagttttaataagattatggttatggttattggtttttgagttgtcgttttaaattaggttttgtgttttgggtttttgttttttgagatatttaattatatttttgttgttttgttttttgaggtagggttttatttttatttttttgatagatttgagggaaattaaggttcgaatggtagaattatttatttaaggttaaggttaggaagtggtatttttggatgtttttggtgtttagttttattgtttttattagagaaaatttgggtttagatttgttaaagtagttagcgttagggttttggaggtttggttttggaatttttttattttagattgggttagtttttttgattgttattgaggtcgtggtggattttttaaaattttttggaggttgggtttagtggtttatgtttgtaattttagtattttgggaggttaaggtgagcggattatttgaggttaggagtttgagattagtttggttaatatggtgaaatttcgtttttattaaaaatataaaaaaatattagttaggcgtggtggtgtatgtttgtaattttagttattcgggaggttgaagtgggaggattgtttgaatttgggaggtagaggttgtagtgagtcgagattgcgttattgtatattttagtttgggcgatagggcgagattttattttagaataaaaaattttttggattatatttcgtttataagaaatattttgttttataatttagtatatgtatatatgtatagatatgattaaaaattaattttattgaggtataattgatttgtaataaattttatttagtttatgtgtttaatgagttgttttgtttttgtttatttatttatttttttgagatggagttttatttttgttgtttagattggagtgtaatggcgtgatcgtagtttattgtaatttttgttttttgggtttaagcgatttttttgttttagttttttgagtagttgggattataggcgcgtgttattaagtcgagttaattttttgtatttttagtagagatggggttttattatgttggttaggttggttttgaatttttgattttagatgatttatttattttggttttttaaggtgttgggattataggtgtgagttattacgttcggtttttttttttttttttgagatagagttttaatttgttgtttaggttggagtatagtagtttggtggttggtttaacgtaatttttattttttaggttttagtgatttttttattttagttttttgagtagttgggattatacgtgtatagtattatgtttggttaatttgtaaaattttttgtagaggtgaggttttattatattgtttaggttggtgttaaatttttgggtttaagaaatttttcggttttggttttttaaagttttgggattataggtataagttattatgttcggtttttttttttttatttagtataatatttttgatatttatttatgtagtatgtattgagtttgttgttttttgttgtcgaatattattttattgtgcgattatattgtggtgtgtttattagtttatttgttgatggatatttgagtcgtttttaatttttattattatagataatatagggtttgtgattatttatttgtatttatttttaattgaaataagttttataaaatgtagatggtttttgaagtatgatgggtacgttgtgattttttatttttgttttattttgtttcgtttggttaagtatgatggttatagtttttttaaattgattttatttttttttggtgggtggtgatttttatttttatttaggttggggttttttaaattttggtttaagttagaagtttttggggtttggtaaatagtacgtattttttgttgattttaaattaggtttttgatggtggtaggggattgggttagtagggaagttatatttttaattagaatttttcgttttttttatttttttttttttttttttttttttttaagatggagtttttttttgtagtttaggttggagtgtaatggtataatttcggtttattgtaattttcgttttttgggtttaagcgatttttttgttttagtttttcgagtagttgggattataggtatgtattattacgttcggttaatttttgtatttttaatagagatggggttttattatgttggttaggttggtttcgaatttttgattttaagtgatgcgtttattttggttttttaaagtgttgggattataggaatgagttatttcgtttagtttgtttttattttaatttaggaaaagtttgagaattaatgtggtaatgattgggttttttgtcgttgttttgtattttggttttgttatttgtttgttttttaatttggggtaagtgatttttatttttttttttgagttttagtgtttttatttggaaaatggggataagattatatataatagttagattttatggtttatatttgtaattttttcgttttgggaggttgaagtaggacgattgtttgaggtcgggagtttaaaaatagtttgggtaatatagggagattttgtttttataaaaaatgttaaattttagttgggcgtggtagtgtgtatttgtagtattagttatttgggaggttgaggtgggaagattatttgaaattaggagtcggaagttgtagtgagttgtgatttcgttattgtattttagtttgggtaatagagtaagattttgtgtttataaaaatatatatattttaaattagttgggtgtggtggtatgagtttgtagttatagttttttaggaggttgaatggagaggattatttagtttaggagtttaaggttgtagtgagttatgatcgtattattgtattttattttaggagatagagtgagatttagttttttaaaaaaaaaaaaaaagttattttttaaggggtttatgtaagtatttttttgattttattttttttttgtttgttttttttttttgcggttattattttgttttattttttgtgttgttttttaatattttagtatttagattttttttttttattttagagatgagtaggtttgatttttttttgttatttggataaggtttaatttaaatgttatttttttggagaggttgttattttatttttttattgattttatttttattttaaaagttatttttttatattagtttgggttattttttttataatatttattattgatattaatattatatattaatttatttgtttattttttgtttttattatgaggatttaagttttttgagggtcgtgattttttttttttttttttgagatatggttttaatttgttttaggggttttagggaggtggggtttgattatgatttattgtagtttcgattttttaggtttggtagtttttttattttagtttttcgagtagtagggattataggaatatattattatgttcggttaatttttaatttttaatttttgtagagatgggggttttattatgtatattgtttaggttagttttttttttttttttttttttgagatggagtttcgttttgttatttaggttcgagtttagtggtgcgatttcggtttattataagtttcgttttttaggtttatattatttttttgttttagtttttcgagtagttgggattataggcgttcgttattatattcggttaattttttgtatttttagtagagacggggttttattatgttagttaggatggtttcgattttttgattttgtgatttttttattttgtttttcgaaagtgttgggattataggcgtgagtcgtcgtgtttggttttaggttggttttaaatttttgggtttaagtaatttttttgttttagttttttaaattgttgagatttgtaggtgtgaattatcgcgtttagttaaggtagggattttgatttttattgattttatttattgttttatatttagtgtttagaatagtatttggtttatggtagatgtttaattaaagtttgttaaatgagtgtaaggtttagagtataaggtttgggagttagtaaagtgtttaataaaaatagtttatattattattatttttttttttgtttgttttttgagatggagttttttttaggttggagttttatttttgttgttttagattggagtgtaatttggtggtagtaatttttattttttaggtttaagttatttttttgttttagttttttaagtagttgggataataggtatacgttattatgttcgggtaattttgtatttttagtagagatagggtttttttatgttgtttaggttggtttcgaatttttgattttaggtgatttatttgtttcggttttttaaagtgttgggattataggcgtgagttatcgtattcggttatttttggttttgtttgtttgtttttgagatggagttttattttgttatttaggttggagtgtaatggttcgattttagttttttgtaatttttgttttttgggtttaggcgatttttttggtttagattttcgagtagttggaattataggcgtgtattattatatttcgttaatttttgtattttttagtagagatggggttttattatgttggttaggttggtttcgaatttttgattttaagtgatttattttttcggttttttagagtgttgggattataggtgggaattattgcgttcggatttaatattgttttttatggtatttttaggatttagttcgggttgttatattgtatttaggtgttattagaaagtagtttataaataaagataaaatagtagtttattattaaaataatacgtaaaagagagaatttagagaaagatgagtttaaaaagtaatttaatttgagtaagtttttattttttagtggattattttgtagattttatttgggaggtttttggagttagttggattgaggtttaaattttagttttttttgttattaattgtgtggttttggtttatttgtgttttattttgagttttagtttttttattttaaaatggggataagttaggtataatagtttatgtttgtagttttagttatttaggaggttgaggtaataggattgtttgagtttaggaggttaaggttgtagtgagttataatttatattattttattttagtttgggtgatatagtaagattttgtttttaaaaataaaaataaatgggatgattatttgaggttaggagttcgagagtagtttggttaatatggcgaaattttgtttttattaaaaatataaaaattagttaggtgtggtggtgtacgtttgtaattttagttatttgggaggttgaggtaggagaatcgtttgaatttaggaggtggaggttgtagtgggttgagattgtattattgtgttttagtttgggtaatagagattattttaaataaataaataataaaaaataaaataaatgggatgatgttggtttgtattttaaggagttgttaggagtaggtagagggtttgggtgggttgattttgttagttattgttttttttataaggattagggtgggaggaggggtttgtggtttgtagtatttgtggtattcgggttaggtttttttggagacgttgtttttcggtttcgtagg

SEQ ID NO: 1606 - DNA, 12046 bp, Artificial Sequence
  chemically treated genomic DNA (Homo sapiens)
tttgcggaatcgaggggtagcgtttttaggggggtttggttcggatattataaatattgtagattataggtttttttttttattttggtttttatgaaaaagatagtgattgataagattaatttatttaagttttttatttgtttttgataattttttgagatataagttagtattattttatttattttattttttattatttatttatttgaaatagtttttgttgtttaggttggagtatagtggtgtaattttagtttattgtagtttttattttttgggtttaagcgatttttttgttttagttttttaaatagttgaaattataagcgtgtattattatatttggttaatttttatatttttagtagagataaggtttcgttatgttggttaggttgttttcgaatttttgattttaagtaattattttatttatttttatttttagagatagggttttgttgtgttatttaggttggagtgaagtggtgtaaattatagtttattgtaattttgattttttggatttaagtaattttgttgttttagttttttgagtagttgggattataggtatgaattgttgtgtttggtttatttttattttaaaatggggaaattgaagtttaaagtgggatatagatggattaaggttatatagttggtaataggaggagttgggatttgaattttagtttaattggttttagaggttttttaagtggggtttgtaaagtgatttattggaaggtggaaatttgtttaagttaaattgttttttaagtttatttttttttaaatttttttttttgcgtgttgttttaataatagattgttattttatttttatttatagattgttttttaatggtatttgaatgtaatgtgatagttcgggttggattttggaagtattataaaggatagtattgagttcgggcgtagtagtttttatttataattttagtattttgggaggtcgaggaggtggattatttgaggttaggagttcgagattagtttggttaatatggtgaaattttatttttattaaaaaatataaaaattagcggggtgtggtggtgtacgtttgtagttttagttattcgggagtttgagttaggagaatcgtttgaatttaggaggtagaggttgtagggagttgagatcgagttattgtattttagtttgggtgatagagtgagattttattttaaaaataaataaataaaattaaaaatagtcgggtgcggtggtttacgtttgtaattttagtattttgggaggtcgaggtaggtggattatttgaggttagaagttcgagattagtttgaataatatggagaaattttgtttttattaaaaatataaaattattcgggtatggtggcgtatgtttgttattttagttatttgggaggttgaggtaggagaatggtttgagtttgggaggtggaggttgttattattagattgtattttagtttggggtaataagagtgaaattttagtttggggaaaattttattttaaaaaataaataaaaaaaaaaatagtaatggtataggttgtttttattaggtattttattggtttttaggttttatgttttgggttttatatttatttaatagattttggttgagtatttgttatgggttaggtgttgttttaggtattaaatatagagtagtgaataaagttaatgaagattaagatttttgttttggttggacgcggtggtttatatttgtaaattttaatagtttgggaggttgaggtagaaggattatttgagtttaggagtttaagattagtttggggttaggtacggcggtttacgtttgtaattttagtattttcggaggataaggtgggagggttataaggttagaggatcgagattattttggttaatatggtgaaatttcgtttttattaaaaatataaaaaattagtcgggtgtggtggcgggcgtttgtagttttagttattcgggaggttgaggtaggagaatggtgtgaatttgggaggcggagtttgtagtgagtcgagatcgtattattgaattcgagtttgggtgatagagcgagattttattttaaaaaaaaaaaaaaaaaaaagattagtttgggtaatatatataatgagatttttatttttataaaagttaaaaattaaaaattagtcgagtatggtggtatgtttttgtagtttttgttattcgggaggttgaggtgggaggattgttaagtttgggaaatcgaggttgtagtgagttataattaagttttatttttttggggtttttgagatagattgagattatgttttaaaaggaaaaaaaaaaaattacggtttttagggagtttaaatttttatggtggagatagggaataaataggtgaattaatatgtaatgttaatgttagtgataggtgttatagaaaaaataatttaggttgatgtaagagagtggtttttaggatggggatgagattagtgagggagtgaagtgatagtttttttaaggaggtgatatttgagttgagttttgtttaaataataagaaggaattaggtttgtttatttttggggtaagaggagggagtttgggtgttggggtgttgagggatagtataggagatggagtaggatggtggtcgtaaggaggaggggtaaatagggaggagatgaggttagagagatatttgtatgggttttttgaaaaataattttttttttttttttaagagattgggttttattttgttttttggggtggagtgtagtggtacgattatagtttattgtagttttggatttttaggttgagtgattttttttatttagttttttgagaagttatgattgtaggtttatgttattatatttagttaatttaagatatatatatttttgtagatatagggttttgttttgttgtttagattggagtgtagtggcgagattatagtttattgtagttttcgatttttggttttaagtgatttttttattttagttttttaagtagttggtattataggtgtatattgttacgtttagttaaagtttaatattttttgtaaagataaggtttttttatgttgtttaggttgtttttgaattttcggttttaagtaatcgttttgttttagttttttaaagcgaagggattataggtgtgagttatggggtttggttattgtatataattttgtttttattttttagatgagaatattgaggtttagagagaaaaataaaaattatttgttttaaattaggaagtaggtaaatggtaaagttagagtgtaaagtagcgatagagagtttaattattattatattgatttttaaattttttttgaattagaatgaaggtaggttgggcgaggtggtttatttttgtaattttagtattttgggaggttaaggtgggcgtattatttgaggttaggagttcgagattagtttggttaatatggtgaaattttatttttattaaaagtataaaaattagtcgggcgtagtggtgtatgtttgtaattttagttattcgggaggttgagataggagaatcgtttgaatttaggaggcggaggttgtagtgagtcgagattgtgttattgtattttagtttgggttataaaggaagattttattttaaaaaaaaaagaaaaagaaaaaaaaaatgaaggaagcggagggttttggttaaaaatatagtttttttgttggtttagttttttattattattaagagtttgatttggggttagtagggaatacgtattgtttattagattttaggagtttttaatttgggttagggtttgagaaattttagtttgggtaagggtagaggttattatttattaaagggaagtgaaattagtttgggggggttgtggttattatatttaattaaacgaagtaaaatggagtaagaatagaaaattatagcgtgtttattatgttttaggggttatttatattttatgagatttgttttagttaaaaataggtataagtgaatggttataggttttgtgttgtttataatagtaaaaattggagacgatttaaatgtttattagtaggtgaattgataaatatattatagtatagtcgtataatggaataatattcggtaataaaaagtaataaatttaatatatgttatatggatgaatgttaaaaatattatgttgagtgaaagaagaaaggtcgggtatggtggtttatgtttgtaattttaaaattttgggaggttaaggtcggaggattttttgagtttaggagtttgatattagtttgggtaatatagtgagattttatttttataaaaaattttataaattagttaagtatggtgttatgtacgtgtagttttagttatttaggaggttgaggtgggaggattattggagtttgggaagtggaggttgcgttgaattaattattaaattgttgtattttagtttgggtaatagattgagattttgttttaaaaagaaaaaaaaaggtcgggcgtggtggtttatatttgtaattttagtattttgggaggttaagatgggtggattatttgaggttaggagtttaagattagtttggttaatatggtgaaattttatttttattaaaaatataaaaaattagttcggtttggtggtacgcgtttgtaattttagttatttaggaggttgaggtagaagaatcgtttgaatttaggaggtagaggttgtagtgagttgcgattacgttattgtattttagtttgggtaataagagtgaaattttattttaaaaaaataaataaataaataaaaataaaataatttattgaatatataaattgggtaaaatttattgtaggttaattatattttaataaagttggtttttagttatgtttatgtatgtgtgtatgtattgagttgtaagatagaatgttttttatgggcgggatgtggtttagaaggttttttgttttgagatggagtttcgttttgtcgtttaggttggagtgtgtagtggcgtaatttcggtttattgtaatttttgttttttaggtttaagtaatttttttattttagtttttcgagtagttaagattataggtatgtattattacgtttggttaatatttttttgtatttttagtagagacggggttttattatgttggttaggttggttttaaatttttgattttaagtgattcgtttattttggttttttaaagtgttgagattataggtatgagttattgagtttagtttttagaaagttttgagaaatttattacgattttagtaataattagaaaaattgatttagtttggggtggagagattttagggttaagtttttagaattttaacgttgattattttggtaagtttgggtttagattttttttggtgaaggtaatggggttgggtattaggggtatttagagatgttattttttggttttgattttgggtgagtgattttattattcgggttttggttttttttaaatttgttagggagataaagataggattttattttagaagatagggtagtaaggatataattagatgttttaggaggtagaggtttagggtatagggtttggtttagagcgatagtttaagagttagtggttatggttatggttttattagggttggggagggttcgatttatggtgtttgttgaggggttggggttggggagagagtttcggttgaagttaggtttttttttagttgtttttattttttattattagttttagttgtttgttttttttttttaggaaatcggattcggttcgttagggttttattttggggtaggaatgttgtgttagtattttttgtgtggttttagggtttcggggggaggggcggggttagcgtttggttagtagatttagtttagaggagaggacgtttttttttatatttacgattttatattttgcggagttattgggaggggaagatgggaaggataaggagatggtagtttttttttttttttattttttttttattttttgtttaggttttagaaaagtcggttattttgggagggatatttgttgttttaatttttatttttgtttttagttggggtttagatgtagggagtaatttagttagagagatagcgaaaattagagggttttaagttaagaaatagagatagggagattgagatggaggaagagatagagatatggagatatttaaagagatagatggggagagatattatttagagattttgtaagattattagtagttattgggagtagtttttttgtttaaaacgaagaaggaaagaaagatttagaatttaagagattttttttttataagatttttaagggttaggagttggaagtagttgtgttttttagtttattttagttttttttttaagaatttaaataggttagagtttggagtaaaaagagaattagggttaaggtgggggtggggggatggttaaattaagtttaggaattagaattattttttttaagtgtttgtttttaagatggtgtgagggtgtgttttttcgggggttttttttgtgggggataaatcgttaaagttagaagagagggtaatcgaagattttttttttattttggagtttttaattttattaattttttgtagtgagaaaggtgaaggagattaaaagatagagtgatagttatttaaagtgatataggaagagatttcgagttttagagattattagtaagtcggatagggatatttagagatagagagatttttagagagttttaagagatagttttataggtttttaatttagagatacgtatcgttcgtaggaattggatttcgttttcgttttttgcgttatttatgatgtcgaggtcggaagtttagggtttgaggtcggggaatagagggagggggttgcgggttgggcgggagggttgggggcgggttggggtcggagatttttggagatattagaggtattcgcgaggtagatggaattgcgaggagtatacgtatgttggatagagatgggaggaagttttcgttttcgggttttattggattaggatttttcggttattttttttcgtcggagttttgtttatatattttaaattttggttggaggtttgtttggtcgttggtcgtcggaggtggggtgggagagagagtatttaggaggtatttgcgttttttttttattacggtaagtaacgtgttattatttttttattttatagagggtagattgaggttttgagtggggaagtttttgtaagatattacgtagtagagtagggatgtgtattagattttttgattttaaaaagtattaaatatagtgattaagaataaggatttcggtcgggagtggtggtttatttttgtaattttagtattttgggacgtcgaggtgggtggattatttgaggttaggagttcgaggttagtttggttaatatggtgaaattttcgtttttattaaaagtataaaaattagttaggcgtggtgatatatgtttgtaattttagttatttgggaaattgaggtaggagaattgtttgaattttttgaattcgggaggtagaagttgtagtgagtcgagattgagttattgtattttagtttgggcgagatttcgtttgaaaaaaaaaaaaaaaagaataaggatttcgattttaagttagataatttggatttgaattttatttagttttgttatttttttgagttatatggataagttatttagtttttttgtgtttcggtttttttatttagtaaggggaatattaatagtatcgattttacgtggttgttgggagagttaaatgagataattaattaaatgagataaaatttaaaatagtgttagtgtttggttaatgtaatgtaagtgttgttattattattatttatttatttatttatttattttgagacggatttttgtttttgttgtttagattggagtgtagtggtaagattttgatttattgtaatttttattttttaggtttaaacgatttttttttttagttttttgagtagttgggattataggtatttgttaatatattcggttaatttttgtatttttggtagagacggggttttattatgttggttaggttggtttcgaatttttgattttatgattcgtttattttagttttttaaagtgttgggattataggtgtaaattattacgtttagttttattaaaattattattaggttagatatagtggtttatgtttgtaattttagtacgttgggaggttaaggtagatagattatttgaagttaggaatttgagattagtttggttaatatggtgaaattttgattttattaaaaatatagaaattagttgggtatggtgttatacgattttaattttagttatttgggaggttgaggaataagaattatttaagtttaggaggtagaggttgtagtgagtcgagattgtattattatattttagtttaggtgatagagtaaggttttattttaaaaaaaaaaaaaaaaattttttttattaatatgtagtggtatatagtaagttatataaaataatattttatagttaaataaaattatatagaaatcgttttttaaggtatagtaggtttttaggtgttttataattaaatattgatgttaatataattgtaataaatagtataaaagtttgtgttatattatggaattatataatttggtattatataatgtataattatataattatatatttaggttaatataattatatagtataatataattttatgttgtatttgttatatattatttaacgtatagttgtatattaaatattgtttttttttaaaattttatgtaaatgtaaaatgattttgtgttattgagtattatattataagatattaatagtgttttttatttttgttagttattattatgtgttttaagatttatttttgttgttttgtggatatttggtgtgtgatagtggtggttttgtaggattttttggtgattgattttttttgtttttttatttatttttattgggagcggatatttaggttgtttttagttttttcgaaataatgttggagggaatatttgtgtattggttttttaggaagttgagggagaatgttttattgtgcgtatttagaagttaattgttgggtgatatatttatgcgtattatttgtgtaagtagtgttgggtagttttcggaatggttatttattattagtgtatgagggttttcgggtttttatatttttaatttttatgtggtatttttaatttaattaatttttgttagatttatatagggtgatttattgttttttaatttattttttttattttatttttagagatgagattttattttgttgtttaggttggggtgtagtggcgtaattatggtttattgttgttcggaatttttgggtttaagggatttttttattttaatttttcgagtagttgggataataggtttgtgttattacgtttaattaatttttaaattttttatagaggtggggttttattatattgtttaggttggtattgaattgttggttttaagtgatttttttattttagttttttaaagtgttaggattataggtaagagttatcgcgtttggattcgttgttattttaatttttatttttttgatgagttattaataatttttagtatttttttaagtgtttattagagttttgggtttttttgttatttgtttattgtgatttttgtttatttttttttgttttttttttttgagatagagttttgttttgtcgtttaggttggagtttagtggtattatttcggtttattgtaattttcgttttttgggtttaagtaatttttttgttttagtatttttaggattataggcgtatattgttatatttggttaattttttttgtattttagtagagatcgggttttattgtgttgtttaggttggtttcgaatttttgagtttagttaattcgtttgttttggttttttaaagtgttaggattgtaggcgtgagttattgtgtttagtttaatttttgtattttgagtagagacggggtttcgttatgttggttagggtggttttgaatttttgattttaggtagtttatttatttcggttttttaaagtgttgagattataagtatgtaattttatattataggcgtaggagttattgagttcggttatttttttattatggttgttgtttttttcgtttgttgatttgtagttgttttttttatattttttttttttttttttttttttagatggagttttattttgttttttaggttggagtgtagtggtttaattttagtttattgtaatttttattttttgggtttaattgatttttatgttttagttttttaagtagtcgggatgatagagtaatatttattattatattttgttaatttttgtatttttaatagagacggggttttgttacgttggttaggttggtttcgaatttttgattttaagtgatttgttcgttttagttttttaaagtgttgggattagaggtatgagttattgtatttgatttatattttagatattaatattttattgatttttaaatattgtaaatattttttttttttttgttatttgatatttgttttatggtgttttcgttaaaagaaaatttgtttgtaattttagtattttgggaggtttaggtgaaaggattttttgagtttaggagtttgagattagtttgggtaatatagtaagattttatttttaaaatttaaaagagaaagaaagaagaatagtaataaaagaagaaagtttgtatttgtatgttattatgtttattatttttttgttttaggagtttttgtggtttgatttagaagtttttttttttgtagttattagtacgggtattgtgggtatttttggttagttcgaggattaaggttgtttgtgtatagtagaaataagtgttaggatttttgattttttttttgaggtttttttgggtttttagggtttggagatattgttatattacgaagtttttgtttagttaggattgttaagttatatttaagatgtaggtgttataggagatggtttgagagagttagatagaatattatgaggttagggggagagagggtgaaaacgggtaggaagagagagtttgaagttatggtaatatcgcgtgatggaaaaattaaagacggcgagtttagtgattgtttaaatgttttgtattggaaaaaatatatatttacggtttttttttttagtgaaaaaaaaagtggaaaaatatatttttgagagaacgattttaatgaattgttaatatgttatgtttggtagaattatagtaattattatgatttatttattttatttttgggtattgttttataatatggtatattttatgtttattaaaagttagatgtttaaatagttatagtagttttaatttggaaataatttagatgtttattataggaaaattgattaataaattacggaggtcggggatagtggtttacgtttggagagttagtaatttggaggtataggaaggacgattgtttgagtttaggagttcgagattagtttaggtaataaagtaagattttgtttttataggaaaataataaaaaaaaaattagtagagtatagtggtgtgtatttgtagttttagttatttaggaggttgaggtgggaagatggtttaagtttaggagttcgaggtcgtagtgagttaggatttcgttattgtattttaattttggtgatagagggagattttgttgtggagttttaattaagaaaaaagagttaggttggtaggattaaataaaaataaaaaaaaaaaatagagaagttataagtttgttttttttttatagtttaggatatatagtttttttgtatagataatttatttaatttaaaat

SEQ ID NO: 1607 - DNA, 5998 bp, Artificial Sequence
  chemically treated genomic DNA (Homo sapiens)
ttaaggaaagttgttttggtgttgagtagagtaggggaagaaggaaaatagtttttaaggagttttagttattggttagtttttatgtgattttagtttaaatttatttttattatttggggtggaagggttagaaattttaagtttagattttggaagtgtttttgggaggaatatattttttttttgtgttttaaagatattttatttgatgattttttttttgggaagtaagtagtttatagttaaaagttgggatttggttaggtaagtttagatttttcgtttgtaaaggggaggtttagttacgtgttttttaagttttattcggaatagagatttgtaggggtgtaatttgagcgaggtagaagtgtgtttttatttggtattttgggggtttttgtagagtgaagagatggggttgtgatgtgatggataagttagattgttttttttaattgagttggaaggatttggtaggagattgttttttgtttttaattttgggggagggtagatggggaatgaaaggggagtggtgtttgagtttagattggtttttgatgtgtgcgtggataggtgggtaggtggggtttgtaatgggtttgttgagggatttttgagggtatttttagtgttgatttatttgtgttttttataattgtttttttttttttttgggaggttataaatagtgacgttttgtttttaagtttttatagttgaaacgttagtattagtggtgagtgttagttgtttgggttttgttttgggttgagtgttagggtagtttggggatttttagtagttagtttgatttttgatttagggtttggtattggaagtagagagatgattataggcgggtttgatacggggagggaagttagatatagtggacgtagaggtttttttatatagtgaggggttgttggggaagtttgggtagggaggtgtgtagagttaaggtttgttttggggtgggagtattgggtttaaggttttggttttttttttgattaggttttttatttgttttttgtttttttgttttatttttgagtttttttatttttgaggattatggttttttttttttttgggaatttggatattttgttttaattttggggtgtttataatgaattaaattttggtagtgtttggtattttttatttttttttttttatttttttgttagttataattatgttagttatttgtttttagtagggggtttagtagtgggtaaatttttagggagagttttggttttggtcgttttgtgttgtaggatttttgtttcgtgggggaattaggagtgagttattgggttagtatggaaaaaatttttgtttttttggttgttttcgggtttttttaggttggaggtattattttaaaagggcggtggaaggggatagtgtaagtggggggaggtgagtaattttaggaagggttttttttttaatagaatagagtatttttatatagaatttttttgtttaaaatttttaggggtcgggagggtaattttaggggaggttagttttagattggtaaatattcgaattggttaatttttaagagattatttggtttaggtttttgattgggttagcgaggtgagatgaattttaatttatagattaggtttcgtttttgagatttagagagataaatggtttattaaggttgtatagttggcgataggtagagaggattttataagttttttttttgggtgtagttttttcgagtttagggtaggaggtagggtgagggtagtggtggtgaggttgtgggggcgttttttagatttgtttttttttgttaaggtttagtttttttaagggttgagggtagagaagtatagggttaggttttttttgtgtaagtttttgtagggagggaggtttttagggtattttatgggttggggtagattgggatcgagttatttttgggtgttggggataagaagaggtggtagataatttgagagtgtttaaggagttttacggtggggtgtgtgggtggtggggtaggatgttgtttttttgaggagtttatagcgatgttggggtaatgagatttttatatggggaaataataataggatagtagggggataaattaggaggggttggtgtggtttgggagggttatttagaggagggggagattgcggggtttgaagtttgatggaggttaagatgggtttgggaatagtttttgagaaatatagagggtagaggtgagttggggggttggtttggaattttgttgtgagttatatttttgttttgtgatagtgaggatggttaggtttttggagtaggcggtagttgttatcgtgtgtattttttaggaatacgtagggcgttgtggggataaatataagttttgttaggcggagtttaaggagttgttgtagaaggagttggttatttggatttcggtgagtagttagagtgttcgtttttttttttttcggggggaggtattgtttagattttgtaaagagagatttggggataataagtatgagtataggatagtaagggagggggttggattgtgaggagggagtgggagggggagaattgatatagtagaaattttagtttttttatttgtaaaatgggatgataattatttttgttgttttgtagagttgttgagaggattgagtgagagtattatgaagaatgtttaatatttggtaggtatttagtagtaaatagtaggtgttcgattaataatttgagaggatagatttgggaggggattgtaacgagtgtattattagagtagggaggttgaagtcggtttttagaagggtgtagtttggggtggggtgggtttatttgggagaggaaggagggaggtggcgtgtgaggttgttttgttttttttattttatttttttattttttttaattttttttttgtatagattgagtttcgggaatgtgattataataaatttatgagtgttttggatattaataaggattgcgaggtggattttgtggagtatgtgcgtttatttgtttgtttttgtttttattgttacgagtattttaaggattgttttttagagtttttttgtttttagtagtttttgttttagggggtgcgttggttgtcgggggttgggtatgttttttatatttttttttatttttttttttgtattttttttaatttggatttgtttaggttttttgcgattagttaatttattttatttaggaggtttagagatgtgagggttttttttttaggatgtttagcgaatgaggggtagagttattttggggtttagtttgtttgtcgtatttttgtggttttttttgtggatgggaggaggcgggatttgttttgaggttttcgaggtttagtagagcgtgtattaatgagattacgatgggaaagggtttatttaatttttaataaaaaattggtattagtttggttttgtttggtttttttttgaggacgcgttttttgagttttttgtttttttttggttttttttattgcgggaaggtagttgagggtaggggtagggtgttttttgagggaagttgtagattttgtagaaatgtagtggtttttagggtttagtaggagggcgtggggataaaataaggatttttgttttttttttttttttttttttttttgggatttttgagagaggattgtttgagttttttttgggatttagtgtttatggttggaggagggtggggtcgtgggtgtagtgggggtgtttgttttttgtttcgggttgtgggagtttagagagtagtattaatgggattagggtgtttgaggtgttttttttagttaggaaggggtgttttgtatggaggggtaagggaataatttgagttagtttttatttttgaagtcgtagttttttgagggttttaattttttatttttaatttttattgggtttgtagtttattttgagaggttgattcgaattataatttttttattttatgttattttatttttaattttttattttaatttggattttttatttttgatatttattttaattttaaatggttttttttgatatttttttcgaatttgagatttattcgtgagtttttacgttttattgttattttattttattattattttatttaggattttttttattgacgtttttgaggtggttttagagttttttttgggtgtgagtttgtttttttttagattttttcgtttcgattttgagttttatttggtatggtagatagtatcgggtatggggatttttattttagtttttgtttttgaatttttatttttttaagagataaggttttttgtgttgtttaggttggagagtagtggtttgagtatagttaattgtagtttcgaatttttgggtttaaatgatttttttgttttagttttttgattagttgggattataggttatagttatgttgtttagttaattaaaaaaaaaaattgttttttttttttatagagatagaagtttttttatgttgtttaggttggttttgaatttttggttttaggcgatttttttattttttttttagtttttgtgttattatatttttagggtaattttttatttgttatttattattttttgtatttttttttttaggtttttatgggattattttttgttttttatgttttaggtataggttgtttttttttttatttttttaaaatttaggttgagttatgtatattgggtggtgtttattttatttagttttttgttagtaatcgttagggtttattcgttatttacgggtgtttatttgggaataggaggtttggttttacggttgggttggtggagggtgttgtggtatttatcgtattagtttatagtaggaaggtagtattcgtttttttttgttttttgttatgggtagggtttggttggggtataaataggttagatttttgggtcgtttttattttttttttttttataattttttttttttagcgtttttttttttttggtttggtgagttgtgttggtttgattggtatgtaaggggtgttagaggttagggttggggaaggagaaggggaggttggtgggggttagatgtgttaaagagatttagatgtgagattttgatgtggaattttgggtggattgtgtgcgtgggtgtgtatggtatatatatatatgtacgtaagacggaggaaaaaataaatagaaaagtgagtaagtgattgaatttgagttttttaggtgtttttgagatgtgggtttgtatacgttgttgttatagtacgtgttggtatgtatgtgtttgtgggtatttgtattggtttatgtttgttgggttgcgtattcgggagtaggaagtaaaggaaaggtagaaggtaattgtgggtttttgtttggtggtgtgttttatgagtttttgttttgtacgtagtagtttagttcgagaaggtgtatggtttttgtagttttttttttaatttttgtttttgttattttattttgtttttttttatgttgagagttaagcggttgtgttggttttttttattgtaggtttttgggtaggtttttagtagttatatttagttttgggagggaaaagaatggtaagggcggggtttttgtggttgagttgtgggagtggatagattgagtgaggggtggaaaaaatgttgttgttgaggtaaggtttgggaggttttgggagtttgttgttcgaatttttagagtttgcgtagcggattttgtaaatgtttattgtttagagtatgtgttttttattgtgtatatttttttagttaggtgcgggggtttattgttttgggtttttttagggagggagtagagtttcgttaagtgtttttggagggatgggagtggagtttggtattttgaatatatttttgaggggtgggattaataagacggtttttgtgttttttgtttttaga
